United States Patent Application Publication US 2008/0114160 A1 - sequence listing, part 62

SEQ ID NO: 22071 - DNA, 781 bp, Oryza sativa
tgtgtgtatgcagatcctactccttggaacagttgagttaatgtgcacttttgaggcgtgtctttcatacaaagtcatttatgcgagtctacttagggtgtgttcggatgcccccttttcctaaccctctttcttgttttccacgcgcacgttttttaaactgctaaacggtgtgttttgtgcaaaaagtttctataagaaagttgtttaaaaaaattaaattaatccatttttgaaaaaaagctaatacttaattaatcacgcgctaatggatcactccgttttccgtgcgttactgttccggttgggatctggagatagcgaacacagccttaggccattcccaacccaatgactaggatgatgtccatagcattaaataagctgtcacgtaggatgaaagatgatatggaaagtgcataaatgaggatagaggagaaaccaggtcttgcatgagacatggtttctacacaacattcaagatatcatgtgagataagtagtatttaatttaagtatgaaaaagtggtgtttgtattgtaagagtagtgtctaatactaatttcttgatgatgtggagtttatgaaaattatgtctaatgtcttgggttgggactggccttatcatgctctataaatcttttcctctcatctctcttcttttaaaattttgcaacacggctaggcttttgagcatgatatgcctcttgtgtttctctggcagtactctttgttattaggtgtgcatactactagcgcaggctgtgcagtgggattagccg

SEQ ID NO: 22072 - DNA, 733 bp, Oryza sativa
atcctaatgaactgcgataatcaaacagtgattattaaagtgaacagttcaaaggacaacatgaagtcatctagacacatcaagagaagactgaaatctgtcagaaagcagaaaaactccggagtgatagcattggactatgtccaaacggctagaaatctggcagatcagtttaccaaggggctaccacgtaatgtgatagacagtgcatcgagggaaatgggcttgatacccacctaaggttgcataatagtggaaacctgtccattgtgatcggagatcccgtgaatttggatggtgaaacaaattattgtgtgactgagagaagagacccttgaaaggggctcattttcatgatgtgcttctcttctttcctgcatggtaggatggcttatgtcttaatgtgatccgagtggcttttccaagcagagatgttgacctgcagaacatctcagaaggaacacacctatatgagttcgactgctagtcacagtctatgaggtttgggcaatctctagatactcatgaaaggcctggagtttgacttatatgctccaaacagaggggatgcgaacggcagcccagtaccagtcaaggttctgagtgaaacctgatcacacaaaacttacaattcaaggcatagtccattgttcagttgtggtctgatgtaactcatttcctaggtggaagttcaacttaacagtctccaccaaaaccctggtatatcaaacag

SEQ ID NO: 22073 - DNA, 1421 bp, Oryza sativa
tttgtgcacccctggattcaactcccatgggagcgattttttcaagatttaacggctttgtgctttcaggggtaggtaacgtatccgtcgacagcgaggcgcctgtgatgactttgtccactccaggatgaattggccggcccagtcttcaaaaatgctcatagggatagggtttgcgtgcgtgcgatcataggggtgattgtgcgtgcgttgtgagtgtctgttttgtaccatgtaattctaaaaaaaaaccatcaacaagatccaagtgaaaaccgaagagaaaaaatgaaacactaaaaaaacccattaaaacacttcgatctaactaatgaaacatccaaaccatttttgttcactggcatcgagtttcgcaagcaggcgtgctaagacagccgctagcaaaaataccatttttgcaggtggcaaactaaagaggatagccaatgaaaacatgttttgggataaaaaaaatttgaaattcgagatgtcatcgtatgagggtagggtagggtcgacgacagcggtcggcctgcgaggatcaacggccgtggtccagaggaccaccgctgcctgatctacctccttcaccgcccctcatcttcgccgccgtggaggcggatccagtggtatcgaacaccaccccagtcagatctatcccctacactatcgccacccgtctcctttgccgctatggaggaggatatatgccaaggggaaaccatagccgagaggaagtcgttgccaccagatccatgccatcgtcaccccccgccatcgaattcgcgcggccgcaacccactgtcgccggatccacgcccccgtgactcgtcggcgccggatccgtgcccccgtgacctgctgctgccgaatctgcaccctcacgacccacgatcgctagatccggaccgagccacccctgccctccagccaaatctaggagggaggggagagccgggccaccgtagcttctccttgcagcgcgaccgtctcgttgtcgcggccgcgtacgggacagaaccacaccaccgcctcccctccgctgccgccgacctccactacgtggctctccttgccgcccccaagcatggccaagtcatgtcgctgccgctgagcgccgccatcgttgaccgctgctcctgcaccacttcaccgctactagctatacagagagagaaatcgcgagagattcagagagagaaaaataaagaaagaaagaaagaaagaaagaaagagagaagggttggatctggggggttgagaaaaaaaagagggagcacgtgctgtttattctctcccactacttttgcaagggagctcccaacaccccgccagtaaaaattgttttttttactggcagcatcttaagagcaccgcctgcaaaaatacctctatttttgtcggcggccctcttaacccgg

SEQ ID NO: 22074 - DNA, 1051 bp, Oryza sativa
ctgcagcccgaataatcgtgttttggttgagatggctagaacgatgttggatgaatataaaactcctagaaaatgaggggagggaggcaattaacactgcttgttatatttcaaatcaagttttcttgagatctaaacttggaaaaacttcttatgaacttcgatttgggcatcaacccaaagtttcacatttgcgtgtttttggttgtaactgctttgtcttgaaatctggaaatttgtataagtttgaggcatgttctaccgatggattgtttcttggttaccccgcacatactcgtggctatcgtgtacttattttggggactaacaaaattgtggagacttccaaagtttcttttgatgaggctagtccaggtactagacccgatatttcaggtacactatcacaagttcagggggaggatggtcgtatttttgaagacgagagcgacgacgactacaacgacgaggtcggctcagccggtcagaccaagcgccaggccggtcagaccgccagcacacctccggtcagaccggcccatgaggagcggtcagaccggccagggtcatcggctgagggttctgttgatgctgatcgagatggtcctccggaaattactacttcgaccagtactgatacagaacgtggatcaacttcagaagtcaatgctcctttgcacattcaacgacgacatctgccggaacaaattattggtaatatatgtgagcggactacaaggtctaaggtaacgactcatgatgtttgtgcaaattcagcatttgttgcttcttttgaacccaaagatgtgtcacatgcattaactgatgaatcgtggattaacgccatgcatgaagaacttgaaaattttgagagaaacaaagtttggactttagttgaccaccttctacacataatattactggaacccagtgggttttcaaaaataaacaaaatgaggatggtttgattgtgagaaataaagctagacttgttgctcaaggttttactcagttgagggtttggattttgatgaaacttttgctcctgttg

SEQ ID NO: 22075 - DNA, 1345 bp, Oryza sativa
caaatgtgccatacctcatctcaatgatcttttgtttggctctccaggcctttgcatagcttatggtgtacttgaatttgttctcgatgtgcctaataattgattttggttcaaagccaatgttaccaacaacactgctgtacatctcacttgccacaaaagctgaagtgatgtttcggtgatacttctccaccccttgtaagtagcacttgtgctcggtcacaatgctaactttccaataatcattccatttacccttatatgcatggacacgccacggacaatcttccttcatgcacctcacttcatacacataatttgttgacttgaccaccctaaactctctctgcaatgaaactgcccaatgcttcaccgcctccttcatctcatccttatgagcataccttgcaccctcaattacctcgtactccttatactcccagggtacatgatcaccctctgatataacaagaccagagaagtcctcatttgcccaatcagtggccattacatcaccttcctcatcggatgatgcgtcgtcctccgcttgctcattatccgaatcttccctctccatttcatcaacaattataccgactctctccccctcatccgccatgcccatggcctgctcctcccttggttgattttcctcattttgcatcgatggtccaacaacatcccctgcattgctaggaccctccacatcttcggtttgcattgaaacatttgtatctttctcttgtaccgacacaaatataacgaggggccatgaccgttcaaaagccatttccacataccgtctccaagcagcagtgctgtccatcggcattagttcccaaaaataaccttctattgcacgactcactacaacagatactgacattgtgtagacttcttggtctattctaaatcctctcaacaaccaactataaattgactgaaatgttctctccgcaggcctatcgatgcccttagatgtcattacaaaatctgacagatcaacaccatctggaccaaatctaatatttccttcaccgtgaactatctgaaatgtgaccttacttgacattgtgcctgatgaaaacaataactgcgttaacctcgcatttctgtactacgccctaagttacattctctacaatattgttctctaaatttctaaaagtaggttacattctccagatcaaactaaactacatcttacaattaacactactgtctatgtctcaattcatactatttttatattctatgctctggatctacacatatgtgctgtgtgctacagatctgctaaaatatatggaactaaaactaaaacgcaacatatgtactcaaacgt

SEQ ID NO: 22076 - DNA, 7036 bp, Oryza sativa
acatagtaggcttaggtgtgttatatatatactagtttgtacctctttccaacttctactctctcgtttttcacgtgcacactttttgaaatgttaaatattgtgtttatttcaaaaatattctataataacaaaaggttatatttttaagttttttagctaataattagttagccatgccaactgctctattttacgtgaagggaaaatttttgaaccgctactatatattgaacacatccttaaaagacattgagaactttagattcacattatatgttacagttactattgtaattgtaatgttttttcttcaattaatgccccaacagctctagctagggcgctaggtggcggatcgtctgatattgcgcccaacagcaactcactagaatgctttagcttttgagaaggaaacaaataggtggaacactactcccagtggatgatcccgaagtattggcattagataatgtaacagctttgttgtgatctctagactatattcaatatgtagagtgtgatgctaccatcgggtaccggacaactagaataatcacatcatgtgagtaaagctgtataaactctacagagtctaaaactaatcgattagccatgctcacggttatgagcggcttggtgaaatgatacaagtatagtgttggtgatttactaaatgatttgtgaaatgggtatggtgggtaataatgatgattttgcccggtgcgggctgagaaaaaaagttcacttactgccatagaaggcacaagaatgatactatgatgatatttatgctactattattatggtttactctttgatttaaatattttgttgtaatatattattatttactattgcgaaacaaaattttctttatgctaaaaatgagccacaaatatagtcatctttaatttcagcttgcaatagtcctaggtttcccatggcttgggtaggacttgccaatatcttgtgtattggcccatccctcgttgtgtcttttagtcttatttgtaggaagcgggtgcttccgtttatcggagtttctagggatggttcttttctagggtgattcttagtaggttgcatttgtgatttgatagatacgtataccggagaacttatgtatattttccgctgcgtttgaaactctttttgtttggccaattggtggaaccattttgtaggactgttgccacctctaagttataagagccactttatgtacttatgtgccatgtgcattatatggatttgataacaatgttgtagatgtttatatggctagttggcgggactagtacagggtacgtttctaggtatttgggaattaaatccccaggtgccgatagttttaaagtggatctgataccatggttgaggtaccaaatatgatttattctctaaataatatgaatgaattaaataatcaaacagtactggatttggtggaggtgttgatgggtggtttgaagccaaaccgagctatatatatataacaatcaaggatacacaaatattcaagaaaatgcacacaaatccaacataaaagactcaacttaaatagaaaaatattgagtgttgcacaacatgtaaaatattgttgtgcttcctctgctttggcctatgtaaatccagcaccactttggacatctgctactagagagaggctagagttcatacttatctcattgttttttttaacaagcctatacatgagcatgtcttttgcataaccatgataaatctgtttattattaggtgcattaatacaatctttagtagtcttaggaggcatcggtaagtttgtattcaccgggaaaattcaaacatgtattagattgtaatatgcttgctctaaatgccccaatagctgccgagcggtggatggaggtgaaactgaaggggtgccaatcactagggactaaacatggaaatgtctatggcctttgtcctgaaggactgaaaggagtcttttgtcgatccctgtcttcttggaaaaagatcactgtgttgataaacgagttatcatgcttatgcttggataattaaattggcccctttagccacagagttttaaaagaaatattgtacagttggggctaagcacagacatacaacagtagtagagaagtcttacataaaatacgttcaatggagaatttttgtcagatccatttatttatctccagctaccatccatgtgttatatatatgcatgtgtttattaacgcgtatgtacaattttgcctcttctatgccatcccaaaagtaaccatgttagtggcaaccaaagaaatcatttatttccttcttccctcggttttgacgtagctatatagagagaatccattatatgcccctgagtttactctagttcaatgatttcccatcgactttgtcttcctctataatataccaccgactttatcaattttttctataatatgccatcaggatggataattttcaaaaaatacctaaaatgcccttcaagccatacaaggattgccgattgattggctctttataagttttgaaaaaaatatgaaagttttagtgtagccttcttatacgatataaagttttttttatatattttaagatttttttcaaaatatttttatgtggtatatgaaagatgaatcacatacacaaaacatagctacattagaaaaataattttgtgtagcatatgaaagattatttatataaacaaactcaacgttacagtattttattagcatatgaaacataaattatattttcaaaaaaattaataaatgcaaattgaaaatcttaaaatccacacacactttatattatgtgtggggactatgtaaaaaaatttatattcttacaatacttctggtaggtaaattaattgtcaaccctctatggcttgaagggcactttatgtattttttaaaaaatatccaccctaatggcatattgtagaaaaaattaacaaagttggtggcatattatagagggagataaagtcaatagcaaatcgttgaactggagtaaactcaggggcatagaatagatgctctcgttcctatcatgacttatatatgttgcttgtctgctcagtgcttacaatatagtcacggacagtcatctgatttggtcttgctctaattatacacgaacgtttgttcgtccatccatatcgccagtggtagttagctaggtgcaaagcgtagctaggcctaggaggcgatgggaaattcggattcagcttattcaggatactgggtaatgaattatcagattgttgcacacatcaatacatgaagcactcaatccagtggaatggtttattgttgagggatatccatcaggttaaaagtgacattattattttatcatgttatcaacatcttttccggctaacaaacctttttttgaaaacctttccagctaacaaacctaaagcctaactgaggttcgccatgtataacttcttatatgtacatatggataatgtttgggcatgtctccatgtattgcatacatgccttttaatctttggtatgcacaatatactccctccatattttaatgtatgacaccgttgactttttgtctaacgtttgaccattcgtcttattaaaaaaattatgtaattattatttattttattatgacttgattcgtcatcaaatattttttaagcatgacataaatattttcatatttgcaaaaaaaaagttgaataaaacaaatggtcaaacgttggtcgaaaagtcaacggcgtcatatattaaaatacggagggagtatatattaggcttaggaggcaaggagtgtaatgctgagtctaccctctccgtcaccattgagattatcctatatatagttgaaacttgaaacataaacttgatatgcatttacatcaattcagtgttcaagcatagcaagtgaaagaaactggagcatttacatacgtttacatcaatttcgcatgtactataaaccaaccaggcaaccacatatgttttacgtgtagttagggaaacaccttagctttacttcaatttcgcattcaactacagtccagttctacgtgtagtcagggaaacaccttagctttatcatggtggtgtagttgtggtcgtatgttttttgcacactagaactcaaattttgtattttgcagttgcacacatggaggtccttttttcagtatgaattttcgcttctgtgctctgttccggcctacataaattcagcatgaaactttgcacatctgcttcgattccactgctccatctcattgatctctgcctgacatctctgtttcataggttcctagttattactcctagctcagtaggcttatgacacattgagaactattgatccgtatgcccatctaatagaacacttctcgttttcaccttaagaacaggggagagatggacaactgcttactaactgcagaggagtcttttttatagttcgggggggggggggggaggtgcttctagtaactcccttcctattaaacatctacagtttattttaatgggtagcgtggagattatgggtacccctatagttggccataaggcccgaggcccgaaggcccagcccacggcacgcctttttggcccggcccaagcacggcacggcccgacttgggtcgggcccgtgccggcccggctcgaccgtcgggccgtgcctgggcctccccaccagcacgctgggctggcctggcacggtcgggccggcccggcacgatgggctggcaggccagacccggtacacaaagtatagggactaaaaatagacatataaatgtcaatgtctaaagaatagggaccttaaatagacttattttagctatttatataccacatcacaaagaagagggaggtaaaatagactttttttagctatacaatgtcacagcccaataggagggagaaaatttagacttattctgaggaaaagcacgatggcccatcgtgccttcgggccggcccggcacggcccgaggcgtgttgggccgtgcctgggctgtgagtgcggcacgtgggctggcacggcacggcccggtgtgtcggtcgggccgtgccggcccgacaagcctcggcccaggcacggccgggcctgggccgtgctgtgccgggcggcccacatggccatctataggtaccccatacctacacggtatggttatccgactagttataggggatagcttgtatctatagaatatataacggatcatgacttgggtattacgttaccttgtatattatagaacggcctaaagtcctgatttgataatattgtaaagtaaatttaggataccgataccgtattggttatggtttctatgttgtaatcctacctccatcctatataaggtgggcaggagaccttctagggggatattgacacccctgatcgtcggatctacaatacacttggcggattcaaattctcaaatagtaatagggtattacctctcattgaaagagcctgaacctgtttaaatcctttgtctccgcatccatccacttttagatctcgtacgctacccctttatattgctgaaatattgtttcgacaggtagtttgaattgaaagtagtggctttctacgttgcttggtatgtataagaggcattgatcaaatagaatctagcgaactgtgattaaaggtactagtgagagggtacttaaagttgtggatcgggtacgaaagtggaaggttagaatagcaatcggcttcccattatgtcctccttagttttagggcaaattagttcatctgttacggtaattttcattgaatcattattttatcgtctggttgaatgaccatttgttcgatttgtgtggtttttggctgcaacaattgacgcggaacaaaaatgtgatgtaaattgactaatagatcgaatctgatcatctgaagagtgtgcatgagagatttaatttgtcgttgtcaaatggaactagaaggcatcatctactaagaagagtaattctgcatcatccccacaatcgtgtagcctctgtatggtaaaaacagcaagtcaaccagaaatactcgtgattgaccaaatgaacgacggcatggatgcaacatctgatggcataagcaagcgatgcagagtaaagaacactccaggatctctttgccatctctttggagttataacgcaaaactagttgatcataaaggtatctaacgaccaacgattttttctgtaaacaattactacctgtatttgtgtcattgtttgttaccaatctacccttcgagattcttctgtaatcaacggtggatactcatttctacaagaggtatgggagggacctttcaagcaccgtaaaagatctcgttaattcctatgtttcaacattaggtaacataaacagaaagtaacgggtaactttagccgtgatagccattccaatgtttcaacaactaatccaatataagtaacttgttctgtttaccggttgtctaaaattggactattgtgagagagcacgcatcatctttccgtggaagacaattacttggttgtagtataaatttaataaaaagataagttctctaaacatcatgagcccatctctgtctactgaaccattcagggcatcaaccatgcagctaatactactacggaaatgatttttctgtacaagaacccctataggttgtagatgaaccataactggttgtgtttgcaaaaatgaacccctattttcgcacacgtctacttatgatgcccttatgcaaaaaatcagcttataaatagccttattgttgcttgttatctagtcagatcatgagttatcaaagtgagagagcttctagacgcctagttgattgccgtgcactctctctctatttttgtaacctataatattgaagttggcatgtgtgatccgctactctgctctcaatactaacagttgtctcgatactctttatttaagcccatttcctagtgttattttgctaacaggaaatatgaaatttcgtgtatataaccagggctgcagga

SEQ ID NO: 22077 - DNA, 2776 bp, Oryza sativa
  unsure (1)..(2776): unsure at all n locations
tcaactgaattatcacatggttctctcgttgccgagttggctcataccgacaaagcttccgcttgatccaaactactactaaatttactcctagaatgcacatgtagacaacataatgcccgaaattcccatgcaaaaagggtgtgctcacctggcacgcatcgggatcctcccgccaaaccctgggatcaaatcatccaacccagccgatgaagcggccgggtcagggttccttttctcctccggcagcacctccttcacctccgggttgctcccaaaaccccccagcagatcatcgtacgcaggtggcggcggggcgtggctgcccccgaatacatcgtcaaaccgggccgaggaggtgctcttcaccccgggaaccccctcgaagaagtcgtcatcgtagaccggcttgtccaaccccggcaagacgaagggcttcgggttgggtggggcaaccggggcggagggctccttgaaggagtcaaagaaggcgtcgagggaaggcgaggggccgcccttgggcggcggggcggagggccccccggccccgaagaggtcatcgtacgnnagnngcnnnnncggtggcggcggcggcggaggacgccgatgcggatctggagttggaccaggcggatccggaggacgcggcggcgcgggcggccgacatgggcgccgccttcccctgcgggcgcagcccaaagtcgcgggccaggaggccctggaagtcgtccatggcaaccgcaacagcgcacagatcaccggatctgactcacgagctcaccccccgcccacaccaccaccacctcccgccgcggaggctaagagcgagtacgcgagggggggggtgtggatctggggaaaggaagaggaggaggatcggggacggcgacgagacagctaccgatctggggaatgagggggagcgctccttggcggcggcggggtggcccggtcgccggagacgccgccggagagatcgccggagacgggaggggagagagagagacggtgagtcgaggaggagagagagagatggggagagagagaagagagagaggtggtgtgtgggcgatatcatcgggacccgtgctttccccactgccacgtggagcccacgaggaaagttggagatcgtgttacggctacgggggattcgtccgaaccgcgtcactgacaggtgggtctggtttttgttggtcccacctgtctgtgaggtgtgagggtggtgaggagggcttgaacgtgggagtgccagcgcgtcggtggcggcttacgcgctgtgcggggggattcggtgtgtggggccgggggatgtttgggggtacgtggacggatgtgattggtcggaccggtgttgtgtggtttgtgcgatgcggtgtggtggacgaagtggatgggcccacgggtgggtgggtccacttgttcggtttgttcctttctcgcgctcgtccgtctccaccgtgctgatccgcctgaaggcgtaaaccttgaggtaccgcgttgctgtataaaaagcgtcaactaggtttactaaaatgaggtgttccgtttggtctatgcatgtgtacaccggtaacatgtgttttgaatacaaagtgtatcatttgactttttaccgtaagtaagccagtaagcctcatgctttntatactggacggtcgtcagatgccacatatacaatatgggctaaagagtttacataacaacgggtgaaatgagctagtactatataaaaaaaagtatattacaataataattttgttattgacctccataaattaggtgtaggaataagcacctcggcaaccactggacaagtgggcagtgtggaggaagcagtggcaacaatttgacttacttttttctgcacgtgaaataaaaacatttaacatattattaattaagtattaaatcgataagctagatttgtttgattttttttaaaataagcttttatataaaaatttattttaaaaatacaccgtctaataatttaggaaacatactcatagtaaacgaacgagttgcaaaagctaaactcactttcaaattggcaacagccaataagatgaccttttgttggctctaaagaataatcacctaaatttgaaagccatatacatatacaacaatatttctcaatgctttctttaaaaattattttatcttttaccgagtctcaaatctttctcttttactttggactagctcatgcacaacagctagtacttggtggctatgcgctcacactcaacgaacatatgattacttctttctcattcatgtaggatgtaggttgatatggcttgagtgataacgtttgcatgtaaactaaggttattatacttgccgtacatatatgatactaggatgaagtagatatacatttatgatagatgctcacaatttttctttgtggaatcacacttttttggatggcaattgttgattaagtatgcaaccataaggggtgtaaggaaagtcaatcattgtgcagctatggtttattgggcatttggatggagaggcatcttttttctcttctaatgaagtgaacattgaagaaaagtatgttattcttcgctccaagtatcaatgcatatacttgtaaaataagcatcacatcacatgtatatacatgtaccatgccaagaaggtaagcatcaccgtttagcgatgattcgaggaccagcatagtgtagaagagcggtgtacatcttaccttaatttatagaagaatggtatctcccgatgaataaaaccatatagaacacgg

SEQ ID NO: 22078 - DNA, 757 bp, Oryza sativa
gaaaattttgtagaaatgccatcgaaatttgtggttaaacctggtttctgctcaccgtcagagcatacagtattatctttgttttcacatagaagggaatcccaggagtatattatgtttaatcaacgactgctaattctctcttatgtgcacaggagcactacaaggatttgaaggaaaaacctttttttcccggtctgatcgagtacataacttctggccctgttgtttgcatggtatatatatttgtaaagaaccaaacatatttgtaactctgcactttgatcagtaaactgttttcaattaaatttattgttgttctgttctgtaaggcttgggaggggaatggtgttgttgcatcagctcgcaagttaataggagctactaatccccttcaagctgaaccagggaccatacggggcgatcttgcagttcaaacaggaaggttggaatcaaacaacctttcatgttttaacattattatatctaccacatctttcacattttagcggatatctctgcatatatatctctgtcaaagaaattaaatttcttatggactctgctttccaggaatgttgtccatggaagtgacagtcctgataacggcaagcgtgaaatcggtaagttctactccttttcccagtagtcatggtataacaatataaggtgcatagaatcatgagttttaagtactacgaagaatgaagtagttgacacagtgattaggatcatgttttttttttttaaaaataat

SEQ ID NO: 22079 - DNA, 628 bp, Oryza sativa
acaggctcccatttacttcttccaatgatttctattcacaacaagcaactagtgaaaattttgtctctcaggtggtgatcttcaatgctgtttaattaattcaaatagctttaagcagcatattttctcttaacactgtttacatgttttgcaggctcttcttggcaatactcgagcatctgaaattataaagctggctccctttttagcaccttttaccagcagagttaaaatattcactgtatgttgctactggtttgttgtttacaaatagtggtaagattggtacatcttttgggataatgtcttacatgtaactctttatatgtgcagtcacaattggcaaattctagacaatcgacaacatcccattctgctttgacaagacaccggttcaaaataagaagaaatcgacttctggaagacgcttttgatcagctaagcatgctttctgaagaagaccttaaaggaccagtatgcttattgtttctttcttcactattctttgttgatccagctcatgtaggaacattctttcaagtgtttcaacaaaacatttttcgttcttatagattcgagtggtgtttgttaatgagcatggtgttgaagaggctgggattgacggagg

SEQ ID NO: 22080 - DNA, 11357 bp, Oryza sativa
  unsure (1)..(11357): unsure at all n locations
ccattgttttttttatcacagatccgcgcccaaagcacacattttttgagaggctttcaacaactaatgccgaatgaatggattaacatgttcaatgaacatgaattccaggtactttcccttgcattatgnattacccagatagaaaaaaaatgctgtttttactccatatttttgcaaaataatatagtcctacagtggtcacaatgtctctatttctgtgtttacacccgatggctgtgggcttctggttaagtgaaaaatgtttgcatctacatgctaggttcagtagtagtttaagaattgcaccatttggttcatgacatgtagtagtagttttagaaaggtaaatgccaatcttactccctcaaaactgtctctggaaaacttagctgcacccaaaattatttttcatctcattttacttcttaatgacatttttgttttttgtttctcttcatgcaagtcatttcaagttgcgtttcgagagcaatagtgacgatataacctatattacaagtcattttcatttttttcatgacaagcacagttcttaaactcgacgtttaaatcagtcttaggtgcttccaacttatgcaaacaatgttcaaacattcgccctaaataaatctgtggacataagttgtgaaatgttatttatcatcctacaaaatttcaacttaaaacagagaaatgagaaaagagaaataccattagggagtaaagtgatcaattttcagtagtttatgggggtaaagtgagctgaaaaataatttagggagttatgtgctctgccaaaatagtttttctttagaaatgttcttcttagcactagcatagtatattattccttacttatttttgtggtgctctctggccatgttttgcccctgcaggttctcatatctggctctctagaaagcttggacatcgatgacttgcgctcgaacactaactattctggaggatatcatccggtatatgcgcttgaaataccatcctgccataattcaagaatactgaaatttcttattgaagtttgtgacaggctattctttcgttgctttgcaatgtagcctagaacactcttgaaatttgtgacattagaatcttcttactttcacaaaagctaatcaatagattcagttacgtggatcaccgttaatgttttcttagtgtttgtggcctgttattgattgccatggccaggatgtgctccccgtgaaccattaacttctttgaaacataactttatccttttcttttaatcgtgctattatgaactacaacttctgcgaactatttggcaattttgtgcatatttaacaatgtttgcagactgccggaaaagggaatattctataataatcaacttttgccacattctggatacccgggctttcaatcatgcatcaggatttacataatttaaatatcacaaatttacattttcaatagacataaaatttggaattttgaatattgaaattggttggtatagactggtttgtggggaacttgcatcatgtagcagtagagaactaccaaggtaattagtgtacttatgccattgatgaagacagaaactacaatatgccattgacgaggttcagttctaccatacagcaccggacaacccgttttcttcgttgtataccattcttgttactatcaagttagctagcctcagttaggtgctgccaatttttacataatgaccaaaataccatcacagacctcttatatcaatcctcttatgatgatattccctctacaatcaatatactcagccggtggtgcagacatcccatggcccactgtttccgcacagctgacagccgaaatcgtgctacctatccgcaggtcagctcgagctgcgctgaccctcggtgacgaggccattcagcaaggtgctttggcttcaggtgatttagaccctgcgctagcgaaactgaacccgagtgacctcaacacgtgaacgaggcacgcccaggcaacttggttgccatcccgtttctatgaagcgcgttgacccttgcggcatgtcgcaaattcctttttgttgtgctgccggcttcaaggaaacaagtcattttctaagttcgagaatggaatctttggtcaacttccctcagaaatcttgttgatttgcatatatatccagcagattaagcttgcgctattgctaggagttcactagggcaaactggtcttttcttggtgcctaatgaagattgcataacaaagtagtgacagggaatcagggtgccatatagggaagaaaatggttgtccaatggcatattatagaattaaactttgtcgacgtcatgttttggaactttgacctgttggtatattaatagattttctctttttttttccctgtcctcatttttgcgaggtctgaatgttcttgtatttttctggttaggtaaggattgacagtggtttttgtttcaggaccatgagcttattgatatattctgggaggtcctaaagagcttcagttcgcataatcagaaaaagtttctcaagtatgtgttcttttttgagtaatttgttccttgcctttttgagattcagtggttaatttgttcgtttttgtattacttgcctttttctgtgtgcatgtataatttctactctcaaacatggaaataaaaaagataagttgtaataatgtctgctgagtgtattgccttagtatctcttttagtttagtctctctatctacccctgctttccttgatgcacagatggcttatgcataaacatgatttatggctattttgaaataatgcttttctcctagtctcatcatgtggttgatacttgataaatgcacaggttcgtgaccggatgttctcgtggaccactccttggatttcagtacctcgaaccaaaattctgcattcagaggtttgatatacctctgttttaagttccattcattgaaattgttaattgcatcgtaaactctctctgcagggctggtgttcctggcatggaggaggaggacgaagaccgcttgcctacatcggccacttgcatgaacctcctgaagctccctccttatagaaagtaagtaattgtagtaactactgtaatgcatgttctgtcatccttatgggttgttcgctctatctgatcgtttcgattgacagcaacgggactaacggattcctttgttcttttgaacagcaagacacaattggaaagcaaattgttgtacgcgataaatgcagaagctggttttgatctaagttaaaatcggcttttggaccaaatattgtgcagtgtagatagtttctaggtaacagattaaaggcacccaagggccaaaacaccgacctctgggcccccttttgagccccccataaagtaaaaggaaggatcgattccaggaggaggtaagcgaaactgaagacacgaggagggaggcaacagccagctgctcaagtgctgattaggccggtgataaattattcaccttaaataagcagatgctgttgttgtaatcagccgtgaacttgtacatgtatttttaccaacgttgtggttggttgatgtcctctcgtggagttgtgggatgacatgttagttgggtttggaaaccggcatcagcgtcgctgtagctgtactttggtgttggtgttgctgtcatgtaaggtaaccctaacaccagctgcttggtgcccaggggctgggaatcatacataatcagtgaaaaaaaagggagagatttgtaagagaaatttggaatggttttgatgtcattggctgccttctgatgtttagatgtggcgcgtacaaggtgtttttagtccggcccaacccaaagtaaaatgcttttcttaacgcaaaatctaaattgagagccctcttgatttagtcataagagtactagtctattaagagtactagtctatcaagtaagttgaaaaaaaaatattcctaccacctatactttaaataaaattttcttttaaattactcatccgatttatgatccgattataccattgttcgtaacaattaagtctttacgataatatcccacgtgattatattttgataaaaaattataaattaattttataatatatctaaattatttttagattttactaaattacttcctagacatataaaagtaaataaattcaataaagcctaaaagtaatttacatatattatagaagtaacttaaacaaaaagaaagtagctttgtcatgatattagaagtaatatgtagtagggataaaaacatgactctatctagaaattaaattaatcagcacaaattataaattgactaaaaacaataataatagcaatcaactcatagaattatgaatgtataggaagtaatttaatcaaatctaaaagtaacttacgtatatatgataaacgtaacctacgtatataataaaagtaatttataaatattaatattttttatcataatataatcatgtaagatcttgcaatgaatacaatggtgtaatcggatcgtagatcagacaagtaatttacgagaaaaatttatttgaaatttagatgggtaatgactaataaggctgtgttcgttccagtgacattgggtgagaaagctcatcgttttccgcgcgcacgcttcccaaactactaaacggtgcgttttttgcaaaaaatttctataggaaagttgctttaaaaaaatcatattaatccatttttgcaatttaaaatagttaatactcaattaatcatatgctaatggcccacctcgttttgcgtatcttcccaatctccccaatccccttctcctcaaacacaccctaaggatgcaagtggaaagtgcgactacttttagtaaaaagagtaacgaggggatatacactgtactatttttggtacaaaggatggtcgttagttagcactaactagtgcatacgcttccattagtcgcgtactttccttaaatcttatttttgataaacaagtctgcacaggctagcctgtcgctttttttgcactctctaaataatacgttgtgtttatcgctattgttctaaaccatccaatttcaacattatcaaaaagaaaacccaattatatagcacctctcgattgtttttaattgtttatgccatgcacgtttgattatttatctcatttagaaaaataaataatttaagcatgacttatattttaatagttgcacatgaattttgaataaaatgagttatcaaacatatgttaaaaaaaatcaacaatttcatatattaaaaatcaaagatagtaataatgcatgaatatgaccagaaagcactgggagatgaaaacgaagcggattcggacgtatattgattatatcatatcctaaatcatatttttaagcggatagtgtgcagatgtggaacgaattgttttcagatgttgaaaatggtgtggaaaaatagatttaatttgacagatgttgcgcgtgtatgcaatcaacacaacatcgagttagtaatgcaagagacaaaaaaaacaataatcaatgaacgaccgatagtaataattatatgcttaattggtaaacaacatgactacatgatatctataaataaaaatgtagctatgcaagtgtgacatgagacggtaaaagcattatactaagaaatctaggttaattgatgaattagatcattggatgtgccatcttatgttatatgcaacatatagagtggttacatgggttgataatttaggattattcggcaaacgaactatcgaataatccgatagaaatattggataatccgtatttgttatattttagagataccatatccgcatccacaccgtatgtggtagatttctaaaagcccataccatatactttcagatggattcggagagggttggatcggaaattatccaatccgtattcacccctcaaggcactttcctttcaatctttcatgaggtaaaattattaccacaaacatatatatatcaaagcaataaaaataattttggaacgagactttcatgtataggttcttggtcgtcccaaagctgagagcactaaacgagcataatataatataataaagtagatctgtgcccaactatttacctaagctttttgtgagcacatttcttaaattattaaacgacgtatgttgtgtgaaaaacttcaaagtaaaagttttaaaaaccaggcaaatctatttttcaaatttatagtatttaacttaattaattgtgcactaattatccatcttgttttgttttggctaataagcttagctaaaaatctctactaaactcagccttatacataaaacattttatttcttttttaataatggaatatactttcggcctttgctcaacgagctacaaccaattattacaccaaatcgctcaaaaacgttcacaatctaatgagaccacaaaaaacacaccaatttaacataaagcaacacaaactaataagcaccaacacaagattaaaaatcaacaattattgaatcctattcgtgaaacctctatccaaagttggcgaaaatctgcatgactgttgacttaagtttacgacatgcataatttattagcttgatgacttcattacacctttatagttgagcccaacaccgaaaccagtacattgccctgaaaagtacttacatataagattctgaagatgctttatcaaaaaccatatcatttctactaagttatagagcctaacatattgtatatgcttctacaaggataagtttgttggtttttttatcaatacccacaagccaatccgtaaaaatatgagatatagtatgtggatggtataacccaaaagcaatatgtactgctctctaaagaaatctggaaaaatggcaatccaagaataaatgataaattgtctcatttttcataaaaaacaacatctcatattaccattctagccaagttatccttcggtaacactactcctttaagcagataccatataaagatcttaattttaagagacatattgagtttccatatgatccatttctttaagtataaccattattgattaaaactaagtacatagatcgaatcgagaattgaccattttgattaaggttctatcgaaaaacgtcattttcttctgtcaaataaatatgaacaattgaagcacacaagttgtgcctatatatttatcatattctggcctactaatgttcttctaaaagaaacattgagcgaaacacaactcataacatttgcaatcaaagaatttctcctacgaactatagaatacaaagacaggtacctatccttaaaggaagtattgtctatcaatttatccttccaattctgacttgttcaacattattaactatccaggatgccatatttaagaaactattcttaactttttatgagacccgacaaaaagggaatcaccttgttttctctcaacttgatttattgattgattaataaaacattttatttccaaagtacgtttttaatagtattttagtaaggttaaagattcgtcactatccccatctctttaatcttatatggcccatgtatatgtacggtgtgcacatgtcttccatgtaattacattgttttttttttttggctgtagggttttgaagtaatgaagtgaaaaaggaggagtaaattttactttgcgtcgcctttcattttggatgtttcaatttgaatactctttaatcaatatttttacttaaaaaaataaaacattggtaataaaaatgtgacctcaagtaaaatttaattaaaaaagagagagaaagaaatagtgaatataatcaactcctctctgttggatctcaagaaagagttgggcgcgagagcaccgacgacccaacaacacaagacgaagcgagcgacgagacgacctaaccccaaagcgaaaaaagttgctgcatccttagcgcgcaagcgaaagcgagagggagctcgcgcgcgcgcgagggatcgatggatcgaccccaggtgatgcccctcattcagcgctcaccctttctcctcgatccgagctcttgtgttgtttttctttttttctaggattttgatcgatctcccttaggagggagggagggagggagcttgtcccagatccagcggtttcttggattagggttcatgggggttctctccgctcggatccaggttaggaggtggttcgttttggattgggttctagaatgacccttggtttggttgatggtggcgggaggggattcttgatcacgcgcggcgggatctgagctgacagaaatcaagatttttcgttttcttttaggacaacttgtgccaattctgcttttcatttcagatctggttgtaatctgaagagacaataatctgacaccatatgaatgctgtttgtttgtttcaggtagttaccgagaactatgccaatcctgtgacgtgcctctttcatgtgctcttcaaggtgattgtaatttcgttgtatcgttggaactctgcttgtgctttctaggatttttgattgttctgtccgcgtctgatactcgttatcttgtctgtgcgaaggctggggcgctggtgttctacatcttgttttcgctcttcgtgaacagcttcgtcatcatattcgtcatcaccgtgttcctggcggcgctcgacttctgggtggtgaagaatgtgagtggcaggatattggtcgggatgcggtggtggaatgagatcgacgacgagggcaacagcgtgtggaagtttgagtgcctcgatggggaggtttgtgcttgcttcaaatgtgacattgctgtttaccgtcctaaacaatgacttttgcattgacttgatggaaataactccgtacaggctcttgctcggatgaacaaaaaggactcgtggctgttctggtggactctttacttgactgtaagtgatctattatctgttaaagagtgtttaatggaatatattatgtagctggatagatatattgcatgtaaagcaagtttgtagatttagcagaaccatttttgcattttagatataacaagaattcagaatgactaagctgccatttgcaatctattgcggcttgaaccaagcattttgaattactcccagggctagtaatgtgttctttttttctgtagggtcatattttactatgttaatcttatcggctttttaacgtttcacttttggttaagctttttcagtttttgatgttgaaggtctttgttatgttggctttcatcaaaatataggaatatatttgcttgtaggaggaaaaggaaacatgcgttcattgttagaacagggattaagaaccatttaatatccatcaaaagggctctatttgatgattaaatatatatataggtgttcctgtagcacttccatacaattccattcctttcagtattttgatgtgctggatgctattttattactgtgggccagtacataggacatgaataaaatattatttctagtttgtcgtactaactcaaaaatctcttttcacacacattactcacatttaatcaaagtgattctcatgtatagatcatttatctggctgtctgtctacttgtctgcttttcccaacacaaccactatactgtaataagcattaagttgacatagccggtgctgtgttctcttgagaaattggaaagtccataataaattgggatcactgtgaaacaagagtcttgtggtgacagtattttacagtaatccctaaaatgttttgctcacatctgtttgataccttttactatttacggaataaggtaataagtaagtcatgctagagcttaatagctttctgtagatttgtagagcataaaaaccaccatttcatgtttcaggctgctgcatggatcattcttgggatattttcacttatcagacttgaagctgactaccttcttgttgttggagtttgcttgactctaagccttgcaaacattgttgggttcaccagatgcaacaaaggtatttcctacttcagattctagtcaatatttctcagcacagggaagataacctctcacattctcataaactgattgttgattgtgatgaacaatgctatctgttaaaaagtttgcatgatatttgaaaaactcagtgtgtcaagctgtcataattccactacatctgggatgatggtttattggaaaactgtacttgatggttcagcttcacaaattccagttaggcacatgttcatcaacagacaccatgacctattattattgtcttaaactttgtcttctgaaacactcatttatgcctatcaattccattctctttgttttcaagatttagattcaagagttatgctttgatacatcatgttatatcgtgctacttattttgcaaatataacttatgaaaccttatattgaagctttctatgatttcattccagattaatctttttttaagccaaatctgactattttacatatgtaattgtgtattacagatgccaagaagaatatccggggttactttgaaggtcatgctcaaaatgcgatcacatcccgcatcacatccaccctgcaatcagcatttggagtaatctaaaatccgagctccaaacagcaaggcccttttcgaatacaaccatgtaaaatctgtcaaaaggattagcgtgcattatcccatttccatacatttttgttgacccaatacacccagtaggttgattttgattggaaagacagagaacaccttgttagtactactgccttccaaaggagtaaaaaagaagtttttagccgagaatatgtcttgagtctgagtgtaccctttagggattttgaccctggaacctgtcttccaatgcagcttcttgttaattccatatattattaatcatttgctgtgctgtatcttaacgacaattttctgtaattttatgcattctcgcaaaatgcccgtacatggttacgtgattgagaaaatcgcatcggcacattgaaacaagaaatctattttgaatttagagcttaacttcagaattaaatagatgttttttatttatagctactagtataaaaatttcaagcggactcgaattgacttctcattactgtataactcccttaaaagagttacatcatcaacggttcataaattcgaccgttatatttggttttgagaatgatggtcccacatgtcatagtttttagaattttcagactcaccaccgtcactactctctcctttaattcttttaaaggagtatagagaaggccagaaggccaattcagaacggcagtattgtgcaaaagaacatatataaacgtcgcttcaggaaagggaaactaaaaacagaatgattatttggaagct

SEQ ID NO: 22081 - DNA, 41770 bp, Oryza sativa
  unsure (1)..(41770): unsure at all n locations
tgatccgtgtgggttacaagatttctccatgttccgcatcagaaatgggcgcgcttctctttttgtttaggtctaagggtttagtggagtgaagtgtgtgtgggttttgggcttgcagatgcttggagcgctatgtctagtgtttttttttacaagtaatttagtagtacacttgaacaccggcacgtttgaactggcaccagcattttgttggcattggggattgctcatttccaagtgtaagaatgaggcgtgattggggcatacttgcaacataggaatttcatgggaaacaattcatttccataggaactagagggaattcaactgttccgcgcaggtcctgttgtttaagagttcagtgtttcaacttttaaatgccttttgatactggaagcaggggaataaatagatcccagttaactgaattacgacttaaagtgccaaattcgatgaatggttcaatctcaatctgactccttgttgctctgagaagtgcagctacgatctaaatgcacagcctaaatacaatagcatccaaatattatgtttcttttcgtatcatctagaacggttacaatgtctatcattcatttcaatgcatattttcctttgttggtagctatgttaaccaaagagtgctaaagactcaagtttctctgcagggaggagataggaaggatgttttcttctaccaggctgatgaccagcattacataccgagggctcttcttgtggatctagagccgagagtgatcaacggaatacagaacagtgagtacaggaatctatacaatcatgagaatatatttgtggctgagcatggaggtggtgctgggaacaactgggctagtggatatcaccaggtatactttgatctgtcttatccatatttcatctgctacactgctaatcaattctgtaggtttgtcagccgatcaccaatgctataggttttgttatattctgtcattagatcaattgtgcctgtgtttcttcagtcagagtttaatatatctttcacattaatgttttttttcctatttacacactatagggtgagcaagttgttgatgatatcatggatatgatagacagagaagcagatggaagtgatagccttgagggttttgtgttatgccactcaattgctggtggaactggttcaggtcatttatctcgatctcctttcttggtttcattcatttgtcttagttttctgtaaatcaccatctattgtaactggagcgtatattggtgttttaacatgtggcttagtgtgtatatgggatgctgtagttgcaatatggaaaagtagtatttccacatgtcagttttcttacaatagttatctaattttgttcactcttccctcatttaggtatgggttcttacctgttggagactctgaatgaccgatacagcaaaaagcttgtccagacatacagtgttttcccaaatcagatggaaacaagtgatgttgttgtccagccatataattcgcttttaactctgaagcggctgacactgaatgctgactgtgtggttgttcttgacaatacggcccttaataggattgctgtggaacgtcttcatttagcaaatcctacttttgcacaaacaaactctttggtctcaacagttatgtctgcaagcacaactactctgaggtatcctggatatatgaacaatgacctggttggccttcttgcctctttgatccctactccaaggtgtcattttctgatgacaggttacactccattgactgttgaacgacaggtgatttgatcatatttgttgcattggttcatgtaacatttgatttcacattttatctgtttagtaactacttttcttgagtttagtttgggggttggtagactagtatatactatgtcaaatacatattactttccctgccttcttttgtgacaaatggggaaaaattcagttcatgatataatgatatgctcaattgcaggttaacatgatacgcaagacaacagtattagatgttatgaggcgacttctgcaggtattctttgcttccttaggaataggatgcttgccactttatgatctttatgaaatttaaattttggacctttatttgttgtcttgcagaccaaaaatataatggtgtcatcatatgctcgaaataaggaagctagtcaggctaaatacatctccatacttaacatcattcagggagaggtggatcctacacaggtaaagttctgttaaatgggtttattagtttagctttatccatagcagctggaatattgaaatgaaatttgcctagttctgaagcagaatgaagatctcgttcttctgatcctttggaattgcttgttcattccattcttatcttttggtattctcatgcatttaggtccatgagagcctacaaaggatacgtgaaaggaagcttgttaacttcattgagtggggacctgcaagcattcaggtcattatacaactagaataattttaggttaaacctttttgacatattgatttattgttatttcaactgccacaggttgccttatcaagaaaatctccatatgtacaaaccacgcatagggtacctttctctcactctctcactatctttttttttgtcaattcaagtgcaatgtttgaatcactaatgtttgtctacaggttagtggattgatgctggcgaatcatactagtatccgtcacttattcagcaaatgcctgggacagtatgaaaagctaaggaaaaagcaagcttttcttgacaactacagaaagttcccaatgtttgaggtaagaaactctattccttcaatttcatccattttcattacctgagtaatttccaaatttgaagtttctggttaaactaggtatgtttgaagtgctacaatgtaattccctgttcaaaacctgtttgacaccaacaattttgaacattccactagcaattttacattaaagtataaaacaaacatgaactgtagcactataagtttcttgtttttcttgaagtgaaatgctttcagtactatatatgatcttgtgaggaaacctgtccattattctgtccaaaatactcaacgttttggcctctctatacaggacaatgatctctctgaatttgatgaatctcgagaaataatagagagcttagttgatgagtacaaggcttgcgaatcaccagactacatcaaatgggggatggaggtacgtctttgctccatttcagtatatttgttatttactttatgtgaaatgctgagcaatctgttggaaaataggatgctggagaggcaaacgttgcggccgcacttgattcgaagttagtggtgtaaatatgaaggtaacgcattggactccattcctgatatagcttgctgtacgggtacctggaacctttgttgaactttttggagaaatattttgtacatggccttgatgagcacattattctcctaaagaagtgcatttattttatcagcagtccttgtgttgtggagagttggagatattatggtgttaaattaggtgtatcgacagtgacactactaaattcgttactcctttgattttcactctgttagctactcccccgtcccaatatagttgtccttttatgttgtttagcatagattaagtttaagaataaaagacagtaatgtcccttattaaatgatgtatgcttgtgagtagaattttgaaacctggaatttaggacgaaggggttataatattgtcttttaaacctcttgtcatgagctatgacttgtacatgcaggtcctacaagaatgcaactctaattgcctgatggtcatcagttcgatggcagctgctcgactcgttcccactctagtgctagatgcgtttcctcagcattcttcaagtttgcttctcgtgttagtgttacagcctgtgcgacatgagtgtatatcttgacccacttcgaactggccgtagtttgtgctgttccgttttgggttgcaatcccttctgggatgctttgtatgtgtggatgcgtgtgatgtactgatactgatgggttttgtgccagaatagcatgcagagctctaattgttggtgcagacaaatggtttgacagatctggctgattactgtaatgtactagagtgtaaaaacagctcgcgtctttggctgcgcctatggttttgcatccagccagccagtttgttcactttggtaattccataactttctactctcaaaacttctattaaaatttggtaaggtctcaaagtaaaaaccatcggtctatacaataccttaccaaaattaggcaacgaagtaaataagccctgaaaagtgagttatgattaatttgatgtgataaattactagctggaattctttcgtattggtctgatcattcaccagatgagccctagacgtactcgagtatagttcaccagcaggacaacgaatgaccctgacttaaattccatttaattttactgctgactgttgtacaaccagtaaatacatttttgggaagtgtaagctacaattctaccatcaatatattcttccagcaatacaaatattttggtacagctcatgatcatccaacttcctaaatgctacacccggttgttaatgacatgagaaacaaaataaggtaaaagagaaattaaactgctgaactgctaacaattaccaacgcaaaatcacacccacagaaaaggcagctgctggtgcttgtaagctgggaaaatttccttttttgaggcagttttccttcccacctcaaatgagaacgaactagctgcagcataaaagcgaaaacctgggccttcggttatgtgagaatgctcttcagcttggacttctggtcgtcggttagggttttcgggaataaaacctcgaaagttacatataggtcgcctttcttgttgctctggtacaatggcattccttcccctttgaacttcctaacctccttgggtttggtgatcccctaaatattcacgacgaaattgtgatgatcagttgcagtattgcaggtgatgaatgagaatgactacagtgtacaagaattcttgatggtgtggggggtggattaaaccttggtgccaatttccaccatatgattgtccagatgcttaatggtcttctcgaagccgaccagagcttggagctgcaggaccaaaggatggtcaggaaatacaggctaaagtgatgaacaaactaaaagaacagcccaagctctacagttagttacaatgattagtagtaagggatttcatggtttccactgctagattggcactccaagatttgggttttgccagatcttggattttatcaagttactgaggtggctggacatggaactcctcccatccacagtggctgaaaagccggaaacatatttggatttttttttatccatataagatgataaacttctttgtcatcttgggactttggtccttataatgtgaccaagtttttcacgcaaggttgtcatcaggctaattttcacaggataactacacctttaaagagagttaattagaacatgcataacagacgggggtgagcagtaccagggagattgtaacagttgtgtgcaggtcattgccttctcttctgaatcgctcatgtggtgctgttcggatcctaaactgctcatgaagcattcatttgatgataaatattagtaaaacagatcaccccctcacaataaactttaaccaaccagaaaaaggtgctaagcaaaccttcaaatctccaggttcaccatcaatcttaggctctccttcctcaaagaatgaaacttcctgcaaatataaaatggtgcggccaaatcaacatccaaactgtaaagtagaacttatagtgatgaatagaatataatgttcatgacaaacaactgtctctgatcatgttagtagcctgaggaaattaaaggccaccacataaattcaatagttcacatgaaagatcaagatctctttcctgtatcaggccaaattccaaaagctgctagtaatttgccaattaccaggtaaaaagaagcattgattggctttaacataaaaaaagcaaacaataccaattaacaagccactgattagtgttgtgatccatgaatcagccagtttgactgaaggtttcaaattctaatagtaaacaatgaagtgctgatcataaatgacagcttattagtttagcagtttagcatctagaagtagcaatagcatgtggtacacttacaaccatagtacatataatcttatctaatgttgacaaaataatggaggaaggcacacactaaatcacagcgcatcgcacaaatgtctagaaagtgaacagaacagttgctctgtacctgcccatcttgcattcctttctcaatatcaacagtcaaaaaatcaccttctcgcacatacttcacatttgcacactggtcacagacctaaaaagacaaatgcaacctattattatggagtgaaaaaaacaataaaagaataaaaataaagatatttatgttaaatcatgccaaactgtggaataacacagcaaggggcaatcaatacctgctcggtcatttgttgatacattcctggaccaatttgtctatggtaaacttcgtttctgcaattgcatcgcctctttcctggtgctggctttatgacgtttttctcccgccaaacctatcatataaacaaaaataacaaagtaaatttggagcggtaatttccatgtcagtgcagccttcacggacactcaagcatgctactgaatagagcggcaaggtaatgtaatcacttgatttacatattgtttatgtaatttatataacttatctacactacatctttcttgtcctcattcctcagctagtcaaacttggttacctttagtgagccgcccatgtacaagtcctccaatgaagcatccagttcaacgatcacatcatcaccttttataatctgctcttcctcctcttccatcccaccaccaccaccaccgaagaagctacagagttcaggaacaaaacagtaaagcgatgattaagaacaaaatgatacaataaaagtaaatgccaattaggttgaattgcatctagctaagatactactgtctaatgtgtttacatgcagactgttgacattagatttcctgatcttaaactttatatattcagttagttcctggtgagcacatcaccaacacatttagaattttgttccacaatggaggggtttgtgttattgtcgaacaaagagctagatatttacatgaaaagacctcttaaatcagatatatattgatatatggaggcgtacaggcatttatcttcagactcaatttgttactaccacctataaaagtagctcacatgtacagttatagctcagagaaggctaaaacaataaatgctaccccctccattccaaaatgtaagttgttttagttttgtcccaagtcaaagactttaatcaagtatatagaaacctaattaatatctacaataccaaataattaccccctccgtttcatattataagactttctagcattacccatattcttatanatnttaatgaatctanacatagcattacccacattcatatagattttaatgaatttaaacacatatatgtctagattcattaagatctatatgaatatgggtaatgctagaaagtcttataatatgaaacggaggaagtacactactgagacatatttcatggtggattttaatgaaactaatttgatgttggcacaattttccataaacctagtcaaagtcaggatttggaacaccatacttatgacaaaaccaaaacaccatccattttggaacggatggagtagatagcacattggcctcacctgctaaagatgtcctgaatgttcatcccgccgccgccacctctcccaccctgggcctggaactgcttcagcccctcctcgccataccggtcatagatcttcctcttctcctgatccgtcaagatctcataagctgcaacaatacaacacctttacccattaattccccctcatgtgcaccaaattttcagtcttaaaaatgagcaccaatttttcagtccaacaatgggctccaatttttcagtccaacaacgagcaccaatttttcagtccagcaatgggctccaatttttcagtccagcaatgggctccaatttttcagtccaacaatgggcaccaactttgcagtcttaacaaaggggggtggattcgttaccattgttgatctcggcgaatcgcttgttggcctcctcgttgttgggattcttgtcggggtggtacttgagcgcgagcttgcggtaggaacgcttgatctgatcctcggacgcgcccttgggcacttgcagcacgtcgtagtagctcttcctgattcacaaacacccaaaaaggaaaaaaaaatccaccaaaatttcagttgaatccaatccagtataatcctcaacagaatgcgcaccaacatgatacatacagatctcaagctgatttaataataaaaagttaaaaaaggagagcccattgcgattgggagataaactggatcagatcatgaggagggataaaaaagaagagaagttcacacgaagcgggagagggagagctgagctgatcggaaaccctaccccgcgacggccgccacgaagtgcagcagcagaagaagcagcggccctatccaccgcggcgccgccatcgccgtcccctcccgcgccgccctctcaccgagcggccaagggcgcctagggtctccccgcgggtgggtcgcggatctagggtcaggcgagagggtgtgcctcctcctcctcctccttccgcgcgctcgccggcgatgcctcgcctccgcgtcgccgccgccgtcgagtcggagtcgtctcgtcttttctccctctctctctctctcactcgcggtttaaaagcttctagaagaaacccgagggcgttgtggtggggttgggggggagacgtggaaggtgatgacgtggaccaatcggggacggggaacgggtggcggtagcgaatggggtggcgccacgtgggaagtcctttttgccttttgagtcaggcgatgcaccggaggattgtacacgtcagcaaacggtgggttgacctgtcgtgtgcgtcgttggtaaacccaacttgccccgcatggcacgctgatgagtacaatattattttttttccattaattttgggttgtattcttttacaataaataaaatacgtgctattagagcagtacaatagcagactataagtcagctgcaaacatattttaagaagataaatgagaagatagaagagcagcggctacagatttgtaaccagctgtagcacggacttcaagatatagtgtgtgtatgacaggtgggccaagtatcaatagtgtagtatgtaactattgtatgaatgagctattagattggctatagatgaattggagctagtagttgcctatactattaaacttgctctactactccctccgtttcaggttaagtcaaactgctttaagtttgactaagtttgtagaaaaaataataaaatttttaactcagcacaaaattattataaagatatattcaattattgatttaatgatactaatttggtattataaatattattatatttgtgcataaacttagtcatatttaaagtagtttgactttgatcaaagtcaaaacgtcttataacctgaaacggaaggagtagtaaactctaaaccgtctacaaacacctatggaggaaagagaataaataatgagaagggtcggctctcatacaaaagttaattaagaaagatatgagagaaaaaaaaatagagccaccgttatactcctcatatcctaaatataaggctcaatcactcctaacatagaaaccaagaaataatttaatcaccttctcgttgatcatattcatacatgtaggcaatgtgattggggagcttaatgttagaggatttaaaataaaccaaatttaaagggccaagaggcgatagttatgtatgcatacatgcacgtcttatattatgacttaggaaaattggttttgccatatattttgatacggagtgagtaggctatatttttctcatcccattttaattatcgtatttgcaaaatggtatcgaaatcaagacaagaaaacatcattctttatgtaattaaacctcgtcgattgaggtgttggaatgcctcacataagtgcatgcagatcttttgtacacgcggatgattattataaatcattcagttatttagccagtgtcatttatctctatctctactattataaaaaccgaagatgttttcgctgaaatttaggtatgacagccgtgtttgaattggtttttgagtcgttacgtcatccatgtttgaataggttttatgtcgctcgtatccaattcgatgtgagtctaaaataactattatatttatacactctccatctcaacctaacccaacccatccccctcccagcccaacccaaccggcccacatcatctcgccatcctctcccgctcgtcccttccctgatcgccgtcatttttctctcttttttttcctcatgatcatcttgaatcctctccctctccttccaatctcctctcttctttttctcccttttctcttttttcatcctcttatttttctcttatcgtaaatatctttcttttgaaattgtcattgcttgagttgtatctacagtaaaaagaaacttccgctaattgaatagtcaaaattttaaactttggttaatgaggtgtatcaaaatacacacacgtcaatttatggaagagccacccaatcgatttgtgagtttatgaaaatgtgtacatacggggttttttaccccctcccatccgttcctcactcgatcaccatcttctctctcttcctcctgatcctctccctccccttccaatctcctctccttttttctcttttttcatcctcttattttctcttctcataaatatttgtcttttgaaattgtcattgtttaacttgtatctacaataaaaaaaacttccactaactgaatattcaaaatttcaaacttcggtcgatgaagtgtatctaaatacaaatacatcaacttatggaagagccacccaatcgatttgtgaggttatgtaaatgtgtacatgtggtgtttttcatgtgacgacgtatgaagcaagcgcaacttggctcaatgctatatgatttctaattttgttttgtcttgtttcagtttatcgtttaaattaacagggtttttattaattatgaaaattttctttcatatgttgcaacgtacaagcatttttgctagtccataaaacagaaaaaactatgcatagctcgttgaaagatagattctgttatattttcaggaaactgtatcctctcgccgaagcagtgacattctctttctctataagctgataggtagcatttgaaacagattattcattaattaaattaatttcacaatctatctacttaattatagagataatttgaatattttaaaaagtaaagttaacaaataactaagtggtataagaaacataagaagcatgagaaagtttttctttgaaaaagaaaatcatatttattaaatcgtggaacaaacaatctacgacaataatttgataaaaatatgtaaaaataacatagattaaaccaaacacgctacatcctttgcacaagcgaactgctaatacaggactgatgcaatacttgtttttagaacttttggagacatactaatcagtagctggaatagctcagtggttagagcgtgtggctgttaaccacaaggtcggaggttcaagccctccttctagcgttattttttttctattatttcttttcatttttttaaaaaattacaaacatagccttccaaattgcaatattcactaaattcatttttctaaaaatcctattatttattttcattttttaaaaaattacaaacatagccttccaaattgcaatattcactaaattcattttctaaaaattgcaaacatagccttacaaattgcaatattcactaagttctcactctttttttcttttcagtttttttaaaattgcaaacatagccttccaaattatttttttaaattacaaacatagccttccaaattgcaatattcattaaattcatttttctaaaaattacaaacatagccttacaaattgcaatattcactaaattctcattctttttttattttcatttttttaaaaaaattgcaaacatagccttccaaattgaaatattcactaaattctcactatatttttttgttaattttttcttttcaattttttaattgcaaacatagcattccaaattgcaataatcactaaattatcactctattttttatttattttttaaaaattgcaaacatagccttccaaattgcaatatttactaaattctcactccaattttttcttaactttttatttttaatttttctaaaaattgcaaacatagccttccaaattgcaatattcactaaattctcactctaattttttttataatttgcaaacatagccttccaattcttccattttttttcttttctttctccccactaaattttcattttttttataaactgcaatattcagtaaattctcactctagcagacaaatttttacaaagttacaaatatagccttccaaaaggaccatttctcactctagtagataactttttacaaaattacaatcatagccttctttttttttctctttacgtagcataattctcactctaagctaattttttttaacaaaattgcaaccatagcctttcatttttttttcttaagtctaattttttccttttctttcttccctacacaattctcactctagtagatttttttttacaaaattgcaaatatagcctttcaaatggaccagtctcactatggtagatattttttggcaaaattctatataattctcaccctagcactctccaaatgagtagtcccactctagtaattaaatttgtacaaaattctatgtatttcctgcgttattcttattgtagtagatatttttttacaaaatcctgcatagttctcttctcactctagtaaatacatttttacaaaattgcaaaacctatgcttcaaaaaggagccatggttttttcttactaggggaggaggggttacctccgtgatggatggtaagcttagtttctgtggtaaaccataaaaaagcggatacaatttattaaaaaataatcaaaattccattttaattccgttgaacttggtgaggttgccaagctcttaccgttactgaaccccggcgatgaacaataaacctggttactacggtaaccatcgcatgtgaaaccctaaaacgtggatgccttcttcaatgcataaaaaactttttcttaacataatctttctactacctccgtttcaggttataagattttctagtattgcctacattcatatagatattaatgaatctaggcatacatatatgcctagattgattaacatatatatgaatatgggcaatgctagaaaatcttataatataaaacagaggaagtagtaaataagctctctacgaagtgcagaggtaaaaaaaataatgccattgacagtcttaccaggcactcagtatatgaaaattaaacaattgaacaacttgataactgaatactactattagactatagcaatatctatatctatactcctttaaaacacccaatggtgatggtggatggtgaatggtgaatccaccacaagccatcactactgccatatgggtcttcaaatagtgggtaggtggacttttgtcccttccccaacctcaaaccatcaaacagagagaatatttttttaatatttttgagggctttaaagtgttgagggttctctttttaaattcccgttgcaacgcaccggtatttaggtagaaaaaaaatcaccaaacgtgcgggtcctattcgcaaaactccccgttccgtttgatttaacggccggagatttttcccacaaactcgttaacctccatcttctcttctcctctcacgagctcgcagctcaagcgcacccagccatggcgactcctcagatctcgcgcaaagccctcgcctccctcctcctcctcgtcgccgccgccgccgcggtctccaccgcgtccgccgacgacgtgctcgccctcaccgagtccaccttcgagaaggaggtcggccaggaccgcgccgccctcgtcgagttctacgcgccatggtaataagcgatgatggtgtgcgtgcatctttgggtttttcttcttccttttctttttcggatccgcgcggggcgtgtgtgtgttctggatctctgtgatgatgaaatgggctcgggatcgcggctggatcggtggcggcgtagctctcattctcggaatttcgtagcggattcttgagatcggtgaggttttgggtggcttgtgtggagtggatcgagttgatgttaggctggaaaaatattcggatctttggctgaagtatcgatcttggccgcggagtgttgcgtggatctttcttgacatcacagattcgtttacttttccggtcccttattttgtagtatcgatcagatgtgtgagattttgcaaggtttttagggcttttatgttatatcttgcggtggttggtgttgggggagggtttatgtatagagaaattcgatattttttaaatgtttgtgattgattttgttttcaggtgtggtcactgcaagaagcttgcccctgaatacgaaaaactcggtgcaagtttcaagaaagccaaatcagtcctaattgcgaaggtaaatctcatgttttttaggtgtttggaaatttaatgtcaaggccgttttgtgtcatatcttcgctgtttgcatgccagtagttctctatcgtttgcattccatatggaaagaaaataaaaatggcattcctgtttagtggatatatgttattaggatctaataattttatgtgtttgttgatgaattgactccattttgtctatccaggttgactgtgatgagcacaagagtgtgtgcagcaagtatggagtttctgggtaccccacaatccaatggttccccaaaggttccttggagcccaagaagtgagaatacatgcttctttgttgattactcaatcactacattttctgtcgtaaagaacaatgaccctaatgttaaacttactgtttaggtatgaaggtcaacgtaccgcggaagcccttgcagaatatgttaactctgaagcaggtagacgaacgcactttccaaccaagctatcggtctccttgtttggaaaattaactgcattttttattaccatgaaacatattatgtatgatatttcagttttcaccagtcagaggattatttcataagcaataagtactgaaatatcaatgctacttggctacttcctgctattatggagcccaaaagctgttgcagctaattacatatcactgctttctcattacatgttgtcatgtctcattttcattatttgttgaacagttggctattggcaaaccaacatgctatattagctttcaaagtcccaacactgttgtaaatctttctgccttgtctttcagccaccaatgtaaagatagctgcagttccttctagtgtcgtggttcttaccccagagaccttcgactctgttgtccttgatgaaaccaaagatgtccttgtagagttctatgccccatggtatgctattatgatcagcctgttgttcatcaaacctttttatcatgctgtatcaatgaatttaattttgttggatgctgctttgttttgcaggtgtggtcactgcaagcatcttgctccggttagtagtacacctcagtattttgcaaagttgcaaaataatgcattgtcatttttctattttgtctaaactcaaacttgcacttgttttagatttatgagaagctagcttctgtttataagcaagatgagggtgttgttattgccaatcttgatgctgacaaacacactgccttggcagagaagtatgctttctgaactttgttctaatagttcttgtctacattgattaccctcgacatttcgatgtaacggcatagcttatgttggaatggtatttgctttcctgaagaaaattttctactgttattgtacttctcctaactgttagatctaacatacacatacctgtttttataggatgtgtggttggtcatgtatgtttttcttccccataagagaatttttaatcatgcatgccacttcaggtatggagtttctggtttccccacattgaaattcttcccaaagggaaacaaagctggtgaagattatgatggcggtcgcgagttggatgacttcgtcaagtttattaatgagaaatgtggaaccagccgtgattcaaagggtcagcttacttcagaggtagtgcttttatatagaaggtacttaaatacttaaatttacataatccaattccaatataatctattggttgcttctgtaggctggcattgtcgaaagcttggctcctcttgtgaaggagttccttggtgcagcaaatgataagcggaaagaagccctctccaaaatggaagaggatgttgcgaagctcactggccctgctgccaagtactaaattttcatctctgtttttaaattttgttatgtaggtttggcatcgtcactgtgtgaatttaaccattttgctaaagcaggtacggaaagatctatgtgaactctgcaaagaagatcatggagaagggctctgaatacactaagaaggaatctgagaggcttcaacgcatgttggagaaggtgagcaacaaaagtttctattcctcaattcactttggacatcatattacttaatctagaatctgatttccatgcttcatcatatgacagtcgatcagtccttccaaagccgatgaattcgtcatcaagaagaacatcctttcgactttctcctcttaaagggtgtcccacgtaccccgacgagcaattggggtatagtcagtagcgcaatgcctgtctccaagaatggaaaacagaaagaaatgaaaagaaaaggcaatatcgatatcagcaagagatggcaatggaagttcgttagttgggtattctgttgaacaaacatgtatcccactgcccggcatgatcttttttttttctttctgctatttgcttttgtggttacagggattgacatagcaatcagctagtttactcaagaacacaagaggttttgtaaccatcccgtgatgagtgatgacaccgttctacgtttgtcaatccaataatttgataattcagtttacattatttctgtttaccctggtgaaagagagcatatgttgcttttgcttttgggtttgaagaatgtggagttgctcctattttgttttgttcagtgtatgtgtaggggatgggcatcaagctagttctgccttcttcgagcttggttcgaaattaaaatattttaattatatcagcgttttatatatagttagaaagcaactgtagaaaccagtttcagctgagatagactacaaaacgtttattcaaaccaaccataataagtttaatcttgtagatgcagaaaaacaactgtaattggaacgattttgaacgacaactgtaattccgttcgttcagattatcaactgaatattataagttgcggagtgtctttgcagacatccggtagagctggaacaaatcaacaatacatataagataagaggaaaaaaaaataatggccctgcccaaaaatgatacgcacaaatccagaaaatttaaaagttctgcagcagtaaatactgtcaagtactaataacctgagagttaaataagaacgatatgcacaaatccagaaaataaagaagttctgcagcagtaaatactgtcaagtactaataacctgaggtgatatgcacaaatccagaaaataaagttctgcagcagtaactgctaaggttaaatttcatccaggaacatttagttccatttgtacatgatcccaaccggcgaagctatagcacagaatgatgtatcagttcataccattttgaggttgtgtagacaatcaaatggcgctaaaataccgcatttcaggggttaattttactcaaaggttacaatttcaggatctcgaaaagcacatgttcatactaggggttacagtggattgaacatcaatcagaattatcataagcatatgagccataatctcccacaaaaataatttccaggaaaatggcatatggtgtgatctctctgctacctattcttatccatgctggttagtttactacagtccttgtcctcttgcttaaacttgaggtcactcagacaaccatgcggggtgcaatcctcaatgtaatctatatcatgctctggtcgcccatagctgttttccggcatctggtaactgactccatcactgattgtttctctatgtgatgacgatctttctgccccttccaaaccctctagatgttcatgctgatgttcatcctcatggtcgtgtgcatgttcttgttcttgtctgccacagaacgacagttcatatgcatgtggtccctgaaccctcatttgcactgacctcagtagtgctgttttcctcaggtcacctccatggcacatgtcatttggagaagatgggaaccggccttcattttcagagccacgacgaggattagagcagacgaccgacgagagtgagcagctgggcagagggtacgggtttgcggataaaagaccagattgtggtttctggaatcggtgtggggatgacattggactagttgaagggctaaccattgcatcggtttgacttccattgggtaattgagtgtcgtagcaccggtagtcatctgaatcttcagacattggtgagtattgggatattatttcatccctgcaaggagacatataacaagactcatggtgaaacacagacctgaactagaccatgatatgtgctgagaagtataagagctaaatttgattgaacaaaactagcaatgcattctatcgaatatattagctaattagaaaattatattctggatgatatttaattatcttactgtaaagtacttgtgtcatcagcatgtgtatctaagtgtgtattcatcggcatgttgaaaaatgttacttgtgccagagtttctgtcatcaaacaaagtgctccttccacatggcctgtgccatggatatgtaagtttgtgggcatcttgtttgcttagcatgtgcaggaacatgccaaagacctatgtttcatgagtttcaatgtcaacatgccggtgcaagtgttcaagcaatcattgaggagatcaaatcacgctctccagaacaaccagttcacccagaaagcatacagacaacagattgctgtccagattatccatgagcaaacagtgcacatgcaaaactactagaaccaactaaaaaaaaatctagaaatttcatacatccatcatggtatgagaaattaacatgaagtttgcaacaataagaaattgaaatattcaccctacaaaatgtcatgttgtgaggtgccttaagctacctataaatatggctttcggttaaagtagagatatcgaggataactattgattttaatttgaagaacccataggaggtctgtatgtcgttcaattaagacgaaaaggacagccaatcccgattacttcccattgatcatgggttacaacccctcaatcataaagcatgcttacaacttactaacttgctaaacattctgatccaggaaaaaaaacatagataaatttctaaattttgatcacacctatccatttaaccatttttttgggggcaaaagatggatcacgttacaactgaagtctgaagttgacatagaactttatttgcctctacaagttagactaactattaacttcggcaagtaaatgaataatgcacacataataatgaggccttcaccatcatcttcttaccttcaatattgaatactccgatttcttacaccacaaaattgagcatgtatacatgaacaagcacagacgaagttcatcaactttgtaagaaaaatgtagataaaatctgagcacacatacctgaaataagaggtattctccgacctcgcaggggactccatgatattgtcaaccagtgaatctccgacagacaatccattcaaactggatgccattatctgcaatagccaatatccaatctaacatataagtaaaacactggaattttggtctcacagtaataatataaatgaattgcattctagagtgggatatgaactagtacaccaagaactgaagcaaggcagcaccgtttcacagagcgagaggaaagaaagaaacagaagaacatagtacaattcagcatccaaaacgacgaaatcgcccaagaatcagagtcaaatgaacacggatcgagacaaacaagaataggtaattaattaattaatagaatgaagggaacgtgcaaagcaccaaaaaaaagcccctaaacctgaaaaagactagtgatataaccagtaataaatcaaagtaaattacccgaatccctgagtcccatttcgcttcaattccaataatcacagagtaaaaaaaggccacacaaatcgacggaacaacggagaaaatcctctctctctaccgacacccaaattaaccaagaaacgaaaccgccccgaatccgagccgcggcggccaccccccaagaacaccgagccacgaaaattccccggacgcagagggcgggcgctgccatggcccatggggagagggagagagagagagacctcgctgaggtagcgcttgtgggagtggaggttgtccacgtacacgtcctcctccggatccctcccgcgcttcccgccgcccgaaggcggcgacattgccgcctccccgccgccgccgccgcccaccatccgtggccaggtcgggatcgcaagcggggattggctcgcaacttcttcttcttggagagtttgcgagtggaaggaagaacagaaaagggaaagccggaggaggaggagaagctttggtctttttttcgtttgtttcctttttttttttactccagaaaaaagaaagtatcatttgcaattgggccggccgattaacggcccggaaagcaaaatggggccccattaatgcataatacttgagccaatgataatattctgttctgtttttcttcactcgtatgactatttttctcctacctttaagttgtactccttctgtccctttttttttaaggtaaatgatgttacatgacatcgtgacttcgcagttttagcagtaggatatcgcgcaaagtgatttttaggtgaagacactctcaagagttaggccatgcccaacgctccacgctagagtgtggtctcacccctcttgacgcgaatatttgtgccagctcgactgggaccgtgccctcgcagagctccgcgaccccctgcagagtgtcgtatggtttcgtcagcttttggcgaggaaaatgtgaggaatgggcgaggaaccgaattgggggagaggtgtcgctctgtcccgtagccccaggacgttgaggccaactacctcctgcgccaaggtcgaagatggcgaggaagtaggcaggggagaagaagatggggcgccgccgcctccatccggcgccaacgtgcctcgatccgcccctgccgcctccatccggcgttgccgcgcctcaatctgccactaccgcgcctcgatccgccgctcgatccggcgacaccgcctcgattcgccgccgccgccttcatccgttgctgttgcgcctcaatccagtgtcggggagagaggcgcaccgccagggaggggagcgccggggagagattgggaggggagatggtcatgagaggactgatggtggtatttatatatgtttgtgatttttagggggtatattgcaaatattgtatgtatatgcaaataaaaataatccaagggttaaaatgcaaaatgtgaccgactgacaggtactgaaacgtaaaaataagataggggtatggcttgcactgtgtgagggatatcaccggtgtggtttcatcccacttggcatcacctttttttatggggctataccctgtgttgggcatgcccttagatatttgctagtggacaccgtatctattaaaataataatttccggataaggaggagagaaaaatcgcgtgaaatatcaaaaatgtccttgggttgatccacatgtcaactctcatatgtctcttctctcgatcccctccttctagcgcagcatcgggtcggagctcgacatggcctccggaactcctcctcgacaccccactccccaggcaacgcggacgacgatgacagggaacggcggcgacggcaccacaccaattccgactggcgtagctccggcgatgccgccctggatccacatgacagtcgtcgccctcgccctcacggcgagttccttggtgcgtgccctcctcattgtgccaccgtccatcagctcggtcgcagccgtcaccacgtcggcgctagcgacctgctcgcaccaccgccactgccttgcgctggccagagcaacgccgcatcccctgcaccaaacaaaccaacacctcgttgagtcccttctgtttttcctcgcgccatcacgctcccaagacctctctaactctattccctcaaaaaatttaaagggaagttgagcggagagccgccgccgccggccgcctcgggacctcgccgctgcgcagctccaaactgcctctcaatagttccaaagccctttcctctcctttaatcgagccgccatccaccatagccacatcgccatcgccatcccaaacccactgcgccgccggccatggcgctccctgactctagccacccttggccacgtcgctgcctctagaaggtgcgggagggcccactatagccgtcccggccttcggccaagccaccccctgcgccgcccgttgccaacgggcacgtgccaagccgtcacgcacgctcacattcccaccgagatgcggcgtgatgcgatgcatcaccggaaggaggggatagagagaagagagataagggagctaacatgtgggcccaagggcatttttgatatttcacgcgatttctctcctgacctgaaaattattattttaatgagtgtggtgtccactagcaaatatccaattttttatagtgtcttccctcaaagtcatttcacgcagtgtcttacagctaaaaccgcgaagtcacggtgtcctatcacaaaatttgcccttttttttttaacatactgaaaactaaccattttctaatcctgcatcatgccgctttttatgttttcaataacttcctaaacctaggaaaatacaattagagggaccttctaaaactaacttgcataaaatctctttctggtatttaacttcttttgtgtttttcatttaaaaatatagttggttaaattaaggtgtttcttgatttggttttaatttaaaaccttcctttgactaaaattcttttattcaaatttagtttgaaaaccctttttacttttatgaattatggtccaagaaaccttcccatactgtcctagaacctaaaacaaagcaattccaattttattagaattaattgttaacccatcctttgatcttaaacctattatttgattcttgatccaaattcttccttttgatctagccactgatttaattcctgtggcttgatttcctttttggcacaagaataatattattgcaaatattgtgaataattgctcttgtgctaagaaaataccaatttatattcttcactcaactttccctattagccacaaataattcttcaaatacttctactatcaaatttaggattcaaatcctatttattttacctccaatcattctcttccaaacatatatatatatatatatatatatatatatatatatatatatatatatatatatatatatatatatatatatatatatatatatatatgtcgtaggctctccggaccttccattataattgagagatgaagtgaataattcaagtcatcaaacaagcataatgaaatatccgacgcctcgagagaggaatattggagatattgctaggcctttagcctgccagtcaacttcagcctgagacgtgcccgtcaaaccactcgaaggcggcgaccagatgtgttacacattcaggagacttgacaaaaatggctaaagttctacaacatctcaaatattcctaactcatactcatgtgaatctagttcccaggatgtgcactagattcacattttcatctcaagcatgattatacatagcaaacacaaataagatgaaagcgattataaactacatctactttagttacattggccgaccggccaaataaataatagaacagcggaaacttgtctacccaatccacaagcacaccgactaggggtttacccattatgttcaagtcctagaagaagcagtcgataacccgcatcactcaaagactaagtctaaatcctgcaagcaaaagttaattcaacagcaagagtcagtacattattagaaataatgtactggcaagcaccaagacaagcctaacaccctacttgcaaggtatataatcaaggaaggcatagtatggttctttttagcataaagcaagttttatttgcataaaacacattcaaaacggatttgctttcaaataaaatttcagcaagctagtacttagcatatgggcatcaaagtaggcattaatcatgtataaatattcacctcattgccatccatggcagcaaagagatcattctcaaatctcatcacaatttgaaggtaaatttcagcatttaggagaataaacacaagtctatactcaatacatatccacacgccgctcatgaccgcgagcacggctaatcgattagttttaactctgcagagtttgtacactttacccacatgatgcgaaataataatcatgcaagagcatggcacgcgatacataagtacccgatttattacccgcaacaaagcttttccaaaattcatgatttagccttacaccagcacgatacgtgttcctccatcctagtcatactggaaatatgacctagaaccgttaagtggcgggcccacgccttgaacttaacgccgtggtggcggacacaacgggaacccacccacgtggcacaataccgttgtattggacagacttagtcacctaaactaccacgtcggggtaaataggaagttcctctgagttatccgaactcatacacaccggcctaccagaatgtaaggctaaaccataaataatttactaagtttggactatcccatactagcacatgtggttgtactgtatacgaaatgaactgacattgagtgaagtccttaggtcggtttgggcgcactctccccctatcggtacacaactaatcaccatatgtgcaccacttgaggcccaaacctaaaatccatgctttccaccattttatttatcaaaatcacaagtattaaagttctgtccagattaattaaaaatcaattttcatgtttgaaatgagcccataatgacaaggaagaccattctaagcatggctatgctttatagtaacctagtgtcaccaaaactcatatataaagtggtatagccatattgttcctaaggttaggaatgaggaatatggatatatgtggagttaaggtgataatgcaaataataggagtttatctaacaagtttaacaaaattttaatttattagtgtacaatcgacatgcaagatttgcaaacattttcaataacctccaaaagataggttcaaagtgatcaaagagagggaggtgggacttgccttgcaactggaaaatgtcagcacctaaatcacttcttcaccgattaagcaatcatctatacaaagtacacgttatgcaattaaacaccgaaatatgcgaaaaatccaaaatgctctaaaatggatgatttgtgcacagtgaataggtaccggtctaaaattaatttaggtgaaagaatttctattttatctcattttatttgggagttatgaattttagaagtttcgtcggtatagtgtaggatttacttagttactattgtgaaatgctgttgtaaggtgattcttattaagtttatgtttgctggggtgaagatatttgttttctaagactaacaaatttggtttcataatttttagagttaatatgaattatttatgtattttacaagttttaacgtgttctaggcatatattccctatgtgtacatggctttggagatttaggtccagaacttgctctaacttgctagtgttgtataaaatgagtattttagttaactaatctaatcttagtttataaaattttagtgttcaaattactttacttcacattttataagctaggggatgttctatgttagaaacttaacatatcaatctggagattattatataagttaaggatactaagttttggtggaaggggatggatctatgccttcactggttcaacaagttttatttggatttatttggagctaccaagcatatatatactttttcatatgtattgtttaaccattactatgtgtttagtacctattctaccaaattaaggttcagagccatggtctgtaagagggtgctataattcactctactaggttgaagtatattacttgctggttctatagaaaatttggttcacttcatttagactatagatgaattttctacaaatgttactatttaaggtatgctccatgttgcttattccttacttaaatacttaggggttttcattatactgtaagtatgtctttttattttataacattgaagtgcacaaccctatgattctactgaatttgggtttactcaaaaaggatctaagatgaattttatataaacttctaaagttcagcttatgtaaaactagtcattttaaaggtaatagttttagaggcattcgatgtatagtatgtatactatttcattttgctttataggagaacataagttggtggatctgtagaaactgagtttgctccaaaatgagttgaaatgaattttgtatgcattttataaatttgtgcatgctttatgtgtgatttaacttggataaattttagaggctaaatttgtactgtgagtgcaagtttttattccataacactaaagttcacaatttggtgagttgacagaaatttgtatcatcttaaaatgagctatatttaattttatatggattttacaagttttaggtactttccttttataatttcagatttttgtttccaaggggtccactgtcagtgaatgatcaatatacaaaaagatccctgaggtttctaagaatcaacccgcagacctagcctcatatgtcagtgagttgaaaagttgcacattaaaccttatagttgtttaaattctcgaaacaaggtccctgacttcttttctcacgcacagaggcagaacagccatggctgagctcgatctcgagctcaccggcgacaaacgatggctcgtttgggggtgcaaccaaaatacaaaatgaagatcatgttattgcgattccattcttctacttttctcggtcagtggacatcggagtaacgccggcggcgagtccgaaaggaggatgttttcgggtggtgatgcatgtgcttctacaatcatgtattggttaattgggtgcatgcatgtatgttctataggctgaagggtgctcaccgagatggtagacatggctggggtagctaggtttatgacggtggctcgtgtaacggctcggcggcggcaagaacctctgggtgaacggcgatggctcaatcagctccaagaactatcatgcatgtgtgtccatgaggttagagaggccccagagatgctactgatgcatggaattgggttggtactcaccggagggggtggattcggcaacggcgacggtgaccggaggtggagaagacggtggacgatctccacactcgtagcaccatccttcgagattcttgaggggaaatggagaggaggtcgaggcgaagacgctggcgcgacagcttggcccggcttggtccagataagcgggaacggcgatgatgtcgctgcggcggtgcacagagcgcgctctagagcgaccatgacatggcggcgttcccgctgctgtagaagatgaaatggaatgggatcaaaaccaaagttgttcgtcatggtgagatgagaatggaacgagtatgagttagagatgaagagggctcgacaacggttggcgatgtccctcttcttggcggccggcgacgaaagagaggtggagagggagagctggagcttcctccctcggttggattggcactgggatggtgggtgaagaatggcgacgcagctgggtggaggtgaagcctcggttcggcgctgccacgtcgaggccacgcgtcgtacacagccggcgccaatctctctctctcggctgtctttggtccggctggaagatttgcacagggtgaggacgagccagagtggctgccaagtgggtccaggtcgtggcaaactaagctagggtgagagggttgggcagaaacgtgggtgaacaaaaggtttgaatgattttaaggattatttctctctcccactttagtatttcaattatttaatttgtgggtagaataatttagtgtggatttttctgaaggtagatgaagatacctagattccattttctttgattgcactcaaaaattatggatagattactcacagaaattagaggaatatgggttctttggaaactagttcgaatttttaggagacctaaacagagaagataaattctggaaaaattatttttattcatgataaattacctagtatttgaataaattattttacttatacacttttatgcagttaaatgcacttttagacaaagtatggttttagccgattaagaactacagttaatctagtttttattagtttgactaatttatttgaggtaccaaatttagttattaaattataccaaaattacagtgagttgtatgtgttgagtagagcctacatgaattttcccatgattttatcttgcatgaattattttagataattcgcaggacttatgtcttatatgtgtttccctttcctaaatgcatgaaaatgtttataaaagttatatttggactctcattaacatgaggtgatgttgatatgttagaattacagtttaccttacacatgtcataagctccttccctatttatgcataagtttactttagtattaaattaagagaatgcttatagagatgattaaaatagaatataccctatatgatataatttatttgttcactttcatgttcatgacatgtcttcagatggatatccaaattagttttgtgaggcttgacattagccatgttgattttttttaaggtgtatggtttctgtgtattattttccattagttagcactaggccctaatggtttagttgtttgtctagattgcaattatattcatgagacctattatgaaatgcaaatcgaaaatccaaatgcatatgaaggactcaagtcaaaatatgatttatgcaagtatgcatgctttcacttgggttgcatccaagtcctaggttaaaggtgaaaaagtttttaatttgttctcaaattttattcttgcaagagttggatcaactccacctaggtttaaaatagaaatttttggtttacaaaattgaagaacttccctttcaactagttttgatggaaattccttaatcctagaattcaggtacgttacaatatatatatatatatatatatatatatatatatatatatatatacacacacacacacacacacacacacacacacacacacacacacacacacacacacacacacattgaggaattatattgttaattcccctctcatttgagtgcattaaattccaccatattccacttccaaaaatattgcactcaaattagaaaatatctcttttggaaattagatccaaatataatttcctttcaaccttccctattcaaattatctccaaatatattttcctttcaaaatcttctattcaaattccttccaaatacaaattctcctctaaatcaaattattcagccccaggaaaaattagactttcttccttctacgtttgggccgaattctccttttcctccttttcctttcctcagtacaagtcggcccaattagcccagccggccccaccgcacagaagcagccgctccatccttctctgtggacgccaccgccgtgcgccatcggtgcgccgtcgcccacaatcctaccgccgccgccgctagcttgccgtcgacgctaagaaatcgtttccgacgtcatccgccacctcataccgtcgacgtcagtccctggaacgaatcaccgtcgtcgaccaatccagagacgaagcggcgccgtcttttcttcacgacagcgtcgccgtggccgagtcgacgaccgcctctacaaccgccttcggaaaccgcctctccgagacctataaatagccagcaacccctcccctttcctccacacaagccgagctcctcgagctctctctctcttagccatgtccggccattgccgcccccacccgatctccctttccgtagctccacaacccaaaccctcgcgccatcggccttgtctcggcgaggtgaatccgttttttccctttcccctctcctttagccaccattgccggccgaagagagctcttgttgtcgccgttccggcatcctccctctccctctctgccagctaccgccttccctggatatgcggtactcgggaacaccacccgacaccggcgtcgccgtcttccaactatcgaagagccggcgcccctcctccctctctcccctctgttacccggctggaaggaggagaaagaaagaaacgggaggaagaaggaaaagaaaaagaaaaagaaaggctgacaggtgggcccctgcacagtaactcttcgtattttctctatttaattcaaatcctaatctttagaagcccatatctcctaaaccgtagatccgattccagtcaaacttggacctaaattcatataaattcaaaatctatattttgataccaaatttgctattttaagattttatttgaatttccttaatttattcaaatactatttggataaatatttgattaaatcttataattgaatttacaacttaagtttatatttgcttttcaaatattttcttttattccaaattacccctttagccactaaaaagccgccagttggaactttacgccttccacagggacgttcgcggtttactatccccgacgtcggactgttggttgtaaagcccggcaaaaaccaaacctaaggtcgaagtgctgctcctggcaccccacgccttgatgcgtatagcggtcggagcttcactattccctcgacctccacagcacgccgcacagttagctctcgggctctgtgtgatcttagccgctccgccgccactcacggttgtcggagtaacactttcgccccaccaaacctacaccaacctcatattcctctagccgatatattgtcggtcgacaccggctagagaagacactaaatctagccgttatgctgccaactctagcaacgactagcaaacaaccaaaccctagccgataccttgctagtcaaatcccagttgtcatccaaattccataccctctacaatactacctatccaccatattctcagccacctactttctgtctaccagaacctacacataaaatatagagtctagccgatatgctacccaaaaatactaaaccctaggtatgatcctaccaaaacctaccatcagccgatactagctatataaccgttcaaccagttcaatcatccagtatacttcccatcctcctactaatcaaacccacacatgaaatataagcaacagtagttgcttaatcccctctagcctccaactctctagaacctccgcataaaatatcagcacagtaatccatataccctataaaagagatagactataccctaaaccctagccctcctaaccgtttatctctttcttgctattttatggattttattgaaattggttcttcatctttcttagtagagtctattttattttggatggcaacctgtggtatctcaaggatcgaataatcaggttgcctatctcggatttatttgtgttggagcaaggcaagttattattcctccccttgagcataattaccctatattctatatttctattctatgcattagccattcatgattttgaatgcataacctgaacatatagcaaaccagatatgctagcttttgcttagccctgcctagttagactgcataaaaatataatgaacttagattgggacagtacgtaagatttggttgatttccgggtggctagtactgtcccggtcgatataattgccaccaaatacttatgtcgaacgaacgagtacgaccgcagcttctagaatggggacagacctagatattatgttaattaacaatgtggtacctctgtacagtggttccttttgtaagtcctcgcgcaggaggcaatcttatgctgagcagggcatcttatgatatttaccgaggcgcaggtaaatatactgattttcgctcatgagctgtgtgtgtgattttatggaaacctggttgagatgacatggggtctctcatccagttctctctagaaaccccgggaacgccagaactcctcttgctgctgataacgttacgttcagagcgcatggggactagagttcatggaacatgtgccactattgttaataacctaatactgggccatgactaagctaatgaatattagcaagtcgtggactgcgggtaaagcatatatctactgcagtagaatattcatgaaactattcgaatagctgtgctcacggaattgagtaccgagactcatatggtatttggttagaaacttaattccagattttattaaatactgttgcatcaaacacattgcaggatttctccttctatattctctgctttctgcaagtaatcatagccctactcaaatactactaattcatacattcatattgaatataatagcttgctgagtacgttgtactcacccttgcttcaacccccacctttttcagagtccatttggagttcttatcgaagccgagagttcaatcacataagttagttccctttaaacctagtcttgaagtctagtattgttagatggtttaattctatagcaaaacggcagagttgagtcatcatatagcttctgctgtattagttagccacaagtttgtaaatacccatatattttgtaataacatctcctctggagtcttgatcaaacgtatgcaatgaagatccagattgttgaacctgtatcaatctactaatccagggcttgatacagtctaaacatgtcggttactgaatcattagttttgggacccgacatttttttactaactaacatcaaatattaaagggaaattttgctacaggacaccgtgacttcgcggttttagctataggacacttcacgaagtgacttttgggggaaaacactcccaaaagttagatatttgctgatggacatcgcacgtattaaagtaataatttccggttgaagaggagagagaaatctcgtgaaatgtcagaaatgcccttcggcccacatgtcagctctcctatctatcttctctctctatcccctccttcacttctctctctaatatcttctctctctatcccacttgtcagcgacagcggtgagcaggtgaggtccgacggcgggagggcgagggaagagcggacgtgaccaacggcgcacctagacagcagcaccgcccgaacagcaagcgagctgtgtatggaggagcggcggcgtggctggaccatgacggctacagtgcgcggagtaaggagggaagggctccgtcagcggccggtgccgctgtctgggcgcaccgctggccggagacgtcgccctcccgtcatcgcggccgctccacacttaccctcccgatgccaccgccacttaacctcacctgccgcccgtcatcgctgacatgtgggatagagaaagaagagatcaattagagagagaagtgaaggaggggatagagagaagagagataggagagctgacatgtgggcccaagggcgtttctgacattccacacgatttttctctcatcttcaatcggaatgcggtgtccaccagcaaatatccaactttaaagagtgttttcccccaaaagtcacttcgtgcaatgtggtacagtaaaactgcgaagtcatggtgttctgtagcaaaatttgtgatgggaccggccttaaaaaaattacgtccctgaagccacgcctacgcgtgcgcgtgcactgtggagtgaggagcttgacttctttttttgagtttctctcctatgtggacaaacttgctcctcgcttttgtgcgacgcactgctactgccctaaaatagccatgatgtccataggagtacttgattccggtatatgtatctacatggagtagcctgttcttttttccccaaaagctgctaaattacaatttatgtgggcgttcaactcaaaattgtgaaacgaaaatttctaacccacaattttttcttcataataatagcttctttcattattattgcgtgaaaattagtaaattatacatgctccaactttcttatgaacaaatacactccacacgtagaagtagctacgaatatattgtactccatcattctcaaaatataaaaactactctatccgtttcaaaatgtttgacaccgttaactttttagtacgtgtttgaccattcgtcttattcaaaaaatttaagtaattatttattcttttcatatcatttgattcattgttaaatatactttcatgtacacatatagttttacatattttatattttttttaatcagacgaacggtcaaacatgtgctaaaaagttaacagtgtcaaacattttaaaacggagggagtatatgttttagtttttatatttttttttgcgggggaaggagaataaattaatcacagtcctcgccaacaaaatgcgagataaaggtacaattttctcctagccaaaaactagagagggactcagctctagctttatttgctaaaaagtgactaataacattctgactacgctgaactttgcttatggcaatttgccgatccccagccattagtgatttagcctcctgagctatattagccagaactgagcgatctttgtctgggtgatttaagagctggatcacagaactgcaatcagtttccacttggattggaagaagagtccagtggagcgctaagtgaagaccttccacacacgcgtgcagttcggcttccaaggggccactgcaactatcaagagatctgcaggaactaaagatcacattacccaggcaatttctgagaatcattccaatacctcccttctcagaattaatgtcaaaggagccatccacatttagcttcatccacccattcctcggcctttcccaacgacggttttccgctccaggggtatgtttgattgctgtagttttcgggaaattaacactcaccacatatttacctttctccaagttcacctagggattttgtcggatcatgaacagagagtccacataactctctataaatcttttcgaaacctccattggtggggctggtttattgtgcataacttcgttcctcacaaaccagttccgccaaatgatcatgagaactagagctctctcatactctgaaagcttttctagacaatcaaagagccaaaaattaccgaactggattgatttgacgtccaaggagatactccctgatttgtgcatactcacccagagtgaatttgcatggacacaacggcacagtgcatgtcctgcatcttctttttctctgtcacaaatgccacaaacatcaaatctttccaagttcctcttcttcttgttctccatggttgctaggctgttagaagccaccctccaagcaaaaatcctgaccttttgtgggacattacatttccagattagttcccaagatttattaagtctgctcgaggacgagcttgagcaattattcatgtcggcgagctgcaaggccaacttgtaagcacttcgaacagaaaatctgccagttttgtccggatgccatgctataaaatcctcctccaagcgagcagaaatacagatcttctgaatgatgtctgcatctatttttagaaaatactgattgatcttggctgaatcccaagttccatcttctgcaattagatctgacacccatttcagtctacagtttgctttacttgataccggtcttcgtgacaaatctctcgggatccagggatcgcgccatattctgactgaattaccattcccaattctccagatgattccctttttcaataaatccaaaccatattcaatgccatgccaagtaggagaagcatttgcactaaaagttgtatcagtcagagaaccatgcggaaagtatttagccttgagcacttgggcacataggctgtttgggaattcgatcaatcgccaagcttgacgagttaacagggcctggttaaacaatttgtaatctctgaaccctaaacccccattgatttttgctttcgtcagggaatcccaggccctccaatgtgttctcctccggccattatctgcaccccaccaaaaattccttgtcatcttagtcagttcatcatagactgaatctgggaacttaaaaagccccatcacatagactggtatggcctggataacagccttgatcaagatttcttttcccccactagaaaggaaattttcaccccattgaattacccttttcgcgatttttgcttgcaaactctgaaacctccctttatgcattcttccctcaggtgtagggaagcctaggtatctgtcctcaaagttatccctctccacctgcagagtgtttcttatatcctcacttactgatgagggagaagcttcaccgaagaggatcgaacacttggcagggttaataagctgtccagttccttgagcataattggtcagaacctccttcaccacttctgcctccttcttttcagctttaaagaagagcagtgtgtcgtcagcaaacaataagtatgaaattcccggggcttggcgacaaatcttgagcggagttagggaattttgtgccactttttccttgagcaagagggacaagccatcggccacaaataaaaataggaatggcgacagaggttctccttgcctgagacctctagttggagcgaaagagcgaagtaaggttccattgaatttaaccgagtatctcaccgtggttacacacaacataatccaactaacccaacggtgagcgaaacccaacttgttcaaagccaactccaaaaatcgccagtctactctatcataggcctttgagagatccaacttatacgcacaagcagcactgttagctttcttgttcttttgaatcgagtggaaacattcaaacgctaatagggcattgtcagttatcattcgaccctgtatgaatgcgctttgctctttagaaaccagatcatcaagaattggtctcaacctgttaactagacacttagaaaccactttatacaccacgttacaaagacttatcggccgataatccttcaaatcaataggttggtctttttttgggataagaactatagctgtatcattcactcctttaggcattaacccagattggaaaaaattcctgactgccaggattatgtcactctttaaggtgccccaatttctctgataaaatctggctggaaagccatccggcctaggggatttaaggggtccaatttgaaatattgcttgagcaatttcttcctccttgaattcctgacagagcttctcattcatagcatctgtgactttctcctggaacaaccgggtgacactttctgggttaagactcggatcagccttataaactccctgaaaatactcagtagccatagtttccagcaccgatgtcgtactatgaatagcaccgttctcatctctcaacttagagatcttatttttcttagctctccaaactgcgcggctatgaaagaaacgagtgtttcggtctccttcctttagccaatttacccgagagcgttgaagccataacatttcctctctatacagcatttcattcatatggtcagttgcttggcggatagaagatctagcagcatttgacgctataagatcctccaactttttccttgccttttccaattcctttccaacatttttcacctttgttttactccaggatctcaaagcagacataactctaccgagggcaatattaatatcgccgaggtcagttttaacaccagcattaatccatgcttcctcaataacctgcacagactctggttccctttcccacacaatttcataatgaagacacttctgacggggtcgagtggtatccttcactatgaactctagcaagataggactgtgatctgaacagggggacacaagatgtgagacttgtgcttctggaaaaaggtctctccatttatcatcagccactgctctatccaacctgaccttcacatttctccatccatctcttctattgtcatatgtatgcggaacccctttgaagcctaaatcctgtaaatcacagtcatataaggcatcacgaaaattctgcatctgagtttcacaacgtgggttttttgagaagtgctcgaactgccaaagggtttcattaaaatctccaataaccatccaaggcagagcggatgactgtcgaattgtcctgagtagtgaccacatacgatgtctattctcaacccgaggttcgccatacacaaaggtgatatgccattgaggctcatcaggggataatcgcacatacgcatcaatatatcttttattaatatctttgacatcgactgaaacagactcatcccaatacaaagcaagaccaccactcttaccttcactactgacaccaacaaaacctctaaaggccaacttccttctaagacgactcatcttttccacactttgtctagtttcacataaaaagactaactgggaacctgccttttggattaaggcacgcaaatcttgaactgtcgccgtgttccccagaccgcgacagttccaggctagacaactcattgctcctggcgagacccattcttaggtcccgccagtttaccagcagccccggggctggttgcttccatatctttaccattagcattcatatccgctccctttttaaggcgcttcaacgctcttggtgtcacccctgacacggctcctgtattggtctgatcatactctaggatagcttgttttacagtccccaagcccttagcaacaggagccgtcaaagccttcctcttagtaggactaatacagtctgcactagagctttcttcaagggattcttggtgagaattcaaattgcggattgctgggatcatttccattgacggcagagaggcagactcctccacaggcccgactttgtgctcactcctcttcttcgaggaattctgctcagaaacagacagaagattagctttatccgctaactgtgcatcaaccgattcttccccttttccctctttggaatcaaacccatcaaatgcatcaactcttggtagagtatcttcgtggatattaactctctgcatctgaccagccgaagaagagcttgcgcttcctgcacctctgaaggacaacttcctctgaaccccataactctgaaaagctttcactttactcaccttcctctcaaaaggttttaaaggagaacagcgaagttcaacagaaaacatcaggggatcttcctcatttgcaagccttttttcacactccttatctgaatgcccaataaatccacagaagaaacaaaagtgtggtatcctctcatatctcagattaaatctccgaatttcctcagcccccttcaccttgattttgatagctaacatcctcttcagtggacgattgactgggagatccacacggattctgaaaaaatcatgtttattacagccgtcctcctgaacatccacctctcgaaccttgcctagtttactgccatagattacacctctttctttgttcatcataacaaggggaagatcgtagattctgacccaaataggcactgtttctaggggtaccatagaaggactcaccaacccgttaaagtctgcgactagcagtgcatcgcctctatgaagccacgaacgaacttgtgatctccttctgcactaaaggatactataaacagattatccttcaaagatttataactcatctctgctcgcaggcgccaagctcttcgcatatcctcaaacaatgctacctggttagggaacttaagggaatagaacctcgcaagaacagtccattgaccggccttcttcacttcatcctcttccaactcaatctccactgcatcatcatcttcaactgttatttcaccttgcatgaacgctgtcgggcgttggcttgatgaagtattctcatggtctcccccagtcagactcttatcccgcgctggattttgagtcttcagatcagaactttgttcctccaaattttcagattgaacaacctggatagccagatcctcatagttcctcatgttcttggacgtcgccatcgcagcaccgagtagcttcgggcgggtaactatcgcattgatagtccctttgtcgcccccaccaccagtagctgccatgggaagactcgcaaggactcggaggaagaaccctagattagaacctgatcgaggcgtgtgacgagatcgagaattttgtgtaattgcctcccttacttctgcaggtatatattgccacaggctaggaaaactaatcgtaacagatattttcctcaaaacatctaatccgaggatatcttgataaaccttcggacccaaggattcttgtttaccaagatcaaaccccgttatcccaaaccagaatatagcagatccaatcttcataccataattcataatggaccatgttggaaacctttgcagcaccgatcgtcgattcctcccatattggaaaacaaagaatccaaagggaaaggaaccaggaacaggtcggaaagtatgaataccttgataaggaaggaacgcagacgaaggctctgcagacgtcctgagtagatcggagtagaactccatccattttcttctcccattggagaaaatggctgccgcgcgccagtcgcccgggcgccgccaaaaccctaaccctaacttcatcagtttttatattttgatacggagttaccaatattatttcatcccttgcctagagccttgcagctaagcacgcttcagtatgtgcatcgacgccaccgagctctctcgccacctccaccaccatcctctccatcgccggcgccggcagccgaataggcacctcgacgccctcctcgccgtccccgctcctcctcccggcgacgtggaacgtcgccagcgtcgccgtcgccggcccgccgtacgccggcgcgccccacccgacgtccac

SEQ ID NO: 22082 - DNA, 3327 bp, Oryza sativa
tccctgccggcgtccggcaccgcctcgtactccgggtggcgtggcgcggcgacgtcgcgcggcagaggcggccggcgcgcggagaggagctccctcgcccacaccggcttcaccgtcggcgcgccgggcaccccgcgcgcgaactcccccaccgccgtcatgaactgcgcgacgccggcggcgtcggcgaggcagtggcagatctggagcccccacacgaagccgccgcaccgcatgcgcgtgacctggaagtagagcagcggccgccccacgacgccgctgtcggcgtacgcgccgtcggcggcgcacaggagctcctcgtggcgcggcacgggcgggccggtcacctccccgagctcatccatcgccaccccggactccgccgcgacgaacaccgcgccctcgccggtgcactcgacgagcagcttcctcccggggctcgcctccacgatgcggccggcgagcgggtagtagtggacgagcgcctccgcgagcgcggcgcggagcacggcggcggggtcgacgccgtccatggcggcgcgccgccggtacaggaagaggcccgagcggtagaaccggaggccctcctggtcgtcgatgtccgacagcggcttgaactcgtgcggcgtcgccctcgccggcgccaccagctccgccgcgccgcggcgcaccgacgacatcgtcctcgccatgttcacactagctggacaatctcttcgtgagctcttctgctgcttgctttgcttgcattgtgattggcgatgtgagcaatatatatacgcgtgcatgggcgttgtggtggtaggtatagactaacctatggaattcctgaccgtcatcgttttatttatgattgtattatgctttccttcgtcttataaggatttttagctgcacaactagatgtttggattcatggttgaaagctgttatattttagaccggaggtaataagccataacagcttataaaaaagtatttgcatgtaatgttttgtgagggctgctataaaacgggatcccgttgtaacgggatagacatattaactattcttttgcacaagtatcatatgtatcaggtcctaggtatcatatataataggtaatatgtatcataggtatcgggtaccatgtagctggtaccaacgagatagacatattaactattcttttgcacaagtatcacaagtatcaagttctaggtatcatatatactaggtaatatgtatcacaggtatcgggtaccatgtagctggtaccacaacagttatcacttatcaggtatcaggtactgtctcatagaaggatatcccattccaacgggataccgttgtctaggttttttgattttttatatatatttgttttaattaatttaaaattaaatgctgaaaaataaactacgacaaaaaacctataattaactacaaaatcaaattttaatattcaaattttagatgcttcttataattaagtagaagggtaaatgatggaaataatatgccttggccacctagcccctaggggcatcgatgattatccttcgaaatggtccaccaaatgtttgcaaccaatgcatcaatatgtttgattatttgatttcatatagtagtttaacccttttaaggaaaactatagatttttcgaaaaaatactgtaaaactaaatatttgaatgccaatttaattaatctcaaaactgtatacttataactctagcaaaacagtactgacatggacatctaaactttaacattcatagttttgtcgtaaatttattattaaaactgtaatttattaatctgcaatacatcgtcttaataatgtatttttatataagtttagtactaaaaccgttgttatgcgacatgtcactcaaaatctctgtacgaattttgcaatggcttggttaaagtttttatagttttgcaaaatttactcttaaagaaaaaacagccagtcatacacgctagctttgatcttactctcacctacgaaattctaacacacatgccatatactttgatcttaattaatcttcaacgttgtcacacactatacatccatcaacggccggtcagctgatgcatcctggtcaatcaatcaaaccaggaatgtgttgagcaaatgatgatcaaatcataaattaagtgatccagcatgcactactgtatagctagacgactcttcttcttaattccatcatcttttgaatttggatgaaatactcttccatctgttgaccactacaccggattttagcgtaaaaagcgatagtggcatagtgcgaattcctcaagattcgacgacgttgagatttcatgcgtgcgacgagctatagccacagcccacgatcgacgacctcttcttcgtggacagcgccggtcagctcgatcgatcagcgccgccgccttgccggaatttaattattgtgcaccggggccggaatccaatatacttatatatacttatatatagttcatcctctgtagataatactatttctctcttctctcattgagccacatcaccctgattatttctataacatttagatgatatatctatggtctaaattgtctcttctttcttctatcataaaaacatacaatcttaattatttttaggctcaaaatgatatcaaattattttagttttaataataaaattacattttatatgtacacattatttaacttaatttttcacagcaacacggcagagtattcatctagtttagtttaattattgtgcatgccggcgtataggaaacggcggtagtgggtggcagatgatcttaccggtcaccactgatttgggtgttggttggcaccattaattaattaattagctttaaggagtagcacaagattaattaattaagttttgattattacaaacttgaaaaatggattaatcttatactattttagagcactttcgtatagaaagttttcgcatgaaacgtaccatctagtagtttgaaaagcgtgtcacgagtatccaaaattttatttgttggagaaacgaacgcagcctgaataatcttccatggaaagataaaactacaggaaagataaaactacactaagatcgtatttgagaagcttaaaattctgaaaattagttgattgatatgtaggatatgtctggggtgtttaagattcttataagcatatggttggcatctagcttcaactgagtttatttttgagagaatcccttgtatgtcactgaaaattggtctgatcctttatatgccattgaaaattggttcttcccttatatgccattgatccaaatttgcacaccctctcatgccactcccg

SEQ ID NO: 22083 - DNA, 664 bp, Oryza sativa
  unsure (1)..(664): unsure at all n locations
cgttccgcctcagggagcggcggaaccggctcttcgtcgtggggtgcaacctgcaggccgtcctcctggacggcgacgacatcgccgccgcgtgcaccaccatctgcggggcgccggcgccacctggccagcagcggccgacggcgagctcgcggattactcgtgcgcgggcgttggctgctgccaggcttccatctacctaggcctcacgtcgtacggcgttcggctgtcgccgttcggcacaagcaccgggccgncgtcgccgtcggcgaccttctncggcttgtcgtctaaccaatcggattcggctctcgtgttcgtcgcggacaacgagtggttcggcgggaacgcgagtaagctcggatcagcagcagcgacgatgcgaccgggcggcggcggcatgccggtggcgctggccgtgctcgactgggcgatcgggaagtcggggtgtccgccgcatgggcccgacgacacgggctgtagcaacagcaacagctactgccgcaactctaccaacaccttgcttggcgctactcgtgcagtgcgacaacgggtaccaaggcaatccgtacgttgcaaatggatgtcaagggaatttggtactccctacttccctaaatgttggatgccggtgactttttaaaacatgtttaaccggtcatct

SEQ ID NO: 22084 - DNA, 523 bp, Oryza sativa
tgttgaggggaaggtcttcagaatcaacaatgcccttgacaaagctgagccactctgggatcaactcctcacagttgtccatgataaacacccggcgtacgtacagcttgatgttgttttgcttcttcctggtgtcaaagaggtcaaatggcgctctctttggtacaaacaggatggccttgaattcaagctgaccctccacagagaagtgcttgacagccagatgttcctcccagtcgtttgtcaagctcttgtagaaagcagcgtactcttccttggtgatctcctctggcttcctcaaccaaatgggtttctgcttgttcatcacgttccactcgtgagagacttccttgatcttcttctttttcttctctttctcttccttctcctcatcaacatcctcaacctttccctcctcagcatccttctttttttcctcggcttcatcatcagaaatctccttctcagttgtcttctcagtccatagggagatagggtagctgatgaactcagaatgcttctt

SEQ ID NO: 22085 - DNA, 595 bp, Oryza sativa
agcatgatcttcattgacccatcctgtagcagaaactactagtagttaacttgcctagctaaaaaaaccgaagtaattaatcaacctcaagagttaattaacggcagagaagacacatgaataatgcacccgtttcttttttcttccatggagaggaaagctaaagaaaggtagtacttggaacagcagagaaaatgcctggctttcccttgtatgccgcattgcagcgccggccgtcgaccgaaaaccaccaccaccatcaccatcaccaaaactcccctccatatttcttcgcctatatatcgatcctccctatatcctatcttggattcagctcaccggccggccatcccagtgtcgccggcgactcctgcgatcccaacgatggcattgggccgttgctgctgctgctgctgctcctcctccacaccctcctcatccttgctcatgagagtagcgaggccgtggaagaagaagaatggtctctctctctctctctctcgttttctctgcgattttatgattgctgctgctgctgcattggaacctaaaatcgcagagaaaacgagagagagagagagagagagggctgcag

SEQ ID NO: 22086 - DNA, 510 bp, Oryza sativa
acgaaaggcaagttggcaccacgcttcgtggggccatacaaaatcctggaacgaaggggggaagttgcttatcagctagaacttccatccaatatgatcggcatccatgacgtgttccacgtgtcccaattaaagaagtgcttaagggtacctgaagaacaggctgattcggaacacattgatatccaggaggacctaacatacgtggagaagccggttcgcatacttgataccagtgaaaggagaaccagaaacaaggtcacccgattttgccgagttcagtggagtcatcattcagaagaggaagcaacctgggaaagggaagatgagttgaaagccgcccatccgcacctcttcaccagctcctccgaatctcggggccgagattccgtttaaggggggtaggtttgtcacaccccgaagttctcctcccaagccaaatttaatttgtaaacaaccccaagaaaatgcaggtgcaaatcaagagaaaaccctaagaaagtaatgcaa

SEQ ID NO: 22087 - DNA, 592 bp, Oryza sativa
catccggtagttgccaaaggcttggtagatcccttgtgtcatggtcatccaagaaacaaaactccgtagccctctccaccgccgaggcggaatatgtttcggcaggtagttgttgtgcccaattgctttggatgaaacaaaccttgttggactatggcatatctttcaccaaaacctcactcctatgtgacaatgatagtgccataaagatagccaataacccagtctaacattctagaaccaagcatattgacatacgccatcacttcttaagagatcatgttgccaagtgtgacatagtcattagccacataagaaccgaggatcaactagccgacatttttaccaagcctcttgatgaaacccgcttttgcaagttgaggaatgagttaaatgtcatagacttctctaatatggcttgagatggtgcaccatggttgcttcttttgcatattgtatatttgctcctatttgttcttatgctttggatttattgtcatttggttcttcattgcgaaaatggagcatgtcacattaaggaggagtcttgcactcttgcatgtgttccacttccttttatatgtgagcaaat

SEQ ID NO: 22088 - DNA, 560 bp, Oryza sativa
cccgaggtagggcggcgaccactccttcccagagactggatggaggaggctgccctccaatgccacgtggtactcccccgaggggggtcgggcccgaggtagggcggcggccactccctggccgagactagagggagaaggccgccccaggcgccacgtggctccccccccccccgaggggggatcaggcccgaggtcgggcgtcggccgccccctcccatgactaggggtctgttgaagaaaaaatcgaacacaccggcctgggagatctgcttagctcctgtgcaggtccaaagattaatgagatgcgggcgtgccagtcagtttaatcctgcaactgacaagatttgcaaataatagatcaaacagccgatcggctgacaagccgatggagtagttccagccgatagccgataatagccgatgccgataccagccgatagcgatagggtttaagcaatcggctatatgtcaaatgtagatactgatataaaggcaatcggctaatgatgatgtaatatagcaatataatcctgtataaaccaatcggctaacaatat

SEQ ID NO: 22089 - DNA, 539 bp, Oryza sativa
tccgtcccttggcggcttgcgcgcggagtggcgggggccgggcggtgacgacggcgatgacggcgggcgatttggagcggcgcgacgacacgggcgacagacgcgcacagaggctgacggcggcggcgaccgggcggtcggccactcggcacgcgcgcgcggcttgcaacgggcggcatccgcgcgggcgtgcgcacgcgaacacggcgcgcgggaagtggcagcgagggagcggagagggaggacttggctcgtctcgggcggcttacgcaggcgcggcagagcgaggagaggggaagggggcgctcggcgcggtggctcacgcgcacgcgcgcgggcggagcggaggaggaggagcactcggcgcggctcttcgcgcacgcgcgcgcggcgcgcgggcgaggcggagcggaactgagcggggggggggggggagcggaacgcgccggggaggggagagggccagagagagagagagagagagagagagcgcccgggaaagggggagagggagccccccgggagggaaagggcggggg

SEQ ID NO: 22090 - DNA, 615 bp, Oryza sativa
atcaagttacattacaatattctctctctcctataatataagcatatattcttagagttgaacacaactattaagaaaatagatataactaaataggattaggctacgattagatgagaagtgaaggtatgtgagaaaattaaatggtagaggattgtaattggttgagaagaaaatgctggtatataagttattatattttgagacaaattctaaatgttaaaagttgttatatttttaggacagagggagtaaatgataattacattattttttaataaaatgaatggttaaatatatcttaaaatatcaatggtgttatatattaaaaaaatggatgaagtataccctaattagtggcagaattaattaagctcgatcgatctcatcacatcactctctcttccgtgcatggtgatcaattaaactgcaaagtgagcctgtcgtgaccatcacgccgacgatcaccgtgacggagtacaagccggcgccggtggtcgcctacttctcctcgagaggcccgtcgccgcagacgcccaacattctcaagccggacgtggcggcgccgggggtgaacattctggcggcatggatcccgacgtcgacgcttccggc

SEQ ID NO: 22091 - DNA, 521 bp, Oryza sativa
gacaaaattataaatagtagacatgtaaaaaaaaatattgctgcaaaactgttgtgcttcaggctgccttggccagctccctgtccacagccaccttgaggaagctgccttcctccaccaccatctgaacaggcaggaacccgagcccattggcgacggcgagcatcacctccttcatctcggcccggaactcctccaagtccaccgtgccattgccgtcgtggtcgaaccgcgcatacaagccacggtacatctccacgagttcatcggagctcatggcggcctcatcaacaccgaaatgcttctcaaggaccctgaggctcatgagctcctttgccatctccgagtaggagaggaggccgtcacggttggtgtcgagggcggcgaaccggccatcgacggaggagttgaaggcgccctcgtcctcgacgaagcttctgatggtcttgccgtcaaggatttctacactcatgttgccggctctacaaaatgtggcggtctcagagatgtttttggtgtgt

SEQ ID NO: 22092 - DNA, 4664 bp, Oryza sativa
aacctccccgtcccgtggcggctggagagaggagaggggagagagggagagatgaggaagaagggtagggtgggaacgacatgtggggcccatgtgggccccaccatttttaattattttttatgtaactgatatgtgggtcccaccagttttattatttttctggatgaattgccatgtaagcgccatgtcactgccatgtcatacgaagaccgagtcaaaatagccacgtaggcgccacatcagcgaaaaccgctatctaaaccaccgagggaccttatctgcaccggttttgatagttgaaggattcgttgtatctggttttagggttcaaggacgaaaattggattcgttgacaagtttagagacctcagatgaacttattccttttaattttggaaaaatacatcgaaagtctcttgtattgtcatcggattacaaaatcatcctccaaccataaaactagatatatgtcatcctttaacttacaaaaccgggtcactctaagttcttaggaagttttgaccccggttttatctgacatgacaaatgagtcggcgtgggccccacacgtcagctgctatttcccctccctctccacctctcttcctctgtcatcccatcctccctttcttggcaaccaaagtcaggggagaggagctgggcgcggacgatggctggtaggggaggagttgagttgaccctctctctttccatcttctatgccttcctcctctctcacttttctcgtcggtgtggaggaggccggcgggacgatacgggagaggaggaggtctggcggcctctcgtcgtggctgtcgcagcgattgttgctaaggaggagtaggcggttgctgccaaggcaaggctgtgtcgggcaggacacggtagcatggacaggggcggcggagaccatccgacaggcggtcaatggggagaagggcagccgactgcaatggtggacggatggatttgtggtgggaggagcgggcaagctcaccggcctccctgctcaccggcctccccgctcccctcgctggacccgtctcctccctctccatcactcgtcgttggcctccctgcgcccctcattggccccacctcccccctcgacggcagctttcctcgattgctgctaaggaggagtaggcggttgctgccaaggcaaggctggagggaggaggctgtgtcaggcaggacacgagcagcatggacaagggcggcgaaggccatccgacaggcagccggtggggagaagggcagccgactgcaatggtggatggatggatttgtggtgggaggagcgggcgagctcaccggcctcttcgccctcctcattggacccgtctcctccctctccgttgctcgtcactggccttcccgcccccctcgttgcccccctggacgacggctttcctttgtgcctgcggcctccccttctcctgtgccacccgtcgttgtgttgccggccgccgatgcccttctcctctcccacctcgacctgccgacctccttcccacttgccggcgagcctgcctagagaagagtgagagagagagagagagaggaggatgaaggggagaagaagggaaagagagggtgatgacatggtcaccctgacatgtggaatccacgctgactcagttgccacatgagacaaaatcaggatcaaaactgtctaaggacctgagtgatctgattttattagttgagggatgacatatatttggttttacggttggggatgattttgtaatctgatgacaagatgagagacctcatatgtactttttcctttatttttattttttatttttggatatgagggccatcaagtatatgtatgcacgtaggagtacagtatgtcagtataccgtagtggtacaggacttgctctgtaattagtactgtatcggctgtataattttggcaaatgtaattttaaaaaacgggcttccgcacgttgcttcaactcccacggaggcacccaacgtacataaaaatgtagataaatgttaatattctacaatcctgtattatacagaaaaaaatgtataacgttgtacaatcctgtaaataccaaaaaaaaatcaatgtttttttcacccttgcactccacttgatttttttttcacccttgctttctcaccatgcataaaattcgtaccaaacgtacatatttacatacttctttaaaaaaaataaaggtaagtaatagaatcgagaacctaaacattccggtgtcaatctcaaattctgaactctgtaaagcaacggtgaatagaaatctgactaggccgcgtagtcaaccaaaaaaaaaatcatattcagacataggccctgtttagatttccacctcaaaatttttcacctgtcacatcaaaacctttgaacacatatatgaagtattaaatataggctaaaaaacaactaattgcccagattgcgactaatttgcgagacgaatcttttaagtctaattgctccatgatttaacaatgtggtgctactataaacatttgctaatgatggattaattagacttaataaattcatctcgcggtttactgacggattctgtaattagtttttttttattagtgcccgaacaccccatgtgacaccctatataatatccgatatgacatgccaaaactttacatctctggatctaagcacccccatagtaactgaaccgagactttgcgcgcacctgaaaatatttaatcagtaataatattaagtgaaaacagtctttctagtggttcttttcaatattttccatcaaataccagtagctactagtaatttacccgtgctaacgctaccgcggtaatacatgtagaaacacaatgcatgtcatggaaacatttctactactccactattcatttaactgaactggtgagttgggtcaggtagactacttgagtatgcataatgtggtttctgaacatttgtaggaaaaaaagaagaagcttggagtacaactggggccaccgcttcctcaaaaggacttctgaacaattttgaaaatgtgcacttcaagtcttgaaaatacatactattatacaaaccaatagccatataatgacaaggaagaacttgtcggtgaatccgctcaatacgaccaccttctaacttcccaatgtttactggactaagcacaaaatcgcatgattttagccttttgagcagcagaggcgcgcggtgcgacagatgcctctttcctcctttgcctatagttagggctcttctgtatgtaccacctaaagggcaacaaaacaactccacacaaatattagcacatgatttgcattaaatacatgaaaaaaaatcaatgaagcatcacccaagctaaaaatggaatctgacacattgttaaattgtcagaatatctatagtaatttgggaattaaacacacataatcatattgacatgccatcaccaaagcatatggtttacgagcaatcagcttatgatcacaaacatgtttcttttctgttcctttagtaaatacactttatttaaaacccttcctttgtaccctcagaggagcagctgcccattcttttgaccacaaactgaaatatttgttgagtcatctcataaatccaggcagcaaatgtgattccttctagcaggtcctttttatgctttttatgaaccagacaaaatatacgattgtgtgcaccatcttaaaggataatgatagaatacatgggcatgtgcagcaggagcaccaggggaactcaaaaatattagcaatgcagtgttcatttgactataacatcagcagcaccagtgataaactcacacatgtaaaacctataaaatttggtcaccaattcagaattgcatggtaaacaggaatcccattaaaaaaaatctgaaaactcgacaatccaaataggaacaccattatgaaaaatctaaaaacttcagatcccatatgtaggagttaagggaatagtgaagaaactggttgtaccttcaattcagggaatgagatacaggaagggacagtagcagctgtttgcagtgatacgggaatggataatcaccagcgattccttaaggaagaaacaacggcgaggcaacgcccttgatagaagttgttctgcatatggatatataatgacatcatatttttctcaacggagagtcaagaaaaaaagcatatttgttatattttaaatgaacaacaattgacaggaaatttttcagtaactaagtttgcaaatttgttttgatcccatcactacctgcgtgacaactcgtacttatttttttcctactctgctcaaccttagaagcaaatcgcccaagcttatgttacactacattttgatttttcaaaccagtggtgacaaagaatgtctttttgcttctttaacaattaaatgatcaacacacataagcagtttgttttaacttccatttttttcacaaatttgttgctctgcaatcaatatagtaattctgggcagggttcaaatttgatactatggagatggacacttcaagcactgaattagattatcaacattagcatcaaatggcacaaaaatattgggccaacgaaatgattgcaaagtgaaaaaagggataacagaactgaaatattaggaaacatattagggatggggagacagagaagggg

SEQ ID NO: 22093 - DNA, 548 bp, Oryza sativa
atgtgaacaacatacttataatcagcacacaaagaaatagtagaacagttgtggcatggatataagtgaaacattatcacacaactcttctttatcacaaggaacaacaagtaaatcaacttgtgacaaaggcaactcagcaattgattccactaatggttgctctactatagcatgaaaagtggacaagtgtagctcaccttgagaatactcaccttcatttctctcagcaccatttaatttaccttgcgaacttttttcagacatcgcaggtgcttcatcctctttcttctcaagtataccattctccttttcttggatgtgctgatcttcctgcaaaacgttagtaacaggggagacaaaagattgctcctccaatgtttgcacatcatcattacataagtatattggggattcagaaataggagataaatcacattggtcatgcatcctcgcctttgatatgatctgactctcaatgctacgagcaagcatgaataggtgcccaatatgattatatgggtaccgagctcgaattcgcctatagt

SEQ ID NO: 22094 - DNA, 517 bp, Oryza sativa
tgaatcttcttctccggcgaatgggcaggtgctgcagtcgcagcggggaagcagaaggccgccgccaccgccgccgccggccgacctggtgcgagaaaccggcaagccctcggcgatatcggcaacgtcctgaacgcccatgtggtcgacgggtaaggagcagcacgacatcatcgtcgccaaccttccccgattcgttcttcctctcgtttccttctctgaaaacctcgtgttcttcttgcaacagcaagatccagctgccggaggggatcaatcgcccaatcaccaggagcttcggcgcccagcttctaaagaaagctcaggagaacgccgttgcggcgaacaaggtacggagtgagacacaccccccttctgtttctcgtgttcttcttgcgaattcagagcggttgatttgatccctgatttttgattttggtcgcagattgtcgtgcagaatccggccaagaaggagccagctacgaagccggcaaagaaggtcgtacccgtccggagaacg

SEQ ID NO: 22095 - DNA, 2341 bp, Oryza sativa
cgcaattttggccgcccataaagagcttgcagccgtacttttttcatctgggtcccttgccgccgacccagatgaaaaaagtacggacaaaagatttttctatgttatgttaataataaataaagaagtatttattggtaaaatttgttaatattgttataaaaatgtattgaagttggttgtcgcgcaatttcatatgttaagtgaggtattattttgtaccttattcgacgtattagtactcggataatttatataggcctatcgcagtctgggtcgtagaaacattatatggacttaaacaaggagaattatgtaacatgaagaaatagtagtacaatttgaacatgatacaactatttgcattgcggttacatagatgatattagattcgaactaggagggaggtaatgcaatagttgaacacaacgacgatgtagtaatgggacaaggaagcatgacagtagaaatttcaatatgctaagttgtccgataatagctaacccctacgtgaggatccctctcctctctcaaaccgcgctttagtaaccctgtattgctctggtagttcaagctgcacaacacggctaggtggagttagaatccttctggtgtctatccattctctgtattgttatctccttggtggttcctgggaggaaagaatagatgtaaagcaagcaaagttagtaaatgttgtgagaaaataaggattcatgtaatcaaaatattcttaccatgaaatcatcgtcaagaatatttggacaaacaaagaaccttcgacccaatgttgtaggatttatggaacgaagaagctgacaacgatcaccacacctgcatcttagacaggcttcccatggagggagtgccgtagttagcacccgccagtcgctctgttgttcacgacattgtcgttcataagccgcttttctctgtaagtattgctcagtactttcggatgcgaaataccagcgaccttcttataaacaagtggttaggtcgagaacgggattttctgtatcgacccactcgatgtatgcgcaagccgtagtgcgggtctgccgaatagagtagtgttacgaagaataaagcgattgcccatacggaatgaataagcatatgcagataataaaatacctcacggtcatagttagggcacctaaaaaagcgccttcctcgaatatcaggattcctcgaagccattagttggcatcgatcaccgcataggcagagaggacgctggcaccaaggtggtagtaggtatacacaaggatcgttacgccagtttggatcctcaacaccccggcgtctagccattgatgaaagccggtcggatttgtaatgaagcaagtggggaagagagtactgaatgtgactgagttctgaaagattgtgagacctcactcgttaaggcgacttatataggcgcaaaaaatcgagtgatacccctgacatgtgaacgtggtggggtatggtgggtacgcctgattggcgccgaaagttacatgcatgattggcgccgaaagttacatgcatgatcggcgccgaaagttacattggtcgtatgcgccaaatggcgggcaaatactcgtatcgcacgcgaataaaggaggctgcatcggtgcggcagaaagtagtcgtgcatgcgccgaaaggtatcgtgtatgcgccgaaaggtatcgtgcacatataacaacaacgtagtcattacacaagcatacagtattggaaagtgaagcaaataaacaaagagaagattgctctactggccctgccccgcgccgcaaccacgcttggtcctccgggcctgtgctcacacgtggtcctgggagtaggtgaaacgatccggtggcacagcacgggtagcacgagtgtcctacggaggagtggcctgcgcctggtcctgcgtctgcaccggcggtgcgcctcccagctgtgaggggccgatgacgtcctctgtcgagcctgaagcgaagtcaaagtcagtgatgtcgaagagcaaggtggaaggcagcaagcggtccgacgaggtcccagcatggtccagtggtggaccctgactcgacgtgccggctgcctgtgacgaagtcccggtgtactgccagaactgcgctgagtgcgaggtcgacgcagttgcctgagacgctgaccctgcagcctgggagaagtgggcggcctgcgtcatagcgaactgggcgaaacctacacatcgacaacaggacccttgtaagctaagacataaaatgcatgtaaattgattgtcgaagtaatgttgtttttttaagtacttgtggggggcacaacagaaggcctagccgaggaaggcggggtgctgaacggt

SEQ ID NO: 22096 - DNA, 5251 bp, Oryza sativa
aactgctggaaagtgaaaaccaaccaaacagccattggttaaaattgtggtcatagaacaggtaaaagatagtgacgattcaagtaatcgggagtcagaacagtatatatttgtctaaagtttaggaaaagtgagctcttgcagctatggactgtctggttcatctacttcaagtcctgaacggccttggtatgctggatctctgcagatgaaatccaagttcaaatttcaacagtataaaagattctgttggtctttctgaataatgatttgagatgacagaattaacaaatctgcaaacaggtttctgctccacagaatgtcttgcaaggttaacaaagaaaggaagagggaccaaactatgtgtttattttggcagaaagatacacttaatatcacaaacatgcattgaaagatgtcacaatgagagaggaataagcctgggttaaagaattcagcaactgagcacgcgtccaaacaaatattgattacactttgtatcttcaaatgccatgtctgcattgaatcaacaagggacatatataaaaccaatgtctgaaaagcattaactaacaaagactaacaaaagaagtcagggaaggaactccaagcatggttccgaaattagctactccacaagccatatatatacttctaattgttggagaagaagcagataagtattgttggacagatgaagtgtgcacatgaagaaatccaaacaaaaggttaattttttccaatgcatgatctttggtccagtcgagcttcaactccaaaccttaacttgtagatattgaatgacagcaaatccaatgagggaaccactattgataaataacacggacttcccatgaactaaccaaacatagatcccttttcaactccaacatccaccctttggcgtgtcatctaaagcacagaaacacatacgctaaacaagattagcttttaaaataatttataccaagggtacggaacacaccttatataaaaggataatgtctgatagctggccattaggtaaaattcctcaaagtgccgagacaaagaacagcatagagacagacaatccaaatcaagataaatctatgaaacgaccagaccttatctaataacttactgcccttcctcaatttccaggtactagctttctcacagggagctcatttccaaccaaccctgtaatcaatatgcgaacaagaaaacacatgcaccgaatctagaaacaatcgatcaaaccacaaaatggtaatcaatatgcgaacaagaaaacacatgcaccgaatctagaaacaatcaatcaaaccacaaaatggtaaaccacaaaccaggcaatttaatttcctcgagaaaatttcctcgtcacatggacaaaaggagaatctgcatgcagaggaaggcacaaatgacgccaaatcaaatatgggcataagaagctacattatcaaccaaaacagaaatagaaacataagaatgcaaggagagcactaaatcgtatatagttgtaggttgtacgatctcccatggtctcatctagcttgaagctccaaaacacaccctcgaaccctccccatccctgatgatcgaaattaagagtattcaaattctgtccttgtggggcatttaactttttaataaggagttgaagggaaaatcctggttgttcagaagatttcaatcggaattggatttgccttgcaaaatgaccaaaaatagacctgaaacaggcaaaagactatcttctatgaatctgtataggcggaagcagcttagacatcaaaaacaaattgtcatggtggaaaggagggataagcctgtttagagaggtcagaacatccaaatctgtattgattttgcagctccaaatctgtactgaatctgtatgtctgcatttgaattgatggcaggcacataaaaaccatgtctgaagagtaataactaaagaagtagaaagattgttaatcacagaagaaaccagtgccctgattagctccaaaatagcaactccaacaaagctagtacttccaattgctggagaaaaaacgaaaatccacataagcatcgctgagaagatgctaaaccggatggtaagtactaaaataatgagtgggtgaatttggcttaatgatctttttccagttatatgatagttgctccagtccaccgtaatatcaaaagatccatcctctactcttggatttaatctcccgatagccacccttctgcatcatctaaaacaaggacaaacacacaaaccacaaaaaaaaaactaactcaggtctcaagtctagaatccactaaaattacgagatactgcaactgatggctggccatcagggaagaccccacacagaaacgccaagccaaacgatccatatgctgaaataatccaggtaacaataatctgcgaaatcaatcagaccttgtgtgcattcagagctccaacccccagaccaacccagagactatcggataaacataggtaacaattgaaggtgataaaacacaaaccgaacaagccaacagcctccaatcaataaccttgtcaacttgggagaaaattaaggaatctgcgaccaacaaagaaagacaaaggcacaccaaaatctaagctacatgtatgaagcaattctgatgaccgaaatagaaactaaacaggaagttaagtattaggcaaactaggaaaagtatgttttggttgtagaattctccagtagtcacatctatcttgaagctccaaaattcctacgcaattccatttctgcagataaatccaagcacttaaattctacccttggtgagtacttctaatgatgaattgaataaggggatttaaagatttcactcagtgaaggctggccatgcaaaattatgaactaggacctgcagtgagcaagagaccacttattcgagaagaaattcaactttgcaagcaattaacttctgatggtaaattgaagagaaaggggtgatgatttaaaggattcactcagattggccatagaaattatgtagaaacctgcagattggccatagaaattatgcagaaacctgcagtgagcaatagattggacttaaatatatctttgtgaggtatataacttctaatgatgaattgaagagaagggtggtgatttaaagatttcactcggtgaaggttggccttgcaaaattatgagataggcctgcagcaagcaagagaacatttatttgggaagaaattcaactttgtaaatttttaacttctaacgatgaattgaagagaaaaagggtagtgagcttcactgagacgagccataacaattactcttatttagagacctacagtgagcaagagtattattttggaggaaagcagcttaagcatagaaaacatgcactaaagactgagtggcataggtataaagcctgtcttgagctcgcagaccgaggcaggtttggattgcaaattccatcttagttgtgtgctatctgcaagaactaagaattactgatgaagaacatggaaaatttgattaaggggaagattgtcgatcacagaaaaagaactgccagcggcctgtatgtatggtgattccaattcatgcagcaaataggactcgccgtgagatgcaactcccaataattctgaagaacaaccaacggcccaaatcagacttttcaaggcattaatcaaattatgctgacaacaactaaatcaaatcaaggggggttcagaatccaaacgaagcattgctattccatctgacaatctcccgtaaatctatctccaaatcacttagaaatctgcacatcttgaggatctgaccaaaggaaatccagtgaacgttgtcacgacaccacaaactttcgtgtcagaataatttcagaaccaccatgaactaatcaaaaagccatgaaccataacaatcaaacctccacctccccgattcatcataataatcaaagcaaccatgaacctggaccataataatcaaacctccaccaattcggttcatctcaacagcctccctccctcctgcatcatctagagcagcacaaacacataccacaagccagatcagcggttacaaataactatcaacccagggtctcgaatcacctcgcgtaaggacagataagaacccgatgatcatccatccatcgattgaaggtaatcaaccactcaaatctgaaatcaatcaccgaacccaagtgactaaatcaaacgaccgtagacgggaaactgacctcttcctcgaaacctcgacttcccccttcgccacacgacgccacgggaacctccaaaatcccggatcaaatccgctcctgcaacaaccgaacacgccgagaggacgaacacggggaacaacacaaaacagaaatcgagaccagagaaggggtcggataggatcggatcgaatcgaatcaccggggaggaaaaaaatcaaacacgtcgcaagcaaaccgaacaatcaatcaatcaagtcgaacgaatccagatagaggaggctcccgggcagcgtcgcacggagatctgcggacagaaaaggcgaagaacacgacgacaatccaaatcaacacgaagattattaagaggggaaaaaaacgaagaaactcgaatcgaatcgagaggcagagggaggaagggatcgggaacgggaagacgcaaacgcgacgacgcgaccacgccgaagagaagaagaaaaaataaaaccgagggggccgcgaggtggggagaaaccgtggcggggcgtcgcctaatataggagaggggtggacgagaggcggtgccaagccaactcggcttcggctttccttaacggacacggcgccgcctcggcctcgcgtttggtttggccccatgtggggcccaggcgccagcgagacaggtggggtggacaggctggtggaagtggtattccgtgttcgggttggctacgggggtgcgtggacggttggcgcgtcggcaacggcaacgcggaagatattcggtcgcgtggaccgagaaacttctcgggttcacgggagcttcgcgaggagagggggggggggggggggggtgtgggtgtggggcccggtcgtctgtggctgcggttgattgctgaccgttggccacccgtgtatcatatggtccgcacgtatttttggggttaaaaaaaggcttttgcaggatttgcggggggcatcgtggaccgggtccacccggaccggttcctaggcggtggaagaatttttttcgtttttagattttttgggctgcaggaat

SEQ ID NO: 22097 - DNA, 3567 bp, Oryza sativa
ctccaatctcagaattgccattgaagcacatacctggatcagtgcatgccacagagccaacactgcacggcttctggtaagggaatgtgccgatctccatatcaatcttgccccggacatcgagtaggatgctccttaacctgatcacctcagcctcgagcgcagcatggccctgcaatcgcttcagcagctgctgattggcggcgcggagcttcttgacctcctcctccaagaaagccgcatgcgccttcttcttctcccgatacttgcgcacggcttccctgttccccagcggcctccgggtcttcgtcaggtcctccttgatgtcatcttcgccactgccggaggcgaagacctgggtgtgcgtgtgcaagcatgtgtgggtgtgcatggttgccgacggaccaggaggattgcaggtgtgggtgtgggtgcaggttgtgatgttgttcaagaaatcatcgaagctatcaggcacctccggatgggagaagagcaattgacttgggacatcgtccattgccgcagaatgcgccaagaacaatctcctttgtatgggtcaatggacaatttgcacaacaaagttgcaattgcaattgcaacaaaaggaatcaagaacctctgaacttgtttattcaatgaggtttctagattaactgaccagggattgagcaggcagactacatgatctgccaaaacccctgcaaaaactggtgagctaccaactaataatcaagaaaggagtgagcaacaaacatggcacaagtgaggaagccctgattggggagctctacgacagagggcatcacaagagccaaaaaaaatcgatgaggtgctgaaatagacagagaaaaggccggattcgggcatcaaaacctcatcctgaggacggcgagcgacatggatggaattcgcagcaacgccgagctgcctcttgcagggagaaaagaaaaacaaaagaaaattgaaaagactctctctctctctccttttgctcccctcgctttccttcgctttccgccttctctcgccaccgatctttttcctggcgatgttcccccttctttgctctggcgattgggggtttggggatcggagaatcttggaaaggagccgcgccgcgagaggaggaggggagcgacgttgatttgatggatgagtagtagtggtgggagagatcaaagttgggggaggatcctagttcttgccactgtgggtggggatggttttgttttgtttgggtttctttcttttagagcttcctttttgcatatttaagtactgcactagttgtttgtccgaactgccacttggacatttttgccccttttaatattgttgcctagttgaccatgacacatacggatgtgcactgttttagtaaaattgctgcttatttttatgctgatatatcccactacatccattctaaatccctatatttttttgtagatggggatagtattaacgcgaagggccttgaacgcaggatgtaaaaatatacacagaaatcgaaagattataggaacacaagacgaagtatggtgtttccgtgtttggaacactaagaatagagtaaatcaatggattcttgatatataaaatatagtttctatttgcttgttgattgtctcaattgtgatcactcgaagtcacatgaattgatttgttttggtcgtctcaaaggcaaataaaattgatttgctttggtcgtctcaaaggcaaataaaagtcaaattcctatggacatgggcaaagggaaaattctcttgtactccaatgcccttcttcaaatctccaatccaaaggtgtgaatagtactacccaaatccctcaaatccttaagaattacccaattttcctcaaatcccaaaaaaccaaaggcagccgaaacgttcagtatactaatagccaatgaagatatgcttgactgaactaagccgaaactgatttcaaattgtagagttgactaatttctcaatttgacaacgcaataggccaaacctttgtattttggatgcttacgagtgtacagagaggaaagaaatggagggatatgtagccgctttttacaatttagatgacagaatcaaagaatcagagggtgcacggcaacacccacgatgcagatatctggattttaagatgcagatatctggattttaatctatctcgtggcgtactggcgtcgtatcacaatatcaatactatcatatcagtgcagtcccttcaaaaatactatcagtgcacaaggccactattgtttcatcctgctgcccacaaactttgctcgtcccttgccgcacaggatcaccgttgcctgctagccgcgccaacactgcatctgaattctgaacgagtaggaaaattagagtgcagtctagctgctcaacagacacgagagttttccattgccagtgtcttcagatttgtcagctgacgctttgtccctgaaatgtagtcaatcgtggaacaactgaagggatgcgaattttttacccccaaaaaaagggttaaaaaaaaacatagtcccgcggcaataatattggaggccacacttttaactgaaaatactggctttcttgtcaaaccatacctgtcttactctgcactgccgctgccaacactttggcctggctccggaaacaacagtgtaacctgcaaaaaaatgctctgataatgcaacaccattgcaagatcgaaatcccatcaccaacaaagggtgattacttctactttgatgacaaaagtcagtttgtggttttgcagtcattgattccactgcggttccgtcagaaactcaaatccagaatttacaacacaaatcatattaacaagctacttgcagttccctccacattttttcatccgggcttgggaccggcaaaggcagtgttaaacggcaaaaaaaaaaagagagagagaaaagaagaagaaagaaaaaaaagagagagaaaagacaacacaaaacagaagatcaaattgaaaaacaacgaaaatatccatcatgaaacgcaggttactcaacaacctaaaattattgtggtcagtctggaaatgcaggttaataatcactaatttcatcaaaataaagtttagacccaatatgtaactgattagtgccttaaaaaaaatccaggatgttgagatatgatgtgaaaaccagtgattcaagacagcagaaacaagaaaatgccatatcttaatttggcacaggtaagttaaaaatgtgtgagaacataaagttttgtgctcattttagtatcttctgctccaactccaaatcatagtcaagtaaatcaactttgaaccgttgtaagcaacataaacaccaactgactggatataatattgggaagaattggtcattaaattagtcatctgaacaaagaatccttataatcatcaaggttattgaaacaatccaacataaacaccaacttactggataatattggtctattgggaagaattggcaagaataaagtgttgtgcagttagcaacagattgttacacattctttttctatagaactcatataatgaaacctgcaccaactgtgatac

SEQ ID NO: 22098 - DNA, 13430 bp, Oryza sativa
tgcaacactctgcggacctggaaaagagatactttcatggaaactgcacccccttgagcagttccttactcctgatgagaaatatgaagttgttgagcaaattatggttgatgcaacaaatcaaataggtttcgacgttaatcttgctgctagccatgagtggcatttttcaactctacaattcgttgctggtttggggccacgtaaagcttcagctctacagaaagaattgttacgagagggatccatttttagtcgcaaagatcttgtaaaacctctaggcaggaaagtattcatgaatgcatctggctttttacgtgttcgccgtagtggtggagctgccgcgagtgctcaaatcattgatttacttgaggatacaaggatacatcctgagtcatatgcattagcaaaaactttggcaaaggatgtatttgctgaggaagcaccacatgaagcaaatgaaatggacgatgatgagcaagagatggcaattgagcatgtcagagaaaagccacgttatctgaaatcgctcgacattcgtgagtacatgaagagtatgccagaagagttccataataaagagcaaacactgaaagatataaaatgggaactgttgtgcggtttccctgattggaggaccccctatgctgagccaactccagatgaggaattctggatgctttctggggaaactgaggacaccatatcagatggaaggattgttcaagttactgttcgtagtatacaagataaccgaatcatttgcaccttcgattctggtctgaaagccatagttatggctgataactattctgatgagggctttgatctagaaactctgcagttacatgaaggtgatgtattaacgggcaaaattaagaatgtgaataaaaacaggttcatggtttacttaacatgcaaggcaagtgaattgaggagaagaccattgtccagaggtaatcatgatccgtacaatcatgaacaagacatgacttctcagaatgaacaagataagcttcggaaacagaaagaactggcaaagaaacatttcaaaccccggatgattgtccatcctcactttcagaacttgacagctgaagaagctatgcaggttagtcaagctcttatcgatcagatattccccactctgtttatttagtttctcctgtcgtaaaatctaatatgaaccctcctgaaacagttcttatctgacaaagaacctggtgagaaggtcattcggcctagttctaggggaccatcatttctgacacttactctgaaaatttttgatggtgtccttgcacacaaggagataactgaaggtggaaaggatcataaagatattacaagcttgcttcgccttggaaaaacattgacaattgataatgaaacttttgaagatcttgatgaggttggtacacatgatctctttttgttaccattgttactctagttcagtatcagtaagtggtgactcttttctgtgtttgttttgcacgccagcatggttctgtgtttctttttgcttgctgttatcacttagcagtagattgtcattctgttatttttggctaactactggtgctttattttggcaaataggttatagacaggtacgtggatccattggtaggccacctgaagagcatgcttttgtaccgcaaattcaagaaaggatcaaaaagtgaggttgatgagatgttaagggctgagaaatcagagaatcctatgagaatagtgtattgtttcggcatatctcatgagcatccaggcacatttattttatcttacattaggagtacaaatccacatcacgagtatattgggttatacccaaagggctttagatttcgtaagagggactttgacaatattgatcgcctagtgtcctatttccagaagcatattgacaaaccaccacctgatgctggtccatcaatgcgaaatgttgctgcaatggtgcctatgaaaagttcaggttggggtaatggtggtggcactggtggtggaaatgatggatggagaggagatggtaacaacgacagggatagacctttctctggaagatcaggttagtttttaacgcacttgcacaatgttatcatccagtttatttgcatggtattggcaggccagctttattatgactcaaagatgtttgcatacttaatatttgcatggaggactttaaattctatgggcctttagttcttcagttagcagaactatagatatgcttgtgtcagtttcagttggctgtagcattctttagggtgattcacgctctgtttgcaggcgccagtatcatgagaaccatttacttcaaaaaaaaattaaaaaatattgccctctgtatttgggattcctgattgtttatgtggttcaggtcaatttatttcatatttcaattttctacttcccattgcactttctttatcttgtgcttctccaatcattgatatcaccgatgaggttcccactaaacatgtgaaaagctaatcttgaggcaactataaaaccggccaagctactatttttggatagtaatatgatttgttacatttattgaattgttgatggatccttaagtagtcacgaactcccttttggtatcttttgtctaaagcaggaggcaggtttgattcaaggaacagctctggtggtcgtggacgtgggcgcgggcgtggtagaggtaactttggcagtgatgatggtggcggcggaggttggagtggtggcggtggcggtggcggcaacagtgggggatggactgacaatattggaagtggcggaggtggatggggcacaggtggtggttcctcgtgggctggtggtggcgacggaggttctggaggtggtgatagtaaccgtggtggtggtggaggctggggaacacccgctggtggttctgatggcggcggcggtggctggggagcagcacccggtggatccaacgatgccccaggatggggcagcggcaaaaaggcggtcccagcacaggatggtggtagcgggtggggagcttccgccggcggcggcagcggtggctggaactagtcaaagaactgctagatgaaatatttttttttttgttttctggaccctcttctatatctggtaattgcgctccacgggagaaaaattgtcactgttcggggaccctagtaatctgctactgaatgccgctggttttatacattttggacggccttattttgaatgcatgtacagcttaagcaccacattttgttttttagttttcattacaaatgcacgaacccatagcccactcagattggaattgtctcaatggttgtaatgccatcgaatatatctaactttaccaggatcttcgtaaaccgtcgtgtcgctcgagccatcctcacactcgtgagagtgagatgtggagctagtcggcccaaacggccagaggaacgagcgcgagcctcgcctgacttgcctctcgccgccgctagctcctccaccggaagcggtggtcgccggcggcggcagcgagtggcggcagacgggacaggagttgtgatggaccagccacggcacgatgcagtcggcgtggtacaggtgggcgcacggcatctcccgcgcctcggcgccgagctggaactcgtcctggcaaaccgggcaccgcggctcggcgcggaggtgccggcggctgatcgtcaccacgggcatcgcgtcgatcgccgacggcggcgccggtggagggccctgcctgctgctccccagctggttctgcagctgctcgaagagcgcctccagaccggcacggtagtatccgccgcggcgctcgacgccgacacggggccctcccctgaagaggacgccgagtctcgcgtgcgcaggcacgccatcgccgccgccatgctcgtcgtggacgtcgacctcgcgctcgtcgccgcccaccgttgccgcgtgccgcatgagggtggacatcgcctccatcaccggggatcgccggagcaagaactcgtcgccggcgtctggcccgacgaaaccgagcgtgctgctcgccgtcctccgtcccatctcgctcatctcctggacgaagccgtcgtcgcagcttgggcaggtgacgtcttggctgccgccgcggatgcgaaccggccgccggcacacgtagcaccagtgcgtggctctgtttgacatcttttgcttgattcctgtgacaatctgagaattcagtagtagcaggcagcagcacaaatttcacgattcaccatcgaactgtcacgacaaatattacatgagcaaacttgaattggacatccaagacatgataacagccccaaaaaaatattgaaagaaagtaaaaagaagagaaattgatccgaaccagagataattcccacccaagaattcagttgacaggaagcagtcaagcagttgtgtgcatatgccacaacaaatcaagctaaacaaacactaaaagaaacagaattaatccaagcataccttgggataagctgatggtttgggaggaggagaatgaattggcggaatgaattgaatgatggggagcggactgatgatagataggcggtcgcgagctggaagagtactgaaagcggctgctgtcggagtatctgctacgatttgtccgttcttttttcttttggaggtctttgtccgatgagagcattctaggcctcgcgttgctgcttgtgcagttaacttgtcaccggcgggcagcgctcgctgtcgctggccatgcttgttaaagcgacgtgttggctcccggtccaaaatacacgagaaatggaagtttgttagtttaacgtctcaacctttgatcgtgaaactttacttgataatcaaagttgatcgagtatgtattatcataatagcgtttgttacgatttacgacagtcttgattgtaacagtagaacagaatgcgacaagctaagccacaagcccacaactgtagcagtaagcggaacatccgtctaaagccgtgttcgactgttcgtcacagcttacttaactagcactatttataaactactaaacgacaagcaatgtattttgtgcaaaagttttatacgtataaatttattaagaatcaaataaatatatatttttatttataatatttaatatttagttaatcctacctgcaccttttttaaattttttttgcaccaataatctcagccaaacagttgaatcgaacgcaacgaggaaccatggtatgcccagtgtttggtaaccaacaaaacacgtctagcttaagaaaacttaaacaataggataatataatttttgaaataacctttatatagaaaattttggcgaaaaatataacgtttagcaactcgtgaagcatgcgcatgagtaatgagaaagaaaattgaaaaggtgcagaaaaaaacatgccttcttttacacaagaatatacccttagagcattatttggagtgaagattttggagaaacatctatactacggtaaatattggcaatgatgatagtagtcaatctgccaccataaccccttatcacttacgtgtgggcctctcaacgttggtaaaaaaattatacttcctatttcaaatgctccttatccctaatccctgaattgtgctttcattcgatagtaacatgtgaaaatatgttgcgtaaactaaatacagtgaaaacctaaaaactataatgtaaaaatggatgtacgagattagttcacgtcatctaaaatactaaaagctttactcatagattcaatcatgactaaaatttttactcttggcggcgtgaaaaatctcagacatcctttttttaaatcaacgggactccagtttttatattttcagtatacgtaacttccagcgacatatttttaattgcaacgcacgactagggtgcaagcgggccaacccgcaaacccgcttataggcaaaatgagtggataacccgcggtttgactcgcgggttaccaactaatttgatatataaatgagttttggggttgatccacttgcttctctatgacacggcaagccgagccatgacgcgaaaacccgtggattaccttctatttacatccctagtcctataaaaaaaaaaatctccgcagccgactttccattcagcccaccctgaggtctcggcgacattgcctgggccgtggcgctctcgggctgggctttttctccccacggagaacacgctcgcggccatcacgttagcagcccactcgctcgctcgctcgcggccgcgtctcccgtcgtagctcggaggaaggttctagacgaggaggagaagacgccgccgccatcttcgcggccgccggagagcagccagcagcggggtgcgggcgggcgcgggcgcgacgcgcgtggcgcgggtggagctcggaagcaggcgcagcctccacgggcgcaggcggggttgccgggacgcgcctgggcgggcgggcgggctcgaggttgtggtggggcgtgtggcaggatcctcctcgcgccgccatggatcagaggaaggcgttgttccgggcgaagctccgggagcgcgaggccaaggagaagcaggagaggcgcatcgacccctccctcgtcaggtatatatctcctctactctccctcttcccccatgtatctgtgtgcctctgctcttcttctctcgcggattcgtatgctactagtagttttgtctccggatcctaccgataagctcgtgctgtggctgctcgcgcgtttgcttgatgtaaccctaggcaattttgaatgttttgttacaaccaggctgggattttaagggcttgaaccggtttgcgtaccctccagtagattggaagaatattacaagtataacatagctaatgggttccagtttcctgtcaatttggtgtaatttgcagcgagccatgaaaaacctacaacattgatcacaatttatataatacctttgcatcttgttcagccggaatggttgctgacagaattgttgctatgttttatccagttttgaatatcatgagcgttgatgaccaagggtagtattagatggcaacatactggacgtggattgtttttaagcaatacaccattctaacagataggtgcatcattccttcaggtacaatgaatttgatcagcccatctgcagaatctgcaatgttactctgaaatctgaagcactttggcctgcacatcaagtttcacgaaaacatcatgaggtacacagagaaaatgaatcatagtcattctggatgatctatgcttggattgacattcgaaggatgtacacataacacatcattttactatctcatgtggtatgaatatgttgatggaaacacaaatacatatagaaattcaacagtgtaactgcaaatacatttctgctgagcatgctagcttatcaatttggataaaattttgtattagcatcgaagatggttgaaatttcatacatgctgtggtctgtgggttgttttggcagtatggtaccattctggttatgttcacttccactaattatctttttttttgttagtatctaaaaggaaaaaatattatgcggttcatattgctgataaccatggtgtttctattcttttccctttagaagttagttgctgccttaaatagcatgcattacatcccatagaatttgtttgttcaaattgcagagatgtgagtctagtttaactgctccaaggataattgattgttctataacttcacatacatatattcagatctatggctgttactaggatttgaagtatatttgttatttaaagtgctcatgtacattactgacccatcttgtcatttttatgatacaggcaaaagccgctgcagctgcatctgctaaagctccatcaggtgcagggtctcgtggcaataaggccaatcatgaacaacctgcagagtctcagaaaccaaaatcttccacattgcctgccaacttttttgaaaaccagggaatgaagaggcatagtgatggtgagagtaacaaacacgccctcccatctgtctgcgctaaatttaaagatagagtgagaaagcaactggaacagccttggttatactttgtagtcatttgcttatatccttttatttgtgagatctctgtaaatattgatttttcgttgagttctcagttgataggctctagaattgtattaatcatgcatctaatttcacattttggtccacacatggtacaatgctcatatgccatgtgtctgtatagatcttcaatgaaattgattatcttattcttaaaataagcaggatagcattatcatgtagtgctttgatttttataggctaattgtaaacagatttaactttaccataaaatcgccataaactactgaaatttcagtcagctaagattgcatcttagactttacattccttagtacatctgataatagctaaacctgcgaaatgttactatttgtgtgagaaatggtgttaggatttgaaattttctttgaacatttttgtttgagacaacattttgtattttctgaagaagaaagaaacaaatatccatgttatgctatcctctgtagagtgatcacctgcatgtacagaacatatattaattcctattttatcaagcttcctgctagtagtattatttatatatgctatagaaagaactgaagtgtccatttagcagtccaaaaaatatgtttcatgctcatgaaccctaatataacaacttatatgactaggcgctggttctgaaggaaggtctgtgcgtcgggaggtagctgatgttcagcaaaaaaccaaagaagcaagcaaaactaagccatctgtcaattttgagaaaataccaaagaaagaaagtcaagccaataccaatgtcaaaggtgttcttccagggaacttttttgactataatgatgaagatgaagatccagctcctactgaggcgaatagtgcacctggaaatcctccaatttcaaatcgcatgcaggtgaaaggtgtacctgatggcttctttgatggcaacaaaaacagcaatggcatgcaacccagtgaaccaagtcaatcgtctaaagccgtaaagagttcagaaacttctgaagtaaaaggatcgctaccagaaggtttctttgataacaaagatgcagatctccgtgctcgtggtatccaacctccgaaaatcgatatcaagtaaggttttcatcgacttgcatatgcattgcatttattaagtatatgcttggacctcttgcagctacacttgttattctcacataatatacccttgtggaagaatgaatataccttttgaaatggcaagtttgaacatcattcatgataaaaatttcaggcttttccttttcatggaagatgtcagcagaatttaacaatataattaaggctgattattaaccttactactgttacttccacaccctttttgcacttgtgcacttgtcaagttcatacctgcatgagggtcagagggttaataatcgtgtttatgttttttctgtgaactatgacatttgttctcttctttttagatcatattcttcctgcaaaaaaagaactgtattcagtttgtattgattgatagttgaagttttaacatgaaatatattattaaaaaatatttttcagtgatgcttacaaagaatttgagaaggaaattcaggaggacttgcaggaagttgatgatcgccttgaagaagaggaggttaggcttctctattacctagttacacaatataaagaataccttcgcttgtctggtgcaaatgctagtttgaactgctatattagcttttttttatgtgaactgtagattgatgctgctgctgagagagaagagtacttgacattagagcaagagtatgttccttagccacaacttgctatttttgagccttcatgcttagcgaagcgaaggttttttattttcatcgtccatttattttgtacacagggagtataggcagcgggtggatatgctgaagaaacagcttaccgagtcaaaagccgcccgtaccactaaagcaaacagcaaacctgttggtatggacatgttgtcaagcagcgactcatctagtgacgaggaagatgacagcacggattttgctgttgattggagagcacaacatttgaaatgatgtggagatttttgtgattggctacccaccgacgatgacaacatagatctgttagcatccaccattgtgcatccgtgacaatcagatcccagcacctctaggtttctgcttgaggagaagatgatctcttttttttttctgttgcatcttgtcttttatcggaaaaatgttcgagctaatcatgaattaacacgatgagaatagttttggagaactggtgaatgtgtataatccttgctcctaaacctatgccacaatcttatctgaaggtgtatgcctatgatgggcaacatctttgtcggattgcaacttcaagatgaaagttggaagggacgcctttacctgtgcagattgactgcctttcatcctgcttcaactccaacgcttatctacagggtttcttaccttttttttctcctctgcttatccggcaccggcaactccgacggtgtatctttctgtgatggtgaaggacgaggccgacgttgctacgcgctggcctgccgggtacctaactttccaaaagtttgaaacctctcatcttttgcttgttggctgacaatgcttgtttgtttatcggatatagccaaaaattgtattttgaagcttgattttagagttgatttagagcttcttcatcgcggtttatttttttctaaggtttttaaaacattaagaacagaaatatagaagttctatccatatattttttcctcgttcattttttcatgtgttattgaggcctggtcactgatctggactagtgtgccgacgttcaatggatcgtctggtgctttgccttacagaaactcaaaactagaattgttcgtagacatcttctgtcttgtgtgctgcagtatccaactttcgcagctctactgtctaaaaatgaaataaacttgtacctctgccatattggatagtgtggtactattgtagtgtaagcaatgttttgcattcgctagaaatactgtgtttcgatggtgccgcttccaaccttgtagatcaacactgaaaacaactagatgaacaagaacaatattaacatagctttctgtctctgctttattgataatgagatatgagaatgatgcgcacagtttcactgccataggtcaaccagactcgtagatcatcacagttttggttcaggcatctgcctctatacccaactgttcgcatttcacaagaagaacactgtgtaacccactcagcggaactcccaagctgaactcactcagcaaagcgtatgacatggtgagctctgcaaccactcattgtgaggttgatcattatgatttcatcttccattataatgctgctcacagccacacgccagccaaaataaacagttggggatgtctggacatgatcttttagaattttactccctcggcccataaatttaagcatttcaagcatttagaatttatctgcaaatataaggattccatcaactaccactcatttgattttttttcatgttatttatggccaccctcccaccccaactatccctcattttgttgagggttatttatttttttcttttgtccaattaaaaaaaatcagttgttcttatagaaggatttataggttatttagcaaataataagattaagtcgaaagattactttttactcatttcagttgtcaatttttaaattttgaattgattatattctatttcaagcatatggttggctttggaataaatgatggaaatcacatgaatctatgcagggatgttatattatggtaaaaaaattaaatattagaaattcttatattttataattgatagattaacaaacagtttaattactgtaggaacagagatcccaatagggaccaggatgacgctcctgacgcctcatgctcacctctaggcgatagaaacgtggccaaatggtaagatgccaagctcatttccgaaacataatcattggaattttcaagtcaatgacgtaggcgatgttcacgtttcttgttagatttggtacatgattatttcatttgaactcctgttaattggtcagtaacttagtacatatgcaatcttgtacggacacatagagatgttgatttacctttctttttttcaccttgagataaaatgcatcattgattcattgcatcataacttgctcaattgctgttggttccccctgatcttgcttggagtaaagggacacatttcaacttggattttatttggactgtttattggagacaccttgcttggatatggtgtaaagaaacacatctcaatttggaatttatttggaccgtttattggagacgtgcattcatgcataattacgtcaggagatgcccaattgcccgaataacccatagatttcttttctcaggtataaaaaaataaatcatgattggagctgaaaatggtatatgcaattttttcaatcagcaaaataatagtcgcaagtgaaaatgaaaggacttctgcaatgataaaataaaaaatcaagggtaaaaccggagcacgtttcttcttctcctttttttttttggtgtctctgtgtacgtggtcaaggagagtgggtaaccaacaaatcaacctacaatttctggaaccgtcaatgacggagatgacaattaacataatatttgaggcaatcacgatacaatgctaaaacaactaaacaagtgtccaattcagactttgctttcacggaaacgattcctttattaaattgtgttttgatggtgatctgaaataaaaattcatacaacagaaatacgctactgctgaaaaaagaatatttctgatgtaatgacaactgacaacagcaaaacatatagatgtttttttctgttttttgaaacgaacatatagatgtttttgcgacgtaagagtacttcatatgaaatagtagcatttactgaaagcatattatgcatataagggaataattagtgtcaataattttagatgatgagatcattatcttatactactagcaattgttggtataatcattattatcttgcactagcaactattgatataacatcattcaataaagtactacagtgccaattctcaggtcaaatcattcactcttgcttttgatattggcttctgctagggaaagaatgaaagatgaccaatcaaaatgcattccctgtcctaacttagaatagtgcccctcccagatgatccattgcaccacaattcacaatcagaatagcatgtaaagctataaagcttcagatgctagcttcccagtctctttcctgtttctagaaaaaaagaagttttattcttccaaattttaatatcag

SEQ ID NO: 22099 - DNA, 699 bp, Oryza sativa
cctgcagcccgccgagagcgtcagcgtgtcgcgcacgaggttgccgtcggtctgcgactggtcgccgtactggaccgcgtaccggcacctgctgtccgacgagcagcccgacgcgtcgagctcctggcactccggcgcgccgcacgccacggcggcgtacgtcgacgacagcgacgggtcgaacagcgggtcctgctgctcgtagcagtcggcgcagggcttgcactgcacccacgacaggtcgctgccggtgtcgaagatcacggcgtactgcttcgccggcgtcccgagcccgacggacacgacgtagttgccggtgccgagggagatgcccctctgcgccggcagcgacacgccctgctccgaggcgcgtgccgggtcgaccaccgacggcgcgcccccggcgccggcgaccttgcggtggatggagtcgaccctggcctggtcgcgttccaggatctcggcgtgggtgacagcgccgccgccgccgcgaggacgagcctgcaccggcgagcacggcccgtgccggtgcacgacgccgagagccgacgagttggacgccgctgcaagaaaaacagaatgggaaaatgagaaatgcaatttgtgcaaatgcaactcgaagcaaagaaagggaatgttcagattgtagctaaaataaatcttacccaaatttggcaagatggtaagatggtagtattg

SEQ ID NO: 22100 - DNA, 18749 bp, Oryza sativa
gggcccctgccgccccaccagagagcggcaagggttttcctgcaaaaaaccctccctccgtcaccgcccgttcctcccccgtttgccacgtcagcttgccgccccagaggtgggcggcagggtctatttttgtaatttttttggccgacagattatttctgtaaatatttttttaaaaaaatctaaaaccgaaaaaattcggctgtggcataggcacccccaccccttccccacctcctcctccccccccaaaatcatcagatccgcgtccgcctcctcctcctccacctcctcccaccccctcgccgatccagatccatcgccggggaggcgccagccatggccggcggcgggggcgccggcggcatgtcggagtcggtgctccgcaaggtgctcctctcctactgctacgtcggcgtctggatcttcctctccttcgccgtcatcgtctacaacaagtacatcctcgaccccaagatgtacaactggcccttcccgatctccctcaccatggtccacatggccttctgctcctccctcgccgtcgccctcgtccgcctcctccgcgtcgtcgagccgccctcgtcgcccgccatgaccccgcagctctacacctcctccgttgttcccatcggcgcgctctacgccatgtcgctgtggttctccaactcggcctacatctacctctccgtgtccttcatccagatgctcaaggcgctcatgcccgtcgccgtgtactccatcggggtgctcttcaagaaggagaccttcaggtcgtcctccatgctcaacatgctctccatctcgttcggcgtcgccatcgccgcatacggcgaggcgcgcttcgatgttcggggtgtcgcgctgcagctcgccgcggtggcgttcgaggccacgcggctcgtgctcatccagatcctgctcacctccaagggcatctcgctcaacccaatcacctctctgtactacgtcgcgccgtgctgcctcggcttcctgctcgtgccgtgggtgttcgtcgagctgcccaggctgcgcgccgtcggcacgttccgcccggacttcttcgtgttcgggaccaactcgctctgcgccttcgcgctgaatctggcggtgttcttgctcgtcggcaagacctccgcgctcaccatgaacgtcgccggggtggtcaaggactggctgctgatcgccttctcgtggtccgtgatccgggacacggtcacgccgatcaacctgttcggctacgggatcgccttcttgggggtggcatactacaaccacgtcaagctgcaggcgctcaaggcgaaggaggcgcagaagaagatcagccaggctgatgaggaggctggctcgctgttgcaggagcgcgatgggcacagtgatcgcaagagcgataaccaggcatagagccaccaccagatctgatcctggcacacacaaattggttgttctaaatccggctgtgttatctcttttggttgcactctcaatgtgtttgttctttaccttgatccgttgtaggagagcaataaattatggagtaaaatgtgatcttttacatttaatagatggaaaaatgtgcgatcttttatagtttacacacctgtatttttttatttattactgagatgctacatatgtttactggagtactagagaagtgtaaacatatactatctgaaatgctttgttgcaacagcctttgtagtctatataatcactatatccacttagttgcaactaagaaagcttgggccctatgtaatgttgcgtgaggcattgctaaagtactcttgaatgttgttcacttccttggtatgtatccctttgttctaattatgttggatgttgtgcagggtatctggtgcaaagtgcaaaagactgtagtttggttggtctacggttgctttcaaggaggtggacaccagtttgttctttcacttatttaactttagttggatctggagggcaaatcaagggaatttattggtttaggaaaatacttgcacttgcacctactttctggaggactagagtaaactttcatgttaccctgttatttattcagctatttttgttccagagaaagacagcctcgttgcctctctcgctcattgcctaaaatttatttgttctactagtagcctaggtactaaaaatgtacttctacatattggtattttggtggttatcttctatatataatgagcttactgtaatattataatctactgctgtgtatttctaccttttcaatttgaatggtttatcaacttgatgcatccatccgtcaactgtttcttggtcatttcatagatggcgctttttgttagtaacttgtatgctgttagtgctttcatagtgcactgtactgagtagtgaacacacacataattctgtttttcactagatgattggtggtcttattgattagtcttcagcatcacttgcgttgtactgaaattcagaaccatagcattggaaaaatagggttgcattggcatatgcctgttcaattgagcgctgaatcagctgtataagctgttttgctctttatatatgaataatttcactgattaattgtcattcagaaccacctcaatagctttggaataatgatagtagtacatttttgtaccttttagtagatttgatccaccaacatagctaggttggtggacatattaagcttagttgcattgattgtgtgctgtgcaatggtttcaatcacttcttagctatcaatcatagcagcaattaggtgtgatgatgggttctcttgtcttcataaatgaagtcgtagtatgaaatttcagttgtttgatcttgttcgtactggagggaagctcactgaagtcgacatattgataaattttggtttggtttagaatagcaatcaaatgtgttaaggctgagactttcaagaatgctgggatcctggcacgtgttcgtcctggacattgaccttgatttggtgcatcaactacgcaagaatgtttgggtgttgttgctcactcaatgcttgtatatacagccatggggatctgtatgtcgtttacttggttgttaattccttagtttaggagttgtatcttgttaaacatggttacctgatgcaacacgaccattgataattgggttgcttcagacagcgagaaggaacggtgaattgctggcctcttgtttgatccttgtttgttgtttccgaagcacacgagattgtttagcagcaaatctcttgtattcttgtttggacgctacgcaagtgccgcgatttttgtcatgcttgtgaacgggaccatatggaatggcatgtgcagtgaggctagtttgggctagtctatgctctatcccttcgaacacaaggcaaatcctgtgaagtatagtactactatgtttttttactgttaaattgttacaggagtgaaatccttgttacatgctgatgagatgagcgagacttgaccctagagcattgttcagtgtagtagtaatgctaatcatttacagtcaagtagtcaaactaatcccttcaaacataaggcaaacgaccgatgtgtattcactcagtgtcagtgaactacttgtactgttgaaattgctgtgcgactcaaattcttctcatgctaatgagaccgatgtgtttattcactcagtgtcagtgaactacttgtactgtagaaattgttgtgcgactcaaattcttgtctcatgctaacgagtgagccaattcttgtctcatgctaacgagtgagatagccttgacccatcttttctgcatgccttggtgtagtagcagcacatatcatttccagtcagccataattggcagtggtgttcgttgttaagagacatgttagatggtcgggcgcctatgcacctcttgtctgttgtctgtacagcattgtactgtacaaatcaacaactactttagtactgtatcatcatcatgtactactgcaatggagtagtacttctacctctgttacaggattcaagtcgttttacccctctgcgacttacagggagcagtatctaacatacaaatgactctccctgtttataactccctagtaatccattaccgtgatctaacagacaaatctcgagctaaattgctgtgcagtgctgactcgagcaatgttaacacaactgtacacaatacatcagagaaaaatacatctatgctatgcagctgccagtcagaaaccgctcgatcgagaaggatctcatcccgaattgcaagtattgtgcaggcacctcgtcatctgaaatgcgccgtgccaaacatcacgcgggaatcagatcgtcccgagcaaaagtggagcgatgccatatgctctcgcacgccgcgcccactacgcgattaggaactaatcaacgtacaactacatgtgaagtgaaaggcacaattcacaaaaggcgcaaagcacagtgcaatcctcctgatctgcttctgatccggtaaaaacagctgacctgagctgcgtaaacagtgaaaaaatggaggtaaaaaaaaaaactaccggtattgcttcacatggcgggcctgcctcggaggcgccgggctggcacgcggccggctggaggaagtgggaggctcacgtcggcggcggcgaatgtctcgtcgtcgctgtggttggagtcggagtcggcgctgcgctcgccgtcgctggaggaggaggaggaggagaggcgggcgagccagcagctgccgtggaggtggccgctgacgcagacgaagtactcgagacggccctcgttggcgccgagccagcggcacgcgctgcgcggcgcgagccccgcggcggtcatgctccacacgcgggcgccgcagtaggggcagcggacgcgcggttccagcggggcgcggtggccaacaaggaaggcgcgcgtccgcgaccgcatgaacccgcggtacacgccgcggtacgcgcccacgacgtcgtcgtcggacgcggcgccggcggcgtgctcgcacgggtccgacacgaacagcaggtcccccgcgcaccgccgcgacaggaagctccggcccgacgtcttggagaaccgcgacacgggcgcgaagtggcccggcacggcggcgcccgccgcgccgcagcagaagaagagcagcttcgccatcgccggccagcctcccccgatgcgccccgccgccgccgccaccgccgcggtcgggcccgacagcgccgacaccatccgcggcgccctcgacacgcagagctcccgccacagcacccgctccgccaccgcccgcagccgccggctcaccctcgccaccacgcacagctccctcgggtcccagttcagcgcccggaacaccagctccagcaccttctcgtccatgatccccgcgttcacccccctcatcctccccgcaatgccaccaccatcccactctccggccactgccgcgccgccgccggcattgccgctgcccaaccgcctcatactcatacgcgtgcgccgccgccgtgacacgctctctcgctctcgtcggcgactgcctcgccacgacacggtcgccttactcctatccaaagacgaaccggttatatcctcgtgcggtgtcaggtcggcccggaccggacgcacccgatcccgaccgcgccctccaccacgcgacaaatggaccactcctcgttaacccccaataattagcggctcgccgaagcgactaaacccgcgattacacgctaaacacctcgctaatcactcgcttaatcctgcctgcctaggaggaatcacacgctcgccgccgccgctgttgcagaggcgagtacactggacaaaaatatcttctcatttttgcgaagtccaatccgtgttgcgtcacgcggggctttgcttgacgcttctgtaaaaccgaaaccgccttcgacgacggagcgggaggacacgtgtcccccgcgcggtgcggtagcgcgccacgtggctcgtttcttggggacacgtgtcgggcatcggggtgatttccgtcgtctcggatttaaatccgttccggatttctttgatcccttcttccggtggtggtccggtgccggcgaggccgacacgtggactccggcgagaagcggtggggcccaccccggtggaaatatctcgggggaacgtggcggggcaagtgtttggtttgtgggacacgtggcgcgctgaaagggtggagagagatttgggggcccctgatgggccgtggtgacgggacatggggagatccgggccgaacacgtggtgcggttgttagcattagcttattgtgcgttttgcttttcttttcagctaatcacatcctgcgctttggagcagccgtcactttgatgggcgtgtttcaagaaaaaaaaagagtttcaatgcttattttaagaaaaataatttcttcgatattttgacataaccatttctgaaaaattgaagaaaactttggtcaaacgtcatggttagcattcctctgtcccataataaatttacttttagcttcttctttatttaaaaaataagtttgtttttaaagtaattattgaattagagttttgtaaaagtcataagtaattgtattagaatagataaaataaaaaaaattgtattgaggtttgataaaatagttgtattttagtttttttattggatatatatgggaaaattttattttaagacggaggtaacagcaacctctagcccgtgcttgttccagctgataatctgaaactttcttttttgttaatttcgtgtcataatcccttcgtttttggtgaaggccgagagctggggaggggtaatcatttgctcgtggttttactctcccgaagaagacaaatttggctgtgtttggaggtgagtgttgggaacccatctctcatacacagaaaacggagcggttcattaacacgtgattaattaagtattagctaaagtttttttaaaaatagatcaatatgatttttttaaacaatttttgtatagaaacttttttaaaaaaacgtaccatttagcagtttgaaaagtgtgtacgcagaaaacgagagggggtgttgggaacttggtcttgcaaaaacaccctacacgttgctttggtcgattggcaagttgggaaaggaacctgaaagtgtcgctggtgtccggacaggcacaacgacgcgcacgcttcctgaaatggtaatgccatgtggtggactggtggtgccggaagctacagcgtgcaggaagcatctagcggtgcgctgtacaggttgccgttgccgttgccgtcaggtggtgcacacagaactcgggattgggtaccgaggtagtaaaaataaattttttagatgtcatatcgaatgtttgaccatatattagaagggtttttcagacacggataaaagaaaataattttataactcgcctaaaaaccgcgagacgaatctttaaagaaaataattaatccgtcattagcatatgtggattactgtagcacttatggctaatcatggataattagactcaaaagattcgtctcgcgattacccccaaccgtgcaattagtttttttatttatctatatattaatactttatgtatgtatccaaagattcgatgtgatgtttttgggaaaaaaatttgagaactaaacggggcctaagtgatgcccggcatggttgctgggtgagtttaatatgataataatatataaagtagataaatgatataagcttacatacgtttgattatttagatgtatatacaataatgatcaaatgtcaaactaaggtgatgcgtttttatgagaaataaaagaaatttggataataattaattatttaagagctataaacaattcattatggtatgacttaatgagagaagatagaaataatattataaaaagtgatggagagatgtaattaaatattatatgaattatgtaggattacaatttaacatgtttgcattttaaagctcgaaattttaataatctatataactatagatgatatattatgcttgcatgatgtttaagatataatagtcgtttgtggatgatgatgtgtcatatttgcatgcatagctgtagaatttagtaggttacaactttatagcaagatagcatagagcttgttcaaattgatatcatttcaatggtaataaaattaaatatgttgatgcgtttagtttgttattaaactttgatagtgcgtaaggaattttggtaacatcacatttagtttatgttatcaaaacttgataatcctgctaagttttcaaaattttggtattgccaaattttggaaagattcattttgacagtaatccgaacaagctcctagttgttttgatttgaagtcaaattatggcattgttaatgaacaatttggtatttttaggttccagtgaaagtttttgctttttcattggtatcgagtcaaatacatctttatcttgccataattaatggtgtgaaattttattttagattttagcactatcgatatttttcgatattttggtatggcactaaacaaaatagatcgagaatttgatgagatggtatagttgtgctgccacttttgcagggaagtgcaggcgtagctttcaagcacaaaccaacagtggtggtagactgagtgatcgtcggctcgtcgcttggttatgacgtgcactagtacttttctttttggtttttgctgtgctgaattggtctcgtatctcgcgtgcttcgcagtatcgcatattcgcatagaataaagatggaaattttcaagttctcaagatgctacgaacgaaagtagttaagtagaacctgtgatggatccaacacctcaaggcatacttgccgtgcacagcttcattgttccggcccggaagtagtgacaaaccccacggtccagtccattctggctaagccggtacatccaaaagttggcccaagaatacccactagaccactagattctgaagaattgcactaaatacggcccagcaaaaggtggagaaaaaaaacttgttcagcgagcttggtaggttagctccgctcttaaataaagtaaaaatagtctttcgaatggtagaggaaaatataacatacgatagaaaattgatttcgaagaaaacttgataaaaacttttctagccgccaaaccaatgcgtcaaacttggccggtgaggtaaccatcgaatgtttttcacaaaatacaccgtttagtacattctctatcttagaataaataaatatgaacctgcctcaatctttattaggtaaatctggatctgtctctcgcatttcatattaggtttatttattttggaatggagcgagtagattgaaaaaacatattaataaaggctaagataaaatatgtatcttacctaaaataagagtggaattgaataaggccctgtttagatcccatcataaaaattttcatcctgtcacatcgaacgttagaacatatgtgtcgttcgaacatatgtgtctaggttatggataccacatacctaatagtaatcaactaagctcggcagggcccaccacatatcatgtcttatacgaaaacaaatctcgtatatataaggagttccggataaggaagaatgagtagagttctatatggaaacgacaaggactactcggattgtatccatatttatctctctagttctacttaaataaggggttatctatgggtagaaatacaaaccccctaggaggagagaggggacacccaccatagacgccacaaagccacaagccaacacacgttgccagatcttgacatcagagattagcctagccataccccatccgatgtctacggaagccggcaagagggatctagtgccatctctgatctcgacgggttcatactcgaggaggaaggctaccctgtcgtcgattatgagttggttatctagccgctaagtcgacgacgattagataagttatcccaattgttgtacttcgtggttttctatataaatcccatataaacaggatgtaggactattatctgtaagataaggggcccaaacctgtataaaaatcactgtctccatcttttttacctcaatctcacatataccctggtaccaacgatccccatactatccaccaacgatcttcataccattcaaataccatagtcgcgatatcaaacgtcgacaacatgcatgaagtattattaaatataggcttaaaaaataactaattgtacatattgcgactaatttgcgagacaaatctttcaagcctaattgctccattatttaacatcgtggtgctacagtaaatatttgctaataatggattaattagacttaataaattcgttttgtggtttactgacggattctgtaatttattttattattaattgtttttattattagactgcgtttaatactttaaatatgtgtccgtatatccgatatgacacggtaaacacagactaaagtgctcttccggaaaatattaaccaggctgtgtttagatccaaagtttagatctaaacttcagtccttttccatcacatcaacctgtcatacacacaactagtcacatcatgtccaatttcaaccaaaatccaaaatttggatccaactaaacacagcccaagaggcaggggcaccagtgcgcgcggcaccatccttcattccttcttgcggcgcggccgtgcgggtgttgacggcaacgcgacgcaaccaacacccccaccccggtagcgcgcggctgcgcacgcacggcgactactactactactcggcgagctcgtgacgtgacgtcgtgagccacgaccacgagggacgaagagacggccatgtgagcttgtgttgtgtgttggcccccactaggagcaagcaaagcgaggcacagatcggagggaaagagggggaaaaaaatctccgagctctcttggaagctatagcccccccgatccgcgggggagagggcccgatcggatccttgggaatggcgacgtcggcggcggaggaggaggcggtgcctgtggcggaggcgcgggcgcaggccgagaagcgcgctgcggcggaggatggcgagggggcggaggcggaggaggaggggaacgagatgcccgagccgaagcggcggcgcgcgtgcgtggcggcgctcgagggcgtgcgacgcgccgcggcggacgcggccgaagagaacggcgacggcggcggcggcggcgcgggcgggcctgcggcggacggggggtcgtcgttctcgttccacgcgcgcagcttctccggggtggagacgacgcccaaattcgggtccttcaaccccgccgacgacctcctcgtcgccttccagctcaagcctccgcctcccccgatggatgcgccggcgaaggaggagccccccgccgccgccgccggcgacgacgacgacgaggaggagcacgaagcaacagctgaggagggcaatgacgggatttcacaacagcttggggtagtagaccagtgaagtgctcaagtgagcgacggttttgacttggtgcgacttcgcttctccgttaggcactgtactcctactttgataacggtagcttttgatttgtgtagtagtaatcttgtactactatctcatcgtgtcaatgcctcagtggttctgtgttgtgttgtacaatccgattcctaatgataagattagcgaataataaaaatgatttttgctggtgtaatcaaggtgtttaactgccgccaaatgattcttatatctgcttaacaagtactgtactgtactaacaaccctgctgccccactgtgcagttgctccataccatcaccaattcagctcatagttttgaaccaaatgttcatcttctcactctctcacagtactctcttctcacggtactcccccggaaggtctcttgaagacagattataacagggctgatatgttcctcgaaaaatactggatgatgttgtcctaaaccaactaatgtgtgatggcatcaatcacgtactgagagcatccgcaatgtctaagatgcatagagactacaaggtggaagtaactgacatttttctaatagtaaagctacaatggttatggtctcctcttgactttaaggtaggatccacatgaaaaaaaaaactattcaccctttgatgtacaagatttaaagacccacatgcatactacaaaggtacaaaatgattttcttttcttatggtttagttttaagcttaaggtgaatcatagcaacattattcattttctcatcttctaatgcataaagcaacaacacaaatactactttattttttaaggtcatctttacatgcacactgttgttatcctggcgcaagatactccctccgcaacaactaaatcgttttctggctacaacttacacataacctatgtttgtgagcgaatgacaatcattatcactaagtttataatcactaagtttctgacttttttataatggtttttgttctgacctttgtttaaataaactaaaatcaatcataacaacaattgcagatcgaaagacttaatacatctccattcgtcccataatatagcaatttagtaccggacgagacacttcatagaagtgtactgtgaagtatcttatccggtcataggtagctatattatgagacggagggagtattagttgttttgccaatccatgaagggtcgaactactagctgaaaccgaatgatcgggacaataattaggccttatttgtttaggcttataagctaacttataagccaaaaaatctaagtctaaacaaacaagcaacttatttgtttgatttttttgaagccataagccactctaatactattaagccaaaagctaggttggagaaacttttttggcttatgtgaggttgatgtatgacttcactactaaacttaggacattaaatccaccggtttatacatcatataagctaacaagttgacttaaaagtctaagccagtaagcttaaagcctaaacaaagagggccttagagcaggtacaataacatgctataagccagctgcaaacatattttaaggagataaatcaggagagagaagagcagcgggctacagatttatagctagctgtagtacggactccaagacgcagtgtgtctatgacaggtgggactaggtattaatagtgtagcatataactattgtatgaataagctattagattggctataaatgaattggagccagtagttggctatactattgaacttactcttagaagataagaggaggaaaagaggaataactagtgattttttttcatggatgcgtgctgtaccttcttcacggttgtgtgaggaattactagctggcaacggtgttgtgtttatttttttataatatccatgattgtaatcctgtatttttctctgtctattgatataaaaattcacactgtatggtgcggtcgttatgaaaaaaaaacatttgttgatttgtacgattgaatatttatcgcaattcatttatctagtcatcattccattaaattctgcaggcacacttcacctgatgtttgtgcggtcacaatcagtgtctaaaccctaaaaaaataaattactactccctccgtcccataatataagggattttgagtttttgcttgtaacgtttgaccactcgtcttattcaaagttttttgaaattattatttattttattggtgacttactttattatctacagtattttaaatacaacttttcgttttttaagtactttaagttcaactttattatctacagtgtgatcatctttgtttaggctaaaacttactggcttaagcccacagttaaatgctctaatatcatttttcttagaaatcggcatacaattttcaaaaactatatattcctccttggtggaacgcgaaatgttatactgacccttgattgcataccatttaaaagggaaacttcttctaacactaaaatatgcaacaattgcaggggcctaaacgaaagaaaccaccaaaatctctccttacttaacaaatccccttcccgttcccactgcacactcctcgccgccatccccaaacctcccgacgatcccaccgcctcgaacgtgccgccgttccagcctagggttcgcgggctctccggctgccggattcgcctcctcgccggcgggtaaggcggctgagggggagtgccggggcgctccgcatcgctccctccctccctcccgtcgtcgtcgccggcggcgtcgggtcgggcccggcggtatcgtcccgcggaaaccctagatttcgccgccgcacgcgtggagcaatcgtgcggctcctggtgtccctctatggctatgtaaggaggggattccacctccccccttgtgaggctctctcggcataaccgctctcgcgttctagggtttgcgccgcctcgactgcaatgggtggtcgcacggtgctctccgacgaggaaggtacgcggtttcttcgcctgttttgtgcggtttcgtgctgattggttattccagcggaggggtttcgtgcgcgtttgctgatggagagattgttcgtctgttcgaactctgtcagatgaaatcgaggaggaagaggaggaggagaatccgcggccttcgcggagaggaagggacaatatggatcgggacgatgatgatgacgaggaggacgaagaaggttagagattttttctacgtttcttttccaaattgcgctagtttcctccccccatctgtgaacaccaccgattcggatgtttatatcgtgctatgcttagttgtttttttttctgtctgatttggataactccttttcgtgtattgaatgttatgacacgttctaccaatttcattgagtttatagaaatggccctatttcaatatattatttgtatgcccgagtagtgggttataattgttcatgtgcattcatgtgacaactgacaaggcaatttagttttttaaaattcttttatatgtttgaatcccctgtgatactcgagttagctttggtaatgggatgtaactgctttggtacagacgagggtcaggacgaatatgagaaggatggcttcatagtagatgatgcagatgaggaagaggaggaggaggatgagagggaaagtgatgatgagaggcggaagaagaagaggaaaaagaagaagaaaaggttgcttttgatccctcaacgagatagaaatatcaaataccgtattctcttctttagaagttactgaaacacatatttgtgcacagggaatcagaagggttcatgctggatgaggatgactatgagttgcttcaggataataacatcactggcattcaacgtcctaagcctgtatgcttaaagatactttggtgctgtcattaacttttttagcatgtttttgaattatggctcttctaatttactgcagggaaacaaatttaagcgcttgaagaaggccggaagggaatctgaaatggatgagcgctctggcttttcagatgatgatgggtcaggaaaaaggcgtactgctgaggaaagagtccagtactccttatttggcgaccatcaaggtagctgcatccaaaaatacttctctttagcttgtgtgatacagcaggaagtagtttatctaattttcttatttgctgcaatgcaatttcctcagatgcgtctattgaggaggacattgttgaggaggatcagcaggcagatgaagatgaggatggtgatcctgaagatgaaatggcaggtttcattgtcgatgaagatgaaattgatgcaaatggtcaagttgtaaagtatggccttatttttcacatttgtgccaacttcttttatacaactttactggatcttgtttgctagagttacatacaagtactgtttgcaattgcagaaggaagaagggtaaagcaagaccacgccgaccggctgcaggggtatcatcatctgccttgcaagaggcccacgatatatttggtgatgttgatgaactattagcactgagaaagcaagagcttgagagggatgctgctaattctggtgagttgagaggaaacagacttgaagatgagtttgagccatttattctggctgagaagtatatgacaccgaaagatgaacaaataagagagaatgatgtacctgagaggatacaggtaaaagtttgacactcttcttaggcatttttgttttagttatcgtgcatgtctgatttgtagctccttttgccagctgtctgaagaactaactgggtatcctccaacggacaccacaatgatagaggaagaaagtgtatggatacatagccaactgacgggtgatgggtttctgtcattctttaacaatgagcatgtgaacaaggacattgaccagaaggacattgcaagtgtattgaccatgttacatgtcaacaaatttgaagtaagtaaatgcagacaagctctgtgcatgtttcttttatgcttatttttcttacataacttctattacctgccagattcccttcattgctatgtataggaaggagaattgcccgagtctgttaaaagatcttgatgccaatgaacagaccaatgaagaacatagtgatgaagaagatcaacgcaagatgatgtggcacaaggtgacctatcactatgcatatgttgttcctcagagccaatttatcaatgttattcagttattgactccattgatgtcttccttttagatgctttgggctgttcagacattggacaaaaagtggctgcttcttcagaagcgcaaggttgctttggagatgtactatgataaaagatttgatgatgagaatcgaagaatagatgatgtcacacgccaggcattaaaccgtcagctttatagctccattattgaagcactgaaggatgcaaaatctgagaaagaggtggaggatgttgatgcaaagttcaatctgcatttccctcctggagaagttgaagaagaaggacaatttaagcggccaaaaaggaaatcattgtacagtatttgtcacaaggcagggttatggcaggttgcaaaccaatttggtcggagtgctgagcagttaggtcaccatctcacattgacgaagatacccgtacgtgcactaagccgacaccttgtgttacctttctttaaacaatattactaggacattgcaagcaatccatttacatttgtatatttcaggaagcaggagaacttgatagtgggaaagattctcctgaagaggttgctgcaaatttcacatgtgcaatgtttgaaacaccacaagatgttcttcggggcgccagacacatggtactacttagtatatttcacaatgctactctacccctaataaattatcaggccttgttcggttaatccccagaagggagggatttgaggggattgagggggtggaataaatcccctcaatccccttgtgggagggattacccgaacaaggcctcagggtagaaaccacacttagttaggttcatctcatctcactgatatgaaccgttctacctttatcatcttaccaggcggcagttgagattgggtgtgagcctattgtaagaaagcatatccgtagcatcttcatgaataaagctgtggtctcaacatgcccgactgctgaaggaaatttaatcatagatccctatcatcaactatcaggtgttaagtggctgcgtgacaaaccattaaacaagtttgttgatgcacaatggctgcttattcagaaagcagaagaagaaaagctcctcaaggttactataaaactgccagaagatgcaaagaaagagctcatgtctgaggctcgtgaaaattacttaagtgactgtgtcagcaaatctgcacaactgtgggatgagcaacggaagatgattctggatgatgccttcttcaatttccttcttccatcaatggaaaaggaagctcgatctctgttgacagcgaaagccaaaaattggcttaatatggaatacgggaagcaattgtggaacaaggtatctgtggctccttggaagaagaaggatgcagacaagaaggattctgatattgatctcgatgatgaatccgagttgagggttatggcctgttgctggggacctgggaagccagcaaccacttttgtaatgcttgactcatctggagaattggttgatgttctatatgcgggttctatcagtattagatctcaaggtgttgctgagcagcagcggaagaagaatgaccagcagcgagttttgaagtttatgactgaccatcagcctcatgttgtatgtgtaggagcatcaaactataattgcagacaactcaaggatgacatttatgaggtatttttcgattctattcatttgcaacttctttcttcacataaggttacatgttcagttaacctgtacaaagttatatcctccagcagcatggcttgtttagttgctagtagtatgtcaccagaagcagcattcatgagggaccatctgcagagaatttcttgcagcctgtgctataatgaacaccaattaagctcaccttgctgttggatgcttgtgattggttgagtcttttctttatacctgctggtcatttgtgaaggcaattgtactttgtttaaggcccggtttagttggcaaaaatttttattttagggtgtcgcatcggatatacggacacacatttgaagtattaaacgttgtctaataacaaaacaaattatagattccgccatggaaactgcgagacgaatttattaagcctaattaatccatcattagcaaatgtttactgtagcaccacactgtcaaatc

SEQ ID NO: 22101 - DNA, 10650 bp, Oryza sativa
ttgtcaattttaatagtgtttattgtttatttggtttggagccaaattttggcatgcctaagaaaataggccacttcaacatttaatttaggctattttggcttcaatccaaacacaattttacctttatcaaaattagtcatgccaaaagttgtcaaaatttgacattgacaaaaattggtaaggccaatttatgccacaaaccaaaccagccctttattcatctaaattttttttcctagtgcagctcacaatacacaagaagttagaatgaacctgtttataaacttaagttaaatgagtctacatttagcatatatgggcgagtcatatactatgatcacattgtatataagattaattccaatataattatgtgggccaataacttacaaagtcgatcatgtaaataaacccaactattccaccatgtgcttgatcggcgcaaaaaatgcatatacatataaatataaattctagtatatctcaataacttacaaagtcgatcatgtaaataaacccaactattccaccatgtgcttgatcggcgcaaaaaatgcatatacatataaatataaattctagtatatctcaattaatttctctattgtgtttcatcatagttatccttggcaccatttcacatcagtaattccccatcacacgcagcataaatacttttcacattaaattaaagaaataccataatataatatataaatattgtatgatgtcctccctactgataatacttctcattttaagcaaggatgaggtcaaactttagaatatttaattatgaatcatttttaaaatatttgtcttttaaatatggtggccacatatatagattagtcttaaaaaatattttaataaaatcacatatttgttaatacttttatatattttataataaaaaataatggttaaagttattttttttgagaccgtgtccttatttaaaatgacaagtattatcaatccgaagggagtataaaaataagtcctacatcaatacgctcagataccctcccttaatcccggagatacttaccacggattcctccacgacactaatcccaaccagaatcacctctgccccctaatttgccactaatgacaagcttatacaatatgtggtcaaagccgcgaccggtctgaccacgtcccttcgccgttgatcgagtcgacgtggctttcctgacgccgtcgacgatcgatcgagcaggccatcgatctggtcgtccgtaattcatctactaaccgcttgcggctgcaggttcgcgcgcacgcacgcacgcgttgcatttgcctagtccttcgggttggtgtggcttctgaaaccgactcctcccccactcttctcccacgcaaatctgaaattgtgaagtgagcggtttgcctttaggcttatatatacggagaccttaacaccacgcagagagagagggaggagacgcgcgcgcgcaggttcagatagtttcaggcttgggaggaaggaaggagaggcagagagagaatttttgtctgagagaattcagatttcagagagataattttcgtctgaagaattgtgtatcgatcgatgtctggtggtgtgatcagcatggtggtcgcgccatggattctcgcttgcgggttcttgctctgctcatcctccttcctcggtgagaacagttctcagttcattggttcatctttctgttttttttttcaggttttttaccttgcttgcaatttcttctgttttctttacctcaagggtgatcggttagcttcaatctatacatgagttcatctgaggtttagaattacgtttaatctcttatagtagattatagtgtatgaatggttacagcatgtttctcatagctagagtcgcagtttcttcaatctgttcttgacgtctagctagctactttcatcgcgttctgttcatagcagtttttttttctttttttgaagaacgttcatagctaggttggttttgtctcccatcacgtcttgttttgtttcttgatttgagcttatactgccattagggtaaaggattttcttttaactttgagggatcctttgggataaagatggcgccaaatgtctgcttcgataattaattatcgattgcaggtagagccgtataggtggttgccaggcttattctttgtgttcttggttaggtttcttaaagaaagaaatccatcctgctgaggaaacactgcatgattggtttcaggaggaatgctgcgactgtagctatatttattttgtgggttttcaattttttaattacccatttatcgtactggacaaaacttcggtaatactccagtatttaggagaaggaaaaggataacaacaatattgacatcagcatcctgattggacagatttcgattacagtacaaatatatttcgtatggttcagaaaaataactgtatctagtccactgggcctatgatgcgttcttacttccttagaccagttctgttctttcagtaaaagtttggctaaacctacctaaataatttaaataggtcatatctgccattatttattagatgttacatctcaaccaaaatatatatcttattctgccaatagtttttctgattgacgaaatgaaaaagggtaacacttttgcattgatgtttaaatcaaactaaactgatgttgatatcgttgtcatctcaatatgacataacacaccgtcactggataggattatgtcttttcttaatcttgtagttttttttttcaacatcagacaacctaaaccaccatttttgctgttatctttgattccagtgcatctttgactctttgtatatcttatccagtgtgctttgatgaaacaactataattaggcagacctagatgatgctgtaaacctagataagatataatccattaccatatgaacgtatctaaacagcatcacattgtctacaattacaacaaaaaagacattgctgcggttttaatatctttgtttatttctggttgaaagcgatgtacttggatatatttgactccatggacattgacgtttactgtttgctccttgacgccaagtagaaaatggtttgtgcattttgcatcttattttttgtagtgtgaatgacggaattggacctgtgtagtacgttctataagtccttaggttggaaacttggaatagccagcagaaaagacgtatagtgatgtggagttgtgcacgggcttcacttggaaaattttatctggtcccaactcttctcctgggtttgttggctaaccactcgcctaatctagctaggagttcagtttctgcaagtcaggttacacacctaattcattgttcttcatttcataatgttaacctaaacatgataggtttggcattgcggatgtgaacaaggctaatgattgcaacttctcacaagtccacttaattttctcatctcaaatatatatatatatatatatatatatatatatatatatatatatatatatatatatttgctccaaagttgaaacaaatataaattgatcatttgactaatgtaaattgtatcatacaccctccatcccacaaaatatggcatcttctagtacaacgaatctgaataaagatatttagattcgttgtacttgtgtgatctcttctaggttgatttttttttatagatggagtagctgtataatgaatgaaaattactgaaaaaaaaagttgtaagttgtaactcatccgtgtggcaaaatgatgcaggagctgaaggcgccattggtgtgaactacggcatgctggggaacaacctgccgtcgccggcgcaggtgatctccatgtacaaggccaagaacatcaactacgtccgcctcttccacccggacaccgccgtcctcgccgcgctccgcaactccggcatcggcgtcgtcctcggcacgtacaacgaggacctcgcccgcctcgcctccgacccctcgtttgccgcctcctgggtcagctcctacgtccagcccttcgccggcgccgtcagcttccgctacatcaacgccggcaacgaggtcatccccggcgaccccgccgccaacgtcctcccggccatgcgcaacctcgacgccgcgctcaaggccgccgggatcagcggcatcccggtcaccaccgccgtcgccacgtccgtgctcggcgtctcgtacccgccgtcgcagggcgcgttctcggaggcggcgtcgccgtacatggcgccgatcgtcgcctacctcgcgtccaggggcgcgccgctgctggtgaacgtgtacccctacttcgcgtacgccgcggacgcggagcgcgtgcagctcgggtacgcgctgctgtcggcgtcgcagtcggcgtcggtgaccgacggcggcgtgacatacaccaacatgttcgacgcgatcgtggacgcggcgcacgcggcggtggagaaggcgacgggcgggcaggcggtggagctggtggtgtcggagaccggctggccgtccggtggcggcggcgtgggcgccaccgtggagaacgcggcggcgtacaacaacaacctgatccgccacgtctccggcggcgccgggacgccgcggcggccggggaagccggtggagacgtacctgttcgccatgttcaacgagaaccagaagcccgagggcgtggagcagcatttcggcctcttccagcccgacatgaccgaagtctaccatgtcgacttcgcggcctccagctagattaggcccggcccatttcacatttctttctttcagctgctgctactattttattatttgtcggatacagtattttcgtagtttcggttcgatctcatgtcaccggtgctctgatttggattcattgttcatttgttgtcgatgcacattggagtatgatttattcaaacgcacgaattttacgagaagatatgcagacaatttccactagatgaatgctgatctggatttaaaaacaaacaccatgtcaaaaactgagtgaaatttaatcgttgcgaagaaactaattctgcgccgattgcttttgcggaactatggtggaccggaaatgcgatacttacgggccgtttacccgtagactcggtcaaagccttttggacgcttatgggccggacgtgggcccacgaaggtaccagcgatgatgccacgtgccactttttgtggcacacgtggcgatccaatccgagaggactagccgctggtgtgtagtagtactagcgagttcttcctcggcgagttggcggcgtagagggaacgagaagaggcgagttcttgacccttccaccgttgcgcgcttcgtctgagttttgcgcctctcctcgagaccggtgagtgcgatcacgcgatttgttttaacatctgttccgtagtttggttgagtccgatgcttagggttacttcgtgttggctatggttcttgggtggaatctttgatcgatcgcgttagggtttgctttcagcaaaatgggtttattttctagcgaattagcgtgctttggttggtaccatgtaatcaggaatcaggcaaaggaggagggtaggaaactagggattcaggtacgagttattttgtgcgtgttccccatgtggccatgtgcgaggctgaaggggagattaggattactctgtttgatagaagtaggaagttttggtggttcatcaagtggaaatgcaattgagtctctagcagattcctctcggtgattgtaacaatcttatagttgtagtgagctagaaatgattcacaagtcgattagcctgattttgagattccacgcaaaaaccgagtaaatttgagacccactggcagatcctttccaacttatgttattgtactccaataaagtggctaaggtgatgcccttttgtgtagatttgtttcgaagttgctaaagccaactttaactcattcgctctagtaccacttgatgcctggtaaatgtgaagattgtaggagcagactagttaaatccaggagcaatgcttctacaagaacagcttagttatgcctttttccctttttttttcccctggaagcatcttcagttgtattttgctgatgcttagtgtattgggtccaaaaatggattgtatgggaaagatgtgacagttttctatggcattctttatctatttttagataattgatagaaatatggcctcctatatccacaagtggatatacacagctaaaagatacatgatacatgagttcttaggctccaagtctcaaaactgaggacaaaataaaaaggaaaaaagctagacaactacgaaagagaactagaagactttgtttggaacttcctaaagatttcgtaatagtatgactaatctttgtcaatacattctgttagcatattgctgtgtatgctgtgtggttcttctcttggagtcttacatctagtaattcataccaggcatggatgcaaagaacttaggcaacagacgacaaaatcatgagaagagtacaatgacagaagatgcacggagccgagatcaggagaccttgcagcggtttgcagattcagatattactgtgagtccagtcaacagtcatgaatctggagatgtgaacatggaagctgccatctctgctgaggatgtcttgcgagctggtggtttcggagcaaaagatgacatcggcagcctccttcccacagccgtagattcgactgatttcgaggcctcgctacgggatgctcgcgactttgaaggcgagagtgaaaaaccatcgcatcctggactaggatacaaagcaaatgaaactgacagtggaggcaaaccatcagatgtgcagcagcagcagcagcagcagtgatccttagtgttctcttctcctccatgcaattttagctttggataacatgacattcgccgcgttcctctagtgctccgaagacctatcctgttctgactttgtgctaaggtatgtggcatttctgttgtttccctgatgtaccatgtatgaacgtgaccatgatgattctgctgtatgaaccagatcgtttcaccttgtatacctaagtattagtggtagtagtttgtgccagttttttcatcatgagttgattatctgctggtgattgtggtcacaggatgcagaggagagctgatatattttggaacgaaacgcatgcaaattttgcatggtaggtacttgataggaggcataaaggatcatctgaacacttatgtatgatcagaaatcaaacattaaaacaatagaaatcaactaagttgacattaaaaccaacagaaatcaactaagtctggatctcgacacaagaacagaacaacagagcaggtctgtcattcactgtgaggctctttgtgagttaagatgatagacaatcgtcgtcgtcgtcgtcgtcagcatcacgaaacttttgcccttcggccttgttgacgtgaagcctcttcttcttctgccctggcttcttcttgccggcgtcggccgccttctcggccttgagcttctcgttggccaccgtcgtcatggacgacacgatctccttcacgctcgtcgacgtcagcgacgccacggcgagcttgttcatcgccttcataagaccaatgtaatggtagcttttctgaaacgaagaaagaaacaaccaaacattagaccccaaattctccttgcaattatttcacggacaagaatatgagacgagaatgcaaatacctcgtaaggtctaagaagatctttcgcgatgcgctcggcgtactcggcgaattccttctccgattttgggacgaacttctcgatgggttcgtcgtcgtcaggctgcttctgagctatctcagcagcggcattcgaggtagaggtttcactcggtgttgcgtctgctgcttctgccttcgccttcgcgttggcctggctcttcttccctttggttgcaggaggtttcgtgctcgccgccgtggcggccgtctccttcccaggtttaacgtcgtcgtcgtcgtcccacgtgtccttcaccgcggcgaagtcgtcgccggcgtcttcgtcctcccaaagcctttttcccatagactgttcttcctcatcggaaaattcatcgtcatctgcagcgagaaacgcacgggcaatgtcagaacaaaaaatggatcaaaattacagtttgataaaaaaaagtgatatcgagaaggaaaaggggagttttactatggaccatcgacggcaacttaccccaactcgccatctttgatgccgtacttgatgatccgtgcaagaacatcaacaaattaactatcaaaagcagggatttatagcctttttctccaaaacccaagaaaacaccaagagggcttcgattgtcgagtgaaattcgagggctgcaaaatcgagccggtgcacgagaatttttgaagtttttcttgcgaccgagaagtgctcgccaaattgcgatggctatccgtggatgcacgggacaatccaggtatatagaggaaacggagggccgtcttcttgtcagagtcggacgaggaagagcatactagagtactggattcctagtccgattcatgatccgagtttctgctgccgtggggcgcagcagccaattgctgatacaggcattgatgaactggaatcggcttaaatatgccacgttttattaagagagttttgagcgttcgacaccacaaaatctgcgatccaaactaatgaactcatggctcgacaaccagaagaaaaatgtagtgatgaggtttgtctgaattctgatgcggcaggatgaacattgattggatcattggaagcactgcacgtccagatccgatgcggagtttgttgaagtatatagatgtgacaggagtttatacatgaatgctcaaatgtccatggttaatgcaaatatcttgaagaaatttcatgggcataaaatgtgatgatgtttcactttcagtgatcagtttctggttgcacacccttcatctgaattttgagctgaatccagtgtgcgcatccagcatgcaaatacatgatcaaatgctcacaatggattatgaaaatctccaaggtgtctgtttgttccggaatccagcatgaactcctgccatgccatgattcactaattttcaatggatacatctactttcaacagtcgactgcccaggcaccctaaagtttgcttctctgccaaagaaaaaaaaacgcaaataaaacatacttacccagcaaattagcaaaagaaaaaaaaaagatgatgagagaaagttctgggggaaacaacgtaaggtattgataattatgtttcctgaggtaaggtatatccaacaaacacaaaatgctgggaagttattcaaacgatttccagcatctctataaaacattggtctcttacatttcgagtggttgaagaggtgcgagaaaggagtagaatatagcaagtttagaatggtacatgaagaagatgcaacaaaatgaaacttagcctcatacggccacagtgacagcttcatcaagtgcaatgactccaggaagttcctttccttccaacagctccaagctagcaccacctcccgttgaaatgtggctcataacatctgcaactcccaccttctcaacagcggcaacagaatcacctcctccaataatggttgtaacacccttgccgctaaggtctgccaacttctttgcaatagcctgcaaaagagagctcacagttaagcttgttttcgcaattccgttaagtttgttttggcaattccatctgtaatcaaaccgaatgagagcattggcacaggccatcacctcagttcctactgcaaacttgtcaaattcgaagacacccataggtccattccaaatgactgtctgtgttgtttccagggtagagctgaatgacgcgactgaatctggaccaatatccagacccatccaaccatcaggaatagcagatgctggaacaacctgtagaacaattcaaagtcaaggtcaggtccagtatatcacttcaccaaactttgagctgctctatatcaagttatcgactagacaatatctatgataatcatcatcagtgattacaaaagaataaaacataacagacctggctgttagcatcaggagcaaacttatcagcaatgataacgtcagatggcaacagaagggagacacccttttcttttgcctttgcaaggagagatgttgcaagctcaagtttgtcttcctcaaccaaggaagaaccaacagagagtccttgtgccttgtaaaatgtgaagatcataccaccacctagaagaaggatatcacatttctccaaaagggattcgataaccccaatcttggatgacacctttgaaccacccacgatggcagcaaatgggcgtttagggcttgaaacagctccaacaaggtagtcaagctcctgtgatttaaattaatgataaacattgaggctcagaactttatattgtttttgaaagaaaagaaagggtactctaaaatttctggtctaggtatagctttcaaaaatttcaagcatcagacttgaaaatgtaaggtgaaacggtagtaaccttctgcaaaaggaatcctgcgacagaaggctttaaaaacttggtaactccctcagttgatgcatgtgctctgtgggctgttccgaatgcatcattgacatagagatctgctaaggag

SEQ ID NO: 22102 - DNA, 3051 bp, Oryza sativa
aaagataacttgcaaaattatgaaatagtaataaaatcatgagaataattatgtacaacaagagtacaggctatttaaatatagcaaacgttactaatggtacactccgatgacgtgcaatttaacatatatgtagagctcgataatataacataacattacgtgtcgaagtccgacatacatcagcatacctaaagacgttaggcgccttagtccgacgttacatcacgagaccaaaagacatgacatgccgaagtctgacattacacgacgaaacatagaacataagaactacaccacgtagccagacgtggcacgacgacgcctaggacgtggtcgagtggaggtagtgccttcacccgtagggcgagctccgtctgctgctgatcctgatagtcctgcctccgccgcacttggtttctccttgtctttaggacaatgcttgtaggtgtgcccttgttcatcgcatttgctgcaacgcttcaccctgccagcctccgactcgtccatatcgttgcggatgcgacgagtcctcctccttccagccttgcctcggagctacgatgggtcaggaatattgagtacttcatcgttagtctctgtgaactccccagctatgcgaacccataaatctcgccgctccatgtatgatatattgcttgcttactgaagtactgtgacacatatactgcatatggtatgccacactccgctgcggcagcaatgacatgggtgcatggcctgtggagcagcttcggctttgcacaagagcaatgacatgtgccgtcggctttgagaacacactcctgcttcactctcttgcggtagatacccctgcctgccttatcttgacatagtatctcaaacctgtgctgttgggtaccttgcactagagctcgatgtttcatggcctttttacgcaactcctctagctttttctgcatgaaagctccaaacaaaatgctgttgttcagcatagagggaagaactgccgggaaccgatccctacaatacctgcatgtcccatgtaaaatgaactccactatgccaactagtggcagtccacggacaccgcgcatcacccagttgtaaacttctgccaaatttgttgtcattattccatatctagcaccacttgtgtcatacgccttggcccatttctcttttggttcatgcagaatccactgaaaaaatttccgaatctccaatccagttcttctaaccaatgttggactatccgttgggagaggtccaagagcttgaggagggtcagcaacggcggtcgatggagccgctgcacgctgatcactgcatttggctgtcaactcatctaatctcttccaaagctcattaaattttttctcctggttctgattgcacagcctcttgaacatgttcatgagctccttgttcttgaattgcttgaagaaattagctcccatatgacgcatgcaccacctactctgtacatcttcccaaacaccggggtatcctcgttccatactcccaaactgcaactcttctatcgctcgcagaatgccagcgtgcctatcatgtatcaggcacacatttggcctcataccaacaacttttattttaaccaatttcaggaaccagtaccagctgtcggtattttcactctcaacaaaagcaaatgccaagggcaatacctgattgttcccatctacccctattgctgttagtatctggccctgatactttcctgtcaagaatgtcccatcaatgcagagaacaggacgacagttcacgaatgccatcttgcatgcatgtagaactaagaacgccctttgcagcacactcttgctaggatgatcaattgaggggaatttcttcacttcgtaagagctcccagggtttctttcctcgataacaccaagcaggcgtggcaaattgtcatacgaggcttcgtaagttccaaatctcatctctattattttctgtttggccctccaggctttggcatagctaatagtatacttgtatgtctcttcgatgtgtcggattattgaccttggttcatatgtgagattatcgataacatgcgcatacatctcagatgcaacaaatgcacatgtaatgttcctgtggtatttctgaacaccaggtagaaaacatgtatgcttggtaacgactgatactgtccaataatccttccatttccccttatacgcgtgcactctccagggacaaccatctttttccttaaaacaccgaactttatattgcgaccggttcgacttggcaatccaaaactctctatgaagtgacactgcaaaatgttttactgcctcctttatatcttctgctctactataaatcgctccctgaataacctcattttctttgtactcccatctcacactatcctcttcagagacgatcagcccagaaaaatcctcactagcccattctgctggattaatatccgtctcatcatctgacgaatcaccttcctctacacgctcgttgtcagaatcctccctctccatttcatccacaatggcaccgacagtctccccctcgtcggccactccacctggttgaatgccactggagctactacgcccccgtcctctcgtgcgttgacctcctccacagaagtctcatttacttcagcacttggtccctcgccatcatccatgttcatctgcacacctggatccttcgggtgaacaaacggaaccaaagctagaggccacccgcgttgcaatgcattttccaaataccatctccacactcgagagttttgaactggcattagttcccaataaaaaccctcagttgcccgacttactataacattgattgttatgtcacttgtctgtggatcaactctgaagcccctcattaaccatccttttatagaaggtacactcctctcagccggtctatcaattcccctttctgatacaataaaatctgacagatctaccctagttggcccgtaacggacgtttcctggtccatggtaaacttggaatatttgtttgttcgacatatctgtcaacgaaataactagatcatattact

SEQ ID NO: 22103 - DNA, 3664 bp, Oryza sativa
acaaaagtcgccaacttggcgggccagtcgccagctgactgctgacccttgcgcgagtacctgcgaattaatgtgtaatattagtgtgaaacgacagatgttacaaattattgtgaacatgtagattttaatgcaacaacggaaagcgtagtgaaagatcttaccggtgaacagcagctgggacggtggtcggaaacggtactggaaagggctgacggaggccgaactgtcgcatcacgcggaaaggggcgtgaggctcaacgcagatgtcgaagaccatcggaaccgtagtcatctagtacgcctggtccctggtagagagtgtggacagacccaacggcgcacgagcctgggtagccgcggcactgtagggctcccacacgacgtcagtcggcagaaggcggtcgaactccataacaaactcaggatacgaccgcctaacctggacgtgagcccatcggcgctgcaatacgagacgatcgatgtgatgtataatgaacttagcaattaacttaacaatacgataagatcgatgcaacgtacctgacgacgtgtcacgcccagaaattcccgaatagaattccaagcagaatgtgcattaaaatccccgtccaggaccggccggggtacacaaatgacaatgttgacattcagatccacgtcttacaaacatcataaaagtcttacataaatgcagcggaaaaaacgaaagacaacaggagctaagccttgactagaactgcagcgggaacaccactccacatgcatcctcgacggcacggacgaagcctactcctcggagaaaccttcatctgacacatactcgtgctctggggttgggaaaaatagagcaagactgagtactacccactgtactcagcaagtcataccggaatagggatatgatgcagggaattatcaaagaagagctagagtggttcatttgcataaagcgagcatttataaacagaagttgaaagttttaaacggttgtaataattaattaatattaactatccactgtccaacgctatcccacgttgcaacaggcccaaccaggcacctaaactatccaaaaacaaaagattacactagggtgagactaatcacggtgaatctggttgaccgcccataactgcgggcacggctattcgaatagttttactctgatcagaggtgtacaactgtacccacaagacacagccccacgacacgtttccgtgcgccgacatgtcaccacgacataccggaaagaggccgtgataggacccttcgcataaccccctctaaccaagcacaccacacctcaggtttcacccccactcctcgcaaggcagcgggcagtcccctctcgtgcctaggtgaatccggaagcgacagaggccgtcgcaggacccgccccgctccatcacgcccacccttgcctggatgcgttgactagaggaaagctatactacaagcccagccattgcccacgctggcttgtggtaagtacgataagttcttccagggcatcccgcgaaccggtccttaactgccatgggtgcgaccagcaaaaccatgcacccacagcccaccatgtgatttattttaattaactaacaccaaagcggtggcactaatccaacaagaccattagagccaacagtctaaacattaataagatcttccccattgtgcactagttgaactaagcatggctaagcaatccctagtccaatctctagtcatgttataaccccaagctgacaaagaaacatggtacaacaatagcatggctatgacaataggtaaacaccccatagaaacattataaaacaatgcaatatttgaaagaaaacaatagagcatttgcaatataggatcaacatgttcaagtgacaagcatgacttgccttgctctgttgctggaggaacctcggcgactatttcgaagtacaccggagcgttagaggaaccagaatctagcgacatacaaggcaaacattgcaaacaggctataagactactgaaacagggaacaaaaccatttttaatggattctacacatttttcttgatttactgagacttgaatgggcttaaacggagctcggatgaattagttatgagttttagaagattcactgtgtttattactataaaagaaaaaccttaaatcatttattgcgcaataaatcccagggctgacgtcagcacggagggggagcggcgccgacatgcggggcccaccggtcagcggctcgggagagggaggaaggggcgccggcacgcggggcccactggtcagcggctcgggggggggggaaggaaggggcggcggcgacccggctcggcttggctcaaggccggccgaccggccgcggcgacggcgacggcacgcgcacacgcgaacgcgttgccggcgacggcaaccggcggcggaggcgacggcgcaaaggcgacgcgaaggcggctgcgctaagcgacggctaggaaggagagggaggggaatagatgggagaggatgcctcaccgagggtggccggcgcggaggaagacgatggcgaacggcaacgacaagccacgggaggacgacggcaaccggcggacgggcttcggggtgccctaaggaaggaagagagagattagagagagggagatgaaccacggcgaccggcattcatggccgaaagcggcggtagcggttgaactcaccggagcgcgaggggatgctaattccggcgacgaaactcgacggggaaggggcagccggggtggagcttagcctcgtgaacccgacggcggcgacggcgcggtgcggcggcgaccctagcggcggctagcggcggccggagtagcggaagcggcgtcggcgggtggttgccggcgcgggagcgatggggagcttgggagagttcggcgaaatggggaaaaagcgacagggggcgacggggaagcctaaataggggaggagagccccggacgtggccggtaggggcgaaatttcgccggccaacgtggggagtgggggaggagagagaggcgggattcgaaaatcgaatcccggccatctcgggcgcgggcgcgggcgggagagagaggggagtgggcgcgggagatgcggcgcacgcgcggacgtggctgacgtggcccggagaaggcggaggcgtgggcgcggcggcggttgcgggcgcggcggcgccggctggaggaaggggacgtgtccgacaagtggggcccacctgtcggcgtcccggggagagagggaggggcgacttggctgggcctcggcctgcggccggcccagcagggaggagggagagagaaggagagaatgggccagcggcccattcgaaaaagggagggaaaaagaaaaagaaaaaggagaaaaggattttcctggaattaaaatattgcttgctcaattttagttggttaaaattatttgtagggctctgaaaattccacgaaaaatcctgttagtggatttcgacatgtagaactcaagaaaaattccacatgccacttccgattattatttgcattgatttaaaagggtttactcttgctttgcaccggtattttcttagggtcgcttataaattaaatttttggcttgggaggagaacttcggggtgtgacacgacggcaccacagagtacccatcgtagggtagtcgacct

SEQ ID NO: 22104 - DNA, 21591 bp, Oryza sativa
agtatacagcaagataggatcttctaccctttttaacttaaagaagtcaagggggccccttaattgtccaaccatctcggatcatcggggcatctgacctgtaaaagtatcaactagggtattatcgtttatcgggatcaatgatccaccttcagtaggaatgtgacaggaacctttcttgggaggggcaaaatatttatgggtgaaatctttgccttcgggccggcaacgatgcctgtgggtgccgttttcctcttggggcgttgctgcataatctcatctctcccagttactttcttcaggtgaaaacgatgtcctgactccctggggcaggcggtggtaacgctttcggtgttgttcccttcttggaggcgtcgcttcgaagatctttcattcttgtttccgctatcgcggcatgtgttgtcatagacgcgcggtgtggttgttttttttctttccttactatagtttttcaggactatagacttgtatatttctcatgctttatcaatacatgaaactcacactgtcttgtgcaattcgttttaaaaaaatgatccaccttaattgtctggccaacttgaccatcgatttattaatccatccatcacatatttctcaagactaaccatccagcctattgtctaacatggacaaatcatcctgacaatgcaaattttagtatacatctcaattaaatcatacttcgatttatttttacttgaactcttattttggggaaacggattgtttacttcaacctgttattgggcttcaactgactagaattgagctagacaagtctaccgtgaatcattactagataaaggaaaaacaagcctaactgactattgctgcttctgcttttattactttttttggggggaatacgcaaggagcgcatctttgtattaaggagtaataaaagttatttacaggaaaaatacaaatgtggtgaaggggacaagatacaggaagggaaaaaacgaaggaaaataaaatctaatctcgcaaaaaacttctgcttttattactgaaatttatttttgaagtctcgtcaaattacatccacgagtgaaggccaaaaaaacaaggagtgtagttgtgtagatgatagtagtaattccttttgccatcaacggtccccttgagaacataaaattcatgtaggttattttattatttgatagcacaagtagattgtttttgttcttttcttagagatgcttctttttcttgtccagggaaaagttcaggttgtaattaacgtgcacaaggcagcgctgcaatttattgatggtgtggtctcaactaattatttctggtttctgctcttatcataatcacaatatgtcatttcaccttatatctaatgatgtaggtgtaaaacaatatcatctacctcctgaacttattgaagaaggattctgtatcagcccagatgaactagcagcaattgctaacatgcgtgaagattatacaatgctcaggatgcatggtggaatcaatggaatatctagaaaaatcaaagcatcattggaagatggtgccaaggaaacagatatagcaaccagacagatgctgtatggagctaacaggcacgctgagaagccccctagaagcttctggatgtttgtgtgggatgcattgcatgacttgacactgattattctagtggtatgtgctctggtttctatagtggtcggccttgccaccaagggatggccgatgggtatttatgatggttttggcataatactcagcattttgttggtggtactagttactgcaaccagtgattaccaacaagctcggaagtttatggaactggaccgtgagaagcaaaaaatatatatccgtgtaactagagataagaaaacaaaggaggttttagttcatgacttggttgtcggagacatcttgcatctttctataggcgatgtggttcctgcagatggtctgtttatatctggtgactgcctaatgatagatgaatcaagtttgtctggtgagagtgagccagttaatatttctgaagagaggccttttcttcatgctgggaataaagtagtagatggggcagctaagatgcttgttactgccgttggtacgcgtactgagtggggcaaaatcatgggtactctgaatggagatggtgtggatgaaactcctttgcaagttaagcttaatggtgtggctacaataattggccagattggattggtgtttgctgtgctaacatttttggtacttctagcgaggttcttggctgacaagggaatgcatgttggtttgttaaattggtctgcaaatgatgcattgacaatagtcaactacttcgctattgcagtcacaatcattgttgtcgcagtccctgagggtctaccattggctgtgactcttagtctggcatttgctatgaagaagttgatgcatgacaaagcactagttaggcatctcgccgcatgtgaaaccatgggttcagcaagttgcatttgcactgataagacagggactttgaccacgaaccacatgattgttgataaggtttggattggtgatgtcaagtttgttggggacaaaaaaaattctgagctaaaaagcacgatttcagaaagagttatggcgatccttatacaaggcatatttgtgaatactgcgtctgaagtggtgaagggagacgatggaaaaaataccatcttaggcttggctactgaaacggcattattggagtttggcttgagcttggaagaacatttatatgatgactacaataagttgactagaataaaagtagatccttttaattcagttaagaaaaagatgtctgtgacaatacaattacctaatggaggcatcaggaccttctgcaaaggtgcgtcagaaattattctggaacagtgcaataccatccacaatactgatggaaatatagtaccgctgtcagaaatgcagaagcataatgtattaaatataatcaattcgtttgcttctgaggcattgagaacactttgcatcgcatttaaggatatggatgaatttcccaatgatcaacctatatcagatgatggttacacactaatagcagtttttggtataaaggatccagtccgtcctggtgtcaaggatgcagtaaggacctgcatggctgctggtattagagtaagaatggtgacgggagacaacatcaacactgctaaagctattgccaaggaatgtggaatattaacggaggatggaatagcaatagaaggacaacagcttaacaataagagctcagatgaactgaaggaactcctaccaaaaattcaggtttagttgtactctcttgttttcttttcattaattaaatgcgaatataagctaaatctatgtcccaagctcaggtaatagctcgctccttgcctatggacaaatacaaattggtgacaagcctgaaaagtatgtatcaagaggttgttgcggtgactggtgatggaaccaatgatgccccagcactgcacgagtcagatattggactagcaatgggtatcactggaactgaggtatctatgaatgtttttcggtaatttatgttgttttattcctctatgaccttaatatgttcggtttgagcgtgtcttgaagtgagaactgggaaatgccctttagtctaaaccaattttctacaagggcttatctatatcctgacttaataataatattagctgtattttttaaaaacatattcctagatgtttaatattgtcagtgctaaaaaaaggagcaaacggtacaaaaatacaatttaattattttgcataaggtcgatttccttggctgtaacagtattcatcattgtttagtgacatttgattttccgtgtatgatatatctgtggacaagttgtgatgcaagttttatctgtttgcaggttgcaaaagagagcgctgatgttataataatggatgacaatttcgaaaccattgtaaatgttgctagatggggccgtgcagtttacttaaacatccagaagtttgtgcagttccagcttacagttaatattgtggctctgattgtgaattttgtctcagcgtgcatcataggtattagcacacttgctaccactctaatattattgatctaatgatgactgtttgaaatgaatgtgtattgttttctagaataaattcgtatgcattttatttggaatgcatatgcaacttatgatataatatttcctttttgctacacattttaataataaagtcatatatattgttattatggctggaaatagaggattgatagggtagatcgccctcaagtcgctggcttctccggaagaccgaggctttgatctgtttgacttggtgggcaaaatccttaatttctttattgcttaagtccctaatacaatagcaggccccctttatatactaggtgccagtctaatatttaggaaatctaagacaaactaggaataggaaacagaatcctaaaccaactagaattagatatatctactgattattcctattcctattcctatggtatttgattccataacgccggtctataataattgtcctctcttcttccctttacttgaagggagtgcaccacttactgctgttcagttgctatgggtgaacatgattatggatacgttgggagccttggccttagccacagaaccaccaaatgacgaaatgatgaagaggccccctgttaggcgaggagataattttatcactcggattatgtggagaaatattcttggccaaggtttgtatcagctccttgtgctggctactctaatggttattggaaagaaactccttagtattgaaggtcctcaatctgataaaaccatcaatactctcatattcaactctttcgtcttttgccaggtatgtgaactacaagtcccttttacatgcaaatgagtcaattttgttgtttttgtctatggattttatttatgtttgatatttcaagttctcatattataattgacaggctatcatttacattattctcggccatttcagatgtcatgttcactttgtagaggctaagacatttaattctgtgcaaagctcattgacatgtgatatctgataataattttcaatatgccatggactctctgatgacttcagcaaaccatagaaaataatcatgtagtaatcagtatatgtttttccattttcgttagaaaaacgatccagacaaatttaataattttcagaacaaaacaaagctttttccgtgcgcatttcacatatcctgatgctatgattctataaaatgcaagtgcaaagtaaaggcaatattcattaaacaagtgatctattgtggaaattaggaatcagtgctttattttaatggtaattttaccatccttgagaaggtatcgggaggtaacacattttctagtgtaaaatttggtacattcaggtactaaaataccttgagtataaaaaacttttgtgtaaaatttaggtaccttgaggtactttctcaaggaaggtaaaatttctcttattttaacggtaagtttcatctgacatgttaccatgcttccaggttttcaatgaaataaattgtagggagatggaaaagatcaatgtcctccaaggtatcttcagaaactggatctttgttggtatattgacagctactgtcatattccaagtgatcatagtagaatttcttggcacttttgcaaacactgtaccattgagcggggagctgtggctgctcagcgtcgtcattggctcaattagcatgatcatctctgttatcctcaagtgcattccagttgaatttaataagacaaatactaaaccccatggttatgagttgattcctgaaggcccagagattctatagcagtttcacgggaggtgcggaaattccgctcaaactgcggtttctgcggtcagcaacccaatcaatcataatggaaaaggatgcactgtaaggatttctctactgatgtaattttgttgaatatgatcatgtgtttctgaacatgatatactgaagagttgaagtagatgttataaccagcagatatgtgatgaagtatacggaataggaccaatcatgctgcaagatcagacagcctacgggatttatggtgttgattcaagatttcaagtagatatggctgctacatgagaatgtcgcagcaaatgtggactgcttggaggcttcgttgcaaagcgtacagtttgagctggttctgcagagttcagcttgagatttgagcgtacagttttgtaaaattgaactctaggtactaacaactgtcgaaatggtatcatattattacccttcgtgcttttctcttcagcggtgaactgtgtataacgtgtaattattcttttttatgtataataaagcaaattgtgtgtaactattctttttatgtataataaagcaaattgtgcgtaactattctttatgtattctttgtgcataagaatggatgtcctacatgtgaataatgttgtgttctaaggtgaagttgggaaccttcccttccctccccgcacggcaaacgtggtatcattaacacgtgattaattaagtattagttaataaagcttaaaaatgagttatgagcttttaaaataattttcttatatgtatattttttaaaacgtatcgtttagcagttcgagaaaacatacgcaagaaaaaagagggagaagttgggaatatggacaatcgaacatagggatgaaaacggacggaaaccacctttatcattttcgtttttgtcgacgtttgatgtctcgactacggtatttggacagtatggggatcgtcggtgctaggatatatgcgagactaaggtaaaagagatggagacagggatttttatacaggttcgggcccctgagttgtcaggtaataaccctacatcctgttggccgaagccggtattgctcttattcaccataatcacaccagtacaatatgtgggtagcctatctaactgttgtcgacatggcggtctgaaggtctgactcgtagtcgacaacagggtagccttcctcctcgagctcgcgcccgatggaatcaaagacagtgctagatccctacggccggcctctgaaggtaccggatagggtcgatccaggcgtatctctgatgtcgatatccggcggcttgtcttggtgtatgtaggcttctatgttgattgtgttgggagttgattgtctcgtggtgggtgttgatcgtctcatggtgggggttgatcgtgttgatagttttgatcctccatggtgggtgtgtgtccctctgtcctcctaggggggcttgtatttatacccatagatgtccccttgtccaagtagaactagggaaaccaatatggatacaatccgagtagtccttgtcgtttccatgtagaactctgattgtctttccttatccggaactcctcctatatccgaaggttgcttccgtataggacatggtatgtggtgtatcttgccgagatttagtcaactactattaggtatgtagtatccataaccctgacagttttcatattttttttcggaatcagaaatcgtagatataaaaacggaatcgaatattatcgaaactgaaaacggaacgaaaacaaacaggtgcgaatatggtaacaaaattttatcaaaatacaaaacccctcaaactgagcttcaaactttgtcaagttcaattctcaaatctcaatagtaaacaattcatcataaaacacaatcatatcaagtccaattgttaagtctcaacagtacatcataaaacacaatctatgaaataaatgatctatgtctaagagagaaatattgtcgataaatcccaatgcaagaatttaggaattgggccaggctattattgtgttgtatgggctgtgctacaggtatggagggtatggaaattccgagaaaatttttagaaagtttcaactgattccgagttcctacgaaaactgccctaatcatatttgattctgtttccgagaaaatatttcccaattcgtttactttttcgaaaaattctgaccgatagattctgtttttgaaaatagctttggaattcaaaaagtttccgtaccgttttcactcctaatcgaacatggctaaagggttagcgacaacaaaaacaagcgggaaaaactccatagcacaaaaactcgcaggtcatcgactcaccgtgctaagataaaaacaaaactaccaaagaaaattgccaaaaatccatggcgatgagaaatctaaaataacctgaaatagtgaaatgtgatgggagtcaacatggtctgaacagtgcaggagacaagaaagcaagtgtaaactaaaatcttggaccagaaaatgatcaaatcaactcatctaaatttcatcctccatacttctatttggatggccatccaaaaagattcacattctatataacttttcactccaacagattatccatattatatcctacatataccaacatcctatattttactaataattttcaactactacacatttttactcctacttctctcacctttcaccacttaaaaaaatcttggtaagtgggtagttgaggatggagtgaggagagagaaactctatatttggcttgggaagggctagatttggaggacctccaacaatggagtatgtatgtgatggagactctactggagcattgtttttcttctccatactctaaatatcagatggatgactagatagagaagctgctgggatgctctaacaacccaccacaatcaagcttaacctcgctttagaaaacgcttttggatagcatgctgccgctaaacgcaatcacaatcaaaagccaacccttgcacgcccgaattaaatcacccggttggtcacctgtgcagcagctgcaccgccccggctcggaccagccccacctactccaccgccccgccggttcattcatccacgctgacgctgacgcggcgagaaaccacggcggaatccgcgccggctccacctgtcagaaacgtggcgtgggtaagcccaagtttagttccaaaatttttcttgaaacttttaatttttccatcacatcaaaactttcctatacacataaacttccaacttttccgtcacatcgttctaatttgaaccaaacttctaattttggcgtgaacaagggaagaaaacggataatatgcgacttgattcgcgcgatttggataaaataccacccctgtatttgtacatgataaaatatcacttaatatattgtcttccaccttccagtgaaaagctttcgaagaattttagcccaaaaacatccttggttgtggagagagaaggaaaggggagggtcgagccggacgaccgtcgtccccggcggtggcgccgctcgtccgctcgcttctcaccgtcgatctccagcgccgctcgggcgctcacgacttgtcacccattgactaacgcgcgccacccgaccactcactgaacgtcgcctccagccgtctctgtgagtaggactaggtccagcaatatggcacggtcattgtccgaccctccagcgctcctcttttccctctttcttttcacaaaagagagcattttgatctaaaattctttagcgttattttaatcgggaaaaatgtattaagtgatattttatatgatgtattttattatctgtatctacattttatcgaaaccacccatattatccgttttctctacccaacaaggcgggtttacggggtccacctgtcggatgcctgcatccgtcagtccaccggtcacccgctcgtcagaggtaggtcgccgtcgccgcgtccccctccgccgccggctcccgtcgctctccggtctcacgcgccgcgcggccgcagcagcaacaacaacaacaacccgttttgaccgcgccttcctcctccgccggcccgcgcgctcgccgcgcgcggccgccacgggtttctctctagaagccccgcacgaattttatccgttttttcgcattctccccgcctcatctcctccttgacaccgacctctcctcctcggctcggggaattcaaacgcgcggcctcgccgggtggcctcgcctcgcctcgccgcgttccgacagcgagtgccccgctggtgccactatttcttgccgccccaacccctcgcatcgatcccccacacccacatctcgcctcctcttcctcgatcctttgtcttcttgcttagctagctctgccatggtggggagctacgcggcgggagggggacggggagcggcagtggcggcggtggcggaggggaagctggacgagctgcggcggaggatggggaaggcggacggcgacctgctgaggatcgtcggggtggggggcggggcgtgggggagcgccttctgcgcgctgctgcaggacgcgtacgggcggcaccgcgacaaggcgcaggtgcgggtgtggcggaggcccgggcgcgccgtcgaccgcgccaccgccgagcacctcttcgaggtcatcaactcccgggaggacgtcctccgcaggctcatccgccgctgcgcctacctcaagtacgtcgaggcccgcctcggcgaccgcacgctctacgccgacgagatcctccgcgacggcttctgcctcaacatggtcgacacgccgctctgcccgctcaaggtcgtcaccaacctgcaggaggcggtctgggacgccgacatagtcatcaacggcttgccctccaccgagaccagggaggtgttcggggagatcgggaggtattggaaggagaggatcagaccccccgtgatcatctcgctggccaaggggatcgaggcgtcgattgaccccgtgccccggatcattaccccgacacagatgatcagcaatgcaagtaagttctttgctctcgagtgagtttgattatcatatccatttttactaattagtttcaattacagtatcaaatcgattattcggttgctattttactactattttcgttgatcgttgtacttgtgtccttgtgggaataatggacacataaagaaaaggtagttgctgctgaactgggaccaagatacatacctccagaatattcttgataaaatgtgcaggctattcttgatatgcacctaatgtgatgtccttcatgtttattgcaattattatacccaacacaatgtctattgttgaatgttatgagagctagttaaggccttcagtatgtgcccatgtgctatgtttctttgcaattcctttaggggtaatgcatcttatttttagcagagtttatccaaattagtacccagtactgcacgttccgtgtcacgtttctacccagtattaacttctgatatgctcctaagtttttgtttcactgtataattgattttaccatccactggtcttcatctttcctaccatgttgtagcctttaatgttttttgtttcttatgatgggcctattgcagctggagttccattggagaatattctatatcttggaggtcctaacattgcatctgagatatataacaaagaatatgcaaatgctcgcatatgtggagctgacaagtggagaaaacctctagctaaatttctgaggcagcctcattttattgtgtgggataatagtgatctcatcactcatgaagtaatgggcggcttaaagaacatatatgccattggtgctggtaagttccatggtctcatatctgacgttttatgtccatatcaccttgaaaatttttaactgggaaaataaaaccatcatgtggcttttcttgttgaagctcacacacaatgcttggcaaaagtatgaccagttcaaacaacgaagccataaaattgttatgtttgcataatgctgaatgctatctgtcctgtaggaattgtattcagtatacgttgaattgctattatctcttatgtcaaacgcaatgctgctttgacatttcatcaaacctatcatagattagaaagagtaaatcaggtcatcttgggtaatgaggttcccctatgcatacatattcgttataaccttctgcattaatatagaggatcttgatttaagtcatgttgttaaataccttgttatcttgtaggtatggtggctgcactaaccaatgagagtgcaaccagcaaatcggtttacttttcactttgcacgtctgaaatgatatacatcacccatctcctagccgaagaccctgagaaacttgccgggcctttattagccgatacctatgtaacactgctgaaaggtcgtaatgcatggtatgggcagaaattagctaagggtgaactgactcttgaaatgggggacagtatcaagggcaaagggactatccaggttggtgctaccttcttaatgatgtaaatctttccatacttctgggtgtgtttttggtgccgaatagccatgtgctaagatttgctgtgattttatctttagggtgtctctgcagtccatgcattttatgagctcttgagccagagtagcttaagcgtgacacatccagaagtgaagaagcttgttgctccggtcgagctgtgcccaatactaaaaacactttataaaatcctaatcaagaggttggtcagattacctttgttgctgttcctgctagtactaatatatgtgtacaggcttaagttctttgcacatttcacctgcagggagcttgccactgactccattctccaggcaatacgagatgaatcaatgtatgatccacgggagaggattgagatgtctcagcgccagtgtctttaccgaccatctcttcttggcctacctaaagtagatattacccaggcttagatctattcttttttttttctgcagatttgttttgagatttgcaggattctttgatgtattctttgcatagtggtcctcaagatccttccttgtgtgccaagtgcatctcgtgttcgaacactgattccattctctactagagaatttgataatgaggtgttttggttttttattgtcagagttccaaatagtttcacgggctgatgccccccacatgtgtatataaagtacaaccactgttgattcaattgtattgttgctcctttagagcctgttcactttgatgccaaaaaaaaaccttaccaaattttggcattgccgaaattttagcgtagttgccaaaattttagcaacttgccaaaattttggcaagatttcttatatagtcaccaaaatttagtagcaaactaaatataatcactttttttagcaactttaccaaaatttagtaaggtttaaaatggcatcaaagtgaacaggcccttaatatatttcttaccattgcagggaacggatacctgctttcttttcttattacttatatagatacacagaagatgcatacgttcccagttcacctacgcggtggttcatgcgtcttccctgtaatcgaaaggaaaaaaaagggaccatctacaaaaccgctgcaagttttttaaaggaaaaatttttaaatctaactataatatataattgtaatatacttctactataactataatataagtattaaaataatatatgcaacttgatggcctgttctgattgtaaccaaaataaaccttaccaaattttagcaatgctaaaattttggcaagttggcaatattaacaaaattttggcagaatttattatgtatttactaaagtttggtaacaaactaaacgtagacacatttttagcaactatacaaaaaaaaatggtatggttgaaaataacatcaatctgaacagcctctatatctaacttatatagagattataatatagttacaatataactatagtgtaactatagttgcatttgatttttttttcaaaaaaaaaaacttgtgacagttttttagccattctgataaataactactgttcatggtttccttggcccatttacggactgtgaaagcaaaaggaaatgagaacatgaggcccgtttatcggtctatggctagctaatccatccgtaaacaacgttagccggctagcccaactaatggcccattgcgccccgtcaaagacaactttaagtgttttttttctctttttcatctactatctttgtgattaataaataatatcgttgacttttaaataacatttgagtattcattttacttaaaaattttacgtaaatatgctaaagtgtaagttgtacttaagttttatttaatggtaaaacatgtcacaataaattaaatgatatttatataatttttttaatagaacggatgaccatatgttatgtaaaaaatcaatgacgttacctattaaaacccagagggagtattagaagtgagcatgcatagtttcagcagtgcagaaagtaacaaggaaaacaaattaaaacaccatacgactactgaagcctgatttcctaataaccatctgatcatctcctcaggctttacatccaggtgccatcatatcccgtcttagcagctaaaacctgggaggaaaatccacatgagggacataattaaaaagtgatgagcaatgctccggtgctttctacttggagtattatactacaagtaaaattaatctcgaccgttcattttaaagggtagattagtaatctcctaatatatattaggggcaattttggcaggatctattttctctgtctcggtcggtcttggcttgatcgcatcaggtccgacgaaaagcaccgcatctcgcccgacgcacgttgcttatcgctactcctcccggcacgccgtggcgcggtgcggcgaaaccctcaggcgtcccctcctcccacctctcacctgtctatccgttcctcctcctctcctgtattccacgtcggcatcctggttcgccatcgtggccttctgtccgctgcgagtggccttccgcgcgcgtccgattccgccggagcccctgcgcaagacctgagattcttggcagcgcccactttggaggattcaatccattccgccggcgggtagtgatctccattccgtgttgctccgattgtgtgggctgcggccacttgggaggcagctgcgatacattccagcgccgtatccccggtccccctccgtgcgtgcccgagtcttgtggcttgcatcggcgagcacctcctcgaccgcgagcacggcatgagatgcagaatatgcaacagtgtcgctcgctgcgtgttgccgtggaaggcgtcgccggcgaacctgatagaccgcagtgctcagaggtttcagcacatccgtgctcgcggcggcgtcaggacactggatcggacgctgaacgatgcatgtggcatgcccgatctgctagctcaggatggtggccggcgactgtccgcacgctctcctgcgggcatgacttccacgaggattgcaacatcgcgaagtggctccgtgacaacaagaaggcctgcccagttcattctgcttgtaatattcagttgtatggtgtgtcgaatacttcattgactaattgacgagctttgagatactgatgtttattggatcttgtgactgtcccaatatattcattgttcagtaatggtttaagtaaaaaagaaaaggtgaatagtgatggactactagtaatgtcaatgtgttgaccatgtcagtgtgttgtgcattttttttgtgtgcaactgtgatggggtgagatgaatccaagcaatttgaactgaaatatgtcatcctgctcctggatcagtaaacaagttgttttgctcctgaaagagtgagactgaaaaaatctgataaactgcttaaatgagatttttcactatcagagttttgcccatatgtaaattgcatttcagtcagagctgtaattcaggatttgttttatatttcataccatcgaaacatctaactgcattctgtcatattctggcgctctgaatcatcgctacatgattcctttcttgtgctcatatgggggtagctaagccctcaattgccactaaattgattttttttcagtcataggacaatgtctactaatgggggcttagaacatcttgattcactctttgctgcaaactccctggtctactgtcgtgtttatgcaaaagcatttgcattagctccgcggcagcttgtgaagtcatgcacagtccctattcatgtagcatccaaacacctcattcccaagtcccttagccgctcgtacggtcgccggcggcgaccaaatgccaccgcctcactcgagctccgccaccgcacgtcgccggctgccatagctcatttcttggccaatccgagccgtccaccacatccccatactacactcgttcattcccagttgcccattcctcctacctcgccgccgttcgccggaacccgttgaatttcgtccgccgtccaattgcccggcgatctcctgtcttggtcaaagctacatggcaggactagtcgtccgccgtgggcaaggaccttcagcggcttggcgaagaggagaagggccacccttggtcgctggagggggaggagatgtcgatcgcgctggaaatgatggaggcggagagggagatggacaagcgacgaagtcaacgatggatggggtcaggcgcttgagaatggcgaaggtttagagttactgaataataatttacgataatacccttatatgaattattatctatggacaaatatacccctccacgtttctactaccactatgagtggtggtagtagaattagatctcaaccctacgattatatacgatcaacggctcggattattttctactataagtagaaagcaccggagtgaggcacaaaagtgattacacgttcgtcccatataatttcttcacacacaagctaaactagctaattattaaatgcgcgtgatcatcctataattgcacgacaaaattatctatattatcagatcggatggaaaatgaccggatggaaacggacgtgtccatgatgatcagtccatcaaactagctgtttcaatttgcatcgttttcacgtactcacgctcacgctcacgggccctcgcctttttcacagggagaaaactgaaaagaagagctcctggatgtgctcatgtgacgaaccctaatttaatccgacgcgttaaccccaaccaacaagacaaatgcacgcagagtcaatcgcccgatcgaaaacagcttcccgccaagcgcctgaccgatctctgaagcgaaagttgcaccagcagctagctatagctcatttaatcgtttctgcaagaatttgacatttttggggatcgagcagatgaaccttttttttttcctgatgttgtgtgttcacgtgggggaaaaaaacatttggtggggttgatgatcatgtagtgtagtgtttggagagccacagctgtcggatctaattctctcgtaatgtcggtcgcttgtgcctcgagattcatgatacgccctctgttcctttcgtttgtaacttgacatagttggccagtgtgatttttctttttttttttgcaaataaaacttttgaattatgttgtttttatattttcaccttattaggcaccagctgaccagcaacatgagatgatttgcctgccaatctgccatgtatatgttgctgacctgcctagtactccattcgtcccaaaacaagtcaacatcgtactacgatgtgacacatactaatacaaatatagagtatatccagatttattgtactataatatattataacttaatatgatattggtttattttgagacgaataatgtagttgttacgaagagcatttatcatgtctggaattgaattcctgttgcgattttacaactagttagcacacgcaaagttttatatgttcttatgaaaaatcaaatcactcgcagcaatccaaagctttacactgaaactactcctaaaaatctatgaatcgatacgccgcgtctgaatccgaacagctgccgtcttacatatgtcgggctgtcggctggattatctttggatgcaaatatataagttatctctgctgtatcagagagcaagccaagctatctatgttgtccttgcgtgattgtacaatctaactagattagattaaccaagaggaaaattgtccttcgacaagctagctcaccagcagcttaattagctagctccatctgcatcatgggcaatggatgcgttgcgtgcagatattctcaacgacagatcaaaacgaattcgatcgtgtggtagccaaaaagaaatatcggttttacactgccggaatatctagctataggacatttcttctgcaagtgaagttaatcaggttgtccaaaaaaaaaaggctatcgtggtcacgggaacagacgcctgtatctcgctgtctgaatttttcttttctgacgaagaacaaagagagagaaaaaaaacgcgagcagagtatgtggttttgtgaattgaggcgccgattttccgtgaaccatctactgtttactcaagaaaaaaacgcaagaagaacatgtttactctcactttcacctaacgccattccagagcaaaagcgtaattaagatatgtttatgtccttaaaataacagagagtgagaccagccgacaggccatcagttttattcttgtttaaccattcatgcagttagaaccagctggatgaatattcagatacatgttgttaccgtaccttgtaaaaaaattgggtttgtgttactatttttcttacatcgggttgctttcaagaagtgcttttctgaattctgggcctcgtatgtaaacgcgttgggggatagtatgtgggtgttcgttttcgtcttctcatggtgaatgggatatattacatttatttatttttgagattacatgtttgtcttttccaataccatatcatagaacttgataagcctaggatacaattggaaccaaggaatttttttttcccgatcgcctctctatacctcctcaaaaaccataaatcgccattataactcctttgattggtaccactcgtccactgtgacgtgatacctactgcatgtgtataagatatcttcgaggtattatatctgaagggcctaaataaccttgtttttgctttaatcttaatctagcagattttcttgtgcaactttatgtggagttagatttctaaagttgaattggatatacaactctaatgtcctatttcatcatagatataattgtattttatatacaacatattttaaaagcataattggatttatcctacaaccccttctatttttattggtacaattttgtattttatttacaaacatcaatcaatatcaatgttataatttgaacccactatgatctataacaatgtaaggctgttgtggttggaaacaaatccctcccgcacgtaaaatggagcgatccattagcgcgttattaattaagtattagttttttttaaaaaaaattgatcaatatgactttttaaagcaactttactttagaacatttttgcaaaaaacacacacacaatttagcaatttgaaaagcgtgcgcgtggaaaacaagttgagtgagtcggaaaaactcaagtgttgaactcaacctagatctttctctttttttccccgattaagatactcccttagttccaaaataagcgtagttatgagtttccgtgtttaactttaatcgtccgtcttattttgagatggagaaagtagtaatttctaggtctccaagccaacatgatgctcttttatatctttcaagataatacaaatgtaatatagtccatccgttaaaaaaaaacgaatataggactggatgtgacgtatcctattacaacaaatctggacagagacatgtccagattcattatattaggatgtgtcacatccagtattaggttagttttttatgggactgagggagtagtagttactccctccattccattctaaattgatctacatatttcataggtacaccaagatcaaaaaaactaataactctctcatactatatttactctagcaacaaactcaatgcatgcagcatccccattatttcttaaccaatagcaaatctaaatattgtatgtgggtaataaatacttgtgtacatggatgcatgtatcaatgtccatctactctaatccacaaataacgaatagacttaatgaatgaacacaaatatgtagatcatttaggaataacctcaaaaaaaatatatatgtagatcaatttagaatagtgggagtagtagataaattttttaagttaactttatctgaaaaaagtttgatcagagttgctagacatacgagggtagcgagagtgtcaactgctacaatacatgcacggcgaacaaaaatcaatgcaattagccacaaagcgagaatcgagaagctttctctgctgcggcgaggttaatttaccgtgaagcaaatggcgatcgatctgcaggttggtgcgttgcgttgcacctaatcagattagcccaggccaaatagtaatacgtggtacggttgatgaggatggcctctaattaatagtgtgtgttgacctcttgactatattatgtatcgttggaacttgggaaccgctgatgtgatctgtttttgcagtacaggcaccggctttggtgacctaatatttgtggtcgacgattcttaattatgtatggtagtacatacagatatctgcattaatactctttattagtactgtatcacaaaatttttagattatattcagcacattcaagtaccagcgaatatcaaatatagttagaaaaaggaaatttggaaaaggagaacgataatctatcttcaccttgtgtatagcagatttattcttttgggggggttggccgaagacaaggttgatcaaatttcataaagacaagaccggatgggatgagatttgattaaaaaaactgcctgtaaaaagaagtacatatgctactagtgctgaaatttagccattagcttcttttttttaaaaaaaaagaaaccttcttgcttccacatatttaattttagagaactgcaacatgatatagcatagacctcttttgaaatgcagaaaaaaaattacataacttttacaggaactaaacaatttttcacaaaacaaagacctttgaaaacctccattgcgaaaaaaaaatcatagtataattttcaatgtttgtttgcaccgtgttttggagggagctgagtgtccagtttgtccacggatgtaccaccaaacgtgtaatactgtgcaccgaaatgaatgtttgcatacgacacacatgacgtctgagatgtacgtgtcaaacaactcggtaaatggacgaatgaaacgtgtgcgcggtgtgccagacaggtcaaccacatgaaacttgactcggtgaatacgtgcacgtgtgaggtcacgtttttgtgtgtcccaaaatccacaaaaaagtaagaacagaactacggtctgctagtaaatgctgaccttatatgcatacatgcaaacatggtaggagtacacagcaacaagagacttgttagcaaggttagccataaaagtgataatgtgtgccagctcgattattttgcgactacgtggaagacgcacaggccaggaaacgccgatgcttctaaaatcggccatatctgatgttaggtttttgggct

SEQ ID NO: 22105 - DNA, 2325 bp, Oryza sativa
cgctctccgatcgtcgtcctccgccgccgccaaccgtcgtcgtccaccaccgagaccgacgtcctcggccgccgccgaccgtcgtcgagctctctgccaccgccgccgccgacccctccaccgcgcgcccgctccaccgccgccggctcctccaccgccgccggctcatccaccgccacaggctcctccaccgccaccggtctctgccaccgccaccggctcctccaccgcgagcgcggccgtcggtggcccctccaccgccgccagcccctccaccgccgtcggccacccctccaccggcgccggccgtcggcccctccaccgctgtcggccacccctccgctcgcggccgaacggcttcatcggccgatcgtcgtccacgagcgaagacttcctcggccgaacgacgtcttcggccggtcgtcgtccacggccgaacctcgtcgtcggccgttcgtcgtccacggacgacgccggtcgtcgtccacggccgaacctcgtcgccagcccttccttcgtcgtccacgaccgaagctcgtcaccggccgttcgtccaacacggacgtgcgtgcatgtgggtgtttccttttatatgtgtgtgcatgtgggtgtgagggggtatatatgtgtgtgcatgtgggtgtgaatgggcatgaggggtgggtgatatgtgaataaggggttatatgttgattgtgaatgtgaatttgggaatgtgggtgatatgtgaatgaaattgggagggtatgttcaattttgcaggatatgtgaatttgtcaaattttttagataacatgttggagggtatgttaacaattttttttaaaaaaatgtagaggatatgtttgccttttccattttttttagtcaacatgtcgatgaaataagtaagtcaattagtgcactacttgataataacatatcaaattttgtacaaatttgttttttagtaattaatttagcataatagtaagtagtcattagtttcgctatttaaatttgtttgtactaattaatttagcataatagtaagtactagttaaatttggaaatctcagagaatttaaatttgttcatacgatatattgttaatacacagtttatttttgtactaattagtttgtactaatttgagtaatttaaaatgtggacaacattgactacccgactgcagatggtgtatccgtacttggggatgcggtcgatcttgtaattctctggcacaagaatgacatatcctttggattgggcactgacgctggggaaaaacctgtgttgcctaaaccggggttgggaaaacctccgaggcctcctaagaggaaggtgactgataaggcggatgatctagagatgcaaaaggaaaatccagtgctggaagtgccaccggatattgcattgccggaggcagccatggagattgcaccgccggagacagccatggagatttcagtgccggatgtgcccatggagattacagtggcagaaccagaggtggaatttgtggcatcggtcgggtcagacaaagaagaagtaccaggattggaatgggacggtacagagccagagatatttgaagacccttctcctgcgaaagaccccgaggtgccacgagtgcttaggagccacgactccaagtccaaagatgcgagcaaggagaagttcatgctaaccgtcttcagagggggtaaggaacgtgccaagctcagagatgacgacccccagaaggcttctgaactagccgggccaacatacttcgcaaccgatgattgcccggaaaagtacgaacatgggaaagcactcttgccggaatgggcactgaaagaagcaccatgggagatgagaaggttacataacttctacatggaggccagcaagaaaggcttgggcaatataacagctcgatcaccggcagattgtttcggcgaagaaggttacgtatggctagatttctcatatctctacgccatatatcgtcgggataagatggatgtcaactacgtcggtgtttggtgcatgtgagtatgagttttaattaattagatgaaaaatatgtacaatacaaatccatgtgattgttactaacaaacttcttctataggatgcaatacatggatgctaagaagaaaaaagaacccatcgacttcttggatccaactcggatctgccaaacacagcataccgtgacgctagcaccagggtcagaccagctgaagggtaagaatccaaaagagatagcagaatacaagaagggcttgcacaaggagaaattgattactgtcgcacagtacattggacgagccttcttgcactttcaaaataagagag

SEQ ID NO: 22106 - DNA, 1149 bp, Oryza sativa
caaacctaataatgctaatatttaaatcacttgatattaagtgctgcttatgcttttcattaatgaacttttaggaggctaactatgcttccttgtgcaaataaacaatctaattgcaggagtatgcagctgctggtactgtcaagcaaaactacgtcaatatcctgctgatgcttttacggctcagacaggcatgtgatcaccctcacttagttcgaggtcatgagtctacttctagttggatgtcttcattggagatggcaaagaagctgcctgtagaaaggcagcaatcgttgctggtttgcttgcaatcgtgttctgcgatatgtgctctctgcaatgtaagtgataaaagtgaatgtgctgcctttttaaaccacacctaatatgatatcgtttctaccttcattctttgctctaacccatgttttgtgttattgttgcactgtactttgatattatctatccagctgtggtgtggattgtggattgattattttcaaagttggaatgcattttttgagttttctcagtagcacatagactgccttaggttactatcagaacatgagattcttataataggatttataagtgcattgctggggattgatcgtgagcttcctttcctggatgcttatacaatttctaaatccatagctaagtaccaaattatatcttgtggttagcatacaacatgatattatgtttgcatggctatcagcggcttgattttagtgaagaaataattctttgttgttcatgcataccattttcctagcatccacttctgattcattgatccgtacaccataaattgtgcaggatgcgccagaagatgccgttgttactatatgtggtcatgttttctgcaaccagtgcatactggagcaacttaccggtgatgacagtgtatgtccagtgtccaattgccgagtccgactaaattcaacttccttattctcccgaggcacccttgaatgtgctctgagtagatcaacctgtgagtttctgtctgatgattcctgtgaagacatggtgcaagggaagcaacctagatttgattcgtcttatgcatcttccaaagtgagagctgccctggatattcttctctcgttgcctaaactggatttaacccatatgggtgat

SEQ ID NO: 22107 - DNA, 717 bp, Oryza sativa
ggctttacctacttctatttgctaaaattattattacatatcgtactggcatgcaaagtaatatgaaatactcattcaaccacaacaaaatttgaagtacaattacatgatcaaaataatttcttaatgtgaaattcctgaacaatgtagccaagaatgaaaaggaattcgtcagtaactatagcttattgaaatggttgcttgtgactgaaccagcacaagggacataacgcatagtttccttcagtgacatgttcgattatgttctattgacttttttggagaactggggacatacttgagccaccaactgatgttctagctactcaacaacatttgacgtgaaaaaagagtgacaatgcgagaattttgatcaagtttaagatgtataaagtttatagctcatttttggggcctaattttcaatatctttttgagcggaaaattttaacttgaaatgagggctattattttactagtgtgatgtctcacgaatttgaagtttgaaaagtagaaaacatgatgatatgtagaaagaagcatgtgaggatgccaatcatagtttgatatttatattcaggttcatctggatgatgctctttcaaatatcaaacttcaactgttcgctttaattgcgaggcagcctgccgccaaccagctacgaactattgagcagcttggctatatagcagatctttatgtaaggtacgtagcaga

SEQ ID NO: 22108 - DNA, 779 bp, Oryza sativa
ataataagacctgtatgcaaaacagcagtgtccgtgtggagacaattgatgaagccggggaaaaacaatcatacttcgggtttattgaagaaatatgggaaatcgactatgggcacacaatgcaattccccatatttaagtgccagtgggtaaaatacccgaacggggtcaatgttgataagttcggtcttacttttgttgaccttgcgagtatgggtcacaaggatgacccttgggtactcgccaatcgcgtggcacaagtgttttatgtgaaagacccttcaaatttgaagaaagatatagtgctaccagggaaacaaaagatattgggagtggatggagttgaagatgtcgaagattacaaccaatacgatagtatgccactttatagtcagtttgtatagaagattaagaatgtcgagacatctactcagaagaccgtgaagccgtacatgcgcacggacagtgtgggcaaaaatgttaaagggtaatgattgtggagtggcatgtaagcatctaagaagtaattagttatgtaatggtcgtatgtaaggtgatgtgtgatcatatcgcaaattgatgaacaattgtactcaacattttgcatattaattagttcatactaatttttatgtgcaattaccatttgaagtgtaaaaatttagttaaaaaatttaaaattagtaatatttgaaaagtgtaattatttttatgtgcaattaccagtttgttaaaaagatcttcgcaggcggacgatccgcttgcgaagatagtaaaaa

SEQ ID NO: 22109 - DNA, 685 bp, Oryza sativa
cctgacacagcaactattaccgtcaacaaaatttataggatggataagatagtcaacagatggttttatccaactatacttatagagaaacacaaccctccactccagtttgcaaccttttacataatagcttattctcttttcgcaaatgttgatacttcccttttgcctgtttagcaccttaaattgttcggagttcctgttccaacttatgctgttgtcagaagagaataccctaaccaagagttaaagtactttgttgagcaagatgattttattgagatccatggaaagcgattttacaagccttttgtggagaaaccaatcgatggtatgttagtatcagctcttgatagaaaaaatattttcttaatggtttttccttctactagttcatgcctgttcttctgtctcccactagaataccaactatcattttatatctgcggaatacatgtacgccaaaacaaaaaaaaagaaagaaaaagaaaacctgcactaggtctgattgattaagcttctcatggaaggctgcttcctagtatcaactatgagaagtggcaggttacaaaagaaaattgcgagccttccaaaaactggcaaaatccattccgtattgtagggtacaactcaaaacacaaattaatggtccgattgggtggtgataatacatctttaatggaca

SEQ ID NO: 22110 - DNA, 1504 bp, Oryza sativa
aatatgcccaatatagtaattttactttctgttaatttgtccacccaatcttaaaaaggctggctttccagcacagagggagtaggcttctttgtattcctcagggaagactccaaatggtagttgtttggccgtcgtcggctcgtcgcctcgtagagatgcatccagggtttacattaccggttgaccactaaatttcgagctatatcgtatcacggttttcgataaatttcgaccaaatctactgtttaaccttcgaaattctaatcagaacttaattttgagtcatgccaaaacgtcgaaatttcacagaattcgaccagtttttgttggaattgtgaacgctggatgcatcatgattcatgtcgccgtctcccactctctcgctactgccaccgcggcgccccgcgcgtccagtgttcccatccctgcggagttgggagacaacgctctcgaaatcgattctctgctcgcatcctgccctcatccaacattccaacacaaggcacgcacacatacatgacagtaacttggcagctgcaaatgcgggcagtatgcacagcacgtagtcacgtatagaagaacggtacagtacgacacaaccaagcagataccagctggccagctcgagccttctcgttggtggtcaacccaaatgtagtaagcttttgtatctcttttccaaggctcgcctggcctggggcaggagaacccgagcttctccgccatggggatctccgccgccgccgccgccgcccccttccttctcctcgtcgccctgctgctgctgctgccgtcccccgccgcggccttctccttcacctacaacttcacctcggcggacacggcgcggtcgggcatcgcgttccagggcgacgccttcttcaacaagttcatccgccttacccgcgacgagcgcatcggccccatcaccagcagcgccgggagggccttcttctcgcgccccgtcccgctctgcgaccccgtctcccgccgccgcgcctccttctccaccgccttctccttctccatcgccgcccccgacccctccgccgcctccggcgatggcctcgccttcttcctctcccccttcccctccgtcctccccaacagctccgccggcggcctcctcggcctcttcaactccttctcacgcgggggcgcagcggcggcgcacccgcgcccgctcgtcgccgtcgaattcgacacctacaagaacgagtgggaccccagcgacgaccacgtcggcgttgacctcggcgggattgtctccgccgccaccgtcgactggcccaccagcatgaaggacggccggagggcgcacgcgcgcgtcgcgtacgacggccaggccaagaacctcaccgtcgcgctctcctacggcgacgcggcggcggcggcggccctgacggaccccgtgctctggtacgccgtcgatctgatggagtacctccccgacgccgtcgccgtcggcttctccgccgccacgggcgaggccgcgagctgc

SEQ ID NO: 22111 - DNA, 703 bp, Oryza sativa
tcggcggcggagacgaggtcgcggacgtaggcgcgctccagcttctccgtcgccttgatgatggcgtacaggtcggcgaggctctccaggagctcccgctcccgcttgtcgttccacagcttcacctccatctccgccgccggcgagggggtcccctagcctcccttccctccctctccctctccggcgagcgaatcgcggtgggggctagggttccgccgcgtcgcgcgagattggggaaagaggaggaggagagggatcgcgatgggggagtttaggaggtcgaagaattgcgaggggcttcgtgtaaaagtgaagcgatctgtgtaagactgtgttaagcccaacgcgtttgttttgcctttcttccaaagttattactcgacctctcgacgagaaccaaacgcaactacgaattgcacggcagcttctgtcgttcgtttcttccactgcagtttttgcgtcctctcaatagaaacaggctttgcggttaagctcagctgttccaccgcacctaagacgagctaaatcattaatgtataatttaagagcttgttcactttgttaccatttttaactttaccttttttttaagttataaaaaaaagtagctgcatttagtttgttgccaaattttagtaagtacatatgaaatcttgcgaaaatttgacaaatttaccaaaattttggtaaccttatcgaa

SEQ ID NO: 22112 - DNA, 2185 bp, Oryza sativa
ggctatctccgagaggcgctgggcgaggcccccttggttggcggcgtacttcgcagtccgcccgccccagaggcccacttgccggccggcgcggtctagacgggagacggcgtcccgaagcatgctgggccctacctcgcctgccaagcggagggcctcgacctccccggcggacgagtctagcgcgccctgcagatcggcgatggtgtgttcggcagctgcgaggcgagcggttaagtcgctttcgcccgcggccgccccgccaatctgtgccctcgcgtccagctccttctcccgcgcctcgagcacagcggcccgctggttcagcgcggccctctcggcgcgggcatcttccagaatacggcgcgcctgttcctcttgcgaagcctcgcggagggacaggctgtccgccagccgttgcgccgcggcctcggcctcctcgagagctcgctcccgctcggtgagcgcgtcctcgcggaggcggagtgcggactcttcttcggcacaggcggcttcgtgcaccgctagtgtgacctcccgaatagcaacggcggcctcgcgatccgccaggttcccctccacggcgcaggcacgctcttccagcgccatggcacgggcctcaagggcttcgtcgcgtcgccgggatgccacctcggtctccgccgcccgccgttctcgggcagcggcagcgtcaaggaccccctgggcggcatcgagttttttctctagctccgcctcccagctcccgtattgaaggcggagggagtcctgcgcctcgttcatcacagtggtggcgatgagggcagccccccgctcctcctccacctccttggcgatctcctccagcaccttccgacgggcttcgagctctgagacgtgccgacggtgtgccttgcggcccacttccaccatggcctccaccgagcgtcgcccctcttcgacacgcactcatgcggcgtcgagctctgcccgctctgcttgcagggcctccacctgggcacttaacccgtccaacaccgtcgtgtttgcgacggccaaggcctgcagaaggggttctgcgctcagtggagcaacagaaggcgtggggaagagccgtctcggtgaggatgccgcgcggctcggcccgccgatggacgtgccggactctgggatatcccccggacctagcttgtcctgagcgtcgcccgagggattgggcccaagcgatgcgcccgcggcctcgtcgcaagctgcctcagaagttgtcgccgcctcggcctggcgaagtctggcctcttcccgagcggcttcttcagcttggcgagcttggacggccacctgaacagcttcctcggcttctcgaaggcgatccgcggcctcttgccggtcagtttcacgggtcgcctcggaggatgtcgtcgcttcggcctggcggagtcccgcctcctcccgaacggcttcctcggtctggcgagccagggcggcctcccgagcggcctcctcggcttcccgaaggcggtctgcggcttctcgccggtcagattcccgccttcgggcctctgtggtcgccgggtcctcggcctcagactggccggacttggaatggcgggagggacgcgacgggatctcgctgaaacagaagaaagaccagaagacaaaacaagatggatgagtgaaaactcgcgttaaaggaatgaatacggccatgatgggcgtgggacgaacctgcgagggggtcggttaaacgaccaccttggaggggaaataaggtttccccgggatggttctgtcccccccatcttgcggggccgtttcttcttccgctctccctcgggctgcgacgtcggcgtggccccctccgggcgcctgctgctggcacgcgccgccccgccccctcggggaggagataggggaggggttccttcctgcttcctcttcccccgggcgtcggcagggtggccgctccccgggcccccgtcgcgaggcccagaagcacgaccccctcccggggtagatcgttcccccctgcggctcccacccgcgccatcgtggcctcgaggagcccgctcctccgacgccccgaccgcctgcatgatggtcaagatggaggcacggtctggatcactgcagagggggaggactccttgaggaatgagggatgcctccacggagctgagattcagcacccgttggaccactatcttga

SEQ ID NO: 22113 - DNA, 1279 bp, Oryza sativa
ttggatatgacagaggtagtatttagcaggcagctcctgtgttgtgcgggaactggggactctttgcgatgtctgtgttgcctggaaagtgtgttattgccttattggcccattcgcccaaggtctagcagtctgagctgatttttttttgtgtggaataagttcactttgactcccttaactggcgtccgaatctgatttgtatccttgaactgcaataccggatatcgcggcccataaaaccggtgtaatttgactccctcggtggttttggatggtggtttcgttgacgtggcgtccacatggcagtgttgacctggtctataacgttgatgtggcgcttaggcggcattagagttaaaaacatgtatgtaggactcatttgtcattcacacaaaaaaaattatggagcccgctgacatgtgggccccacatgtcagcctccatctatttcttcttccttcctctctttctctttctcggtagagagtgacacgccgtcgtcgccttgacggtagcggtgggggatgaatgagatgagtggcggaagaggaggtggagtcagagggggaggcatagtgaggtggaggagggcgcgggtggtggggatgggcgaattggcggtgaaggtgtgggcatcatcaacgccgaagccaagttgctaccacatgctctgaggcggtagaagctggtgcaccgaaactccgcgacggccggagcgatggcagcgacatccaagtggtaggggcgtggctccgcctgcacgacgacgcgccactgcttgttgacacagggcgccatcgcctgtcctctcacctgacgccgcccttcaatggccgagggggaagagtgcgctgatagaaagagagagagagggaggaggaggaataagggaagggaacagagagaggctaacatgtgggcccacatgttagtggggcccacctttttttttgtgttaatgcaattgggtcgcacacatatttttaaaactataatgccacgtaagcgccatgtcaacctcacgtgaaagtaagattgggtcaataccgccaccgtaggcgtcacgccagcgaaaccgctcttcaaaaccaatcagaaagttaaattgtaccagttttaatagttggggtcgagatatccggtattgtggtttaggaatatgagttagattcggcctctagttaagggagttaaagtgaacttattcctttctgtgttgctcggcgttcttcgggctggtccacaaactttaacacaaagtccggtccatcaactt

SEQ ID NO: 22114 - DNA, 560 bp, Oryza sativa
tatatttgaagaccaagccaatgatgtcttccatgtgttctgaaatcattgcatgtgcacgcaagaggcttaaataataacaaaatgtgcttaaaacaaaatagccatgttagttataattaaagatagaagctgaccatgaccagcatcagtgagcctcatgctaattgaaaaaaaaggagtattgggcactgtcactgccctccccggccgacaaattcatagcccatcctaaagtagtcaaaattgagcatatttcacatgtagaaagaataaactagagtgactatgagtagataagggaggcaaaagagttgtacagcaatcaactggtgaatgtacttgcctagttcctttatgatatggaagatggatccctcgccttcatgctcaattaagtgactcaaataatgggaaggaccttctttgtaaaagtggatgttaggtgtaacaggccatgatatgtttaggtaatcgccttcagatatcgggatagctttgataacaagctgcacagcaaatttcatgtcatctaccatcacacacacacacacacagat

SEQ ID NO: 22115 - DNA, 763 bp, Oryza sativa
cataggataataagctagttttaggccttgaacagtagtccttcaatatgtactgtcatttctgatgtatttcagggatttattcttaatatttatatattaacaaagaagaaaaatagttagtaaaccaaactgtttcctgccacaaagaatcaatacggccctaggaaccattgtgatcatgcaggatttcaaaaggaaaacattaactataggcacatctgaacctaggtaaaaagctcttgaggtatccataaaaggccccagtgaacatatattacattaaggcaggaaaatcctttagctatatgctgctgtaaaatggaataacttagatacgaacaacataggtgtagggatgtacaaggcgccaccacagaacgacacatcctattctctcccgtccatcgaagcagctctatcaaaaggccgatctcatagcaccacgagctgcctcacgtttcatctcagcagccttcccacttccacggaaatacatgtatacttgctgcatttcaaacggccaagttcagaatgacatctcccaggagaaaatgaagacagcattgcagcggaaattttattgcaacaagaacaaaatcttaggggacagcacattctagttgggagtggagacatcaatgcaaatagaaatgtatatattctgaaggcacagcatgacgcatgatgatgaacggcagaatgaaggagtgttgctgaacagacaccaaggtgttactatttggctttggctaagatcaag

SEQ ID NO: 22116 - DNA, 697 bp, Oryza sativa
aaacgggagatggtggcttctgcatttggggaagacaaatctggtgcccatcaaactagattgacggtggaagacttgaactatttgtttatggtttagcatttctcctgagattggacacaattttgctcgtgggatggtgtaacttgcatctataggtgaaatatctgtcaggagatagcatttctctaggcgtctagtgtttctagtttgtacaggtgctcagattttgtagttaaaggtggcattgtggtgcgattcattttttctccgtgcaagtggcaactcatcaggtaatttttcgatgagctgcagtggtgtcttttgatcatgaagatacaaaggagaacgtcattagctaacgccatatttgtacatagttttcaccagcaatcttaactcatcttgagcttcgcatttcagccgtatggttgtacatcataaaccatgtaaaagattaagctgaacttgtcttcgacaatttttttcagttgatcaaacatgatagtttatggggaatgaaatttgctcaaaagttctaatgaatgtgtggcatagctcatcactgatgtgtgtatgtaggccaagacgtgtgcattcttttgttctttcaagtccctagtcatccttgtacagtttattttagggggaaggggggatgttggtggtgagggttgagatgaggaagtcggtgaag

SEQ ID NO: 22117 - DNA, 565 bp, Oryza sativa
attttcagctccgcgagattcggcggcgcgctcccggcggcgaaggcgaccaccttgttgtccacttcaatccagctctgccccggattcttcctcaatccggcctccttcgtcatcaccctcaccttcttggactcgtcccacatgccacacatggcgtacaggttggtgatcagcatgtggttgccggtgctctggtcctcggattgcaggacattggcaatggtggcctcggccatggctgcatcaccatgaatcctgcaggaattcagcaatgctccccacacgcacaggtcaggtctcaccggcatcgtctcgacgagctccgacgcgtcccggagcaagccggcgcggccgaggaggtagaccatgcatgtgtagtgctccatggatggggagatcttgtgcgctctcaccatgcgatcgaacaggcggcggccctccgtgacacgcccggcgtggccgcacgccgacaggacggcgacgaaggtgacgccgtcgggctcaaccgtagctccggccatgtcggtgaacagagcgagggcttcgtcgcacaggccgtgca

SEQ ID NO: 22118 - DNA, 655 bp, Oryza sativa
tccccgcggggtgtttatctagaccagtggatcccccagtttttaagttttaagaccttaagggtatacctcatgaattcattaatattttccaggctcagctgatcgaacagttaagttttgggatcttgaaacttttgaattgattggttctgctggacccgaggtacttgctttacacatttttgtaataccaggctaattgttgcgtatgtttaacacaatattttggtaaaccatagagacaaattataacaatcattattttgtacgcatgcatttgatttcgttggtgcccatgttttacatccattgtctcctttctatttagcaccactgtaacttcacgaaagatgtgctagggataaattttgtttccaatccttaaaaatggtttatgacctcccttgtcacatttttcaatgggttggttcttttagagatttttaatggatgcttttacatctagtttaaactttcttaccctgttccctgttgttcctgtattcaaacatgcatgacgggtaaatgcatctttctgttatgatattctttacattcttctcttccaggctactggtgttcgctctacggtctttcacccagatggaaaaaccctattctgtgggttagaccaaagcctaaaggtaaatct

SEQ ID NO: 22119 - DNA, 586 bp, Oryza sativa
tggaagaatctcctgcctcgagtttgtatcatgagggaagacttgagtatgcatccatccccacaatcgcacaaaggacggtcacaccatggtggaaaccaaccagcaaaaggatcgcttcgccagttgagacgctcaaggaatggcgcttccattttcgtgtgttgtgtgctagtgggaaagaagatatgaagaggttgccttcagattgtcaattatatagcgtcgttttcactgcaatatatgtgaactcaatgagatacattattcattagatgtgacaagacgatcacgcgtgggcgtgattcactttatatcaacaggcagcgccgaaagttgatagtgacaactcgagctgccgcttttcatgtgtgctgttgtggactgtgcgcgctactggatctgacactaccgtgaagcgccgaaagtgtgttgtcgtgagcataagttgttctagcaccatatgaatgaaaagaactatgtagacgagacaaacacaagtccagagaagtcctcatttgcccaatcagtggccattacatcaccttcctcatcggatgatgcgtcgtcgtccgcttcctcatta

SEQ ID NO: 22120 - DNA, 719 bp, Oryza sativa
gtggatcccccgctttttattgaatcaagctttcgtgttttcaaatttacatgacacttcctttcttttctcttcctgaagtgctcacatcatgttctttcaattcttcttcattttggggtaaacttccacatgcataattgtatacaaaatttggaggggttgtaatcgataaaagaacagggatatatgatgcattatagttgaatttatctaaatttgttctttgcacatcaatgtaaaatcacttaatatgacattctttttgcagaggtatgtaaaatcacttattgattcgaaactggagaagtccaaaaatttgtgggaggaatccgacttctattgggcagagattgaggcaggaactctccagtttgatagaggaaggtctgaggtaagtgctctgttttcagcaaatagttaattgtttgatggtatcgaatataatgaaaacaggttattaagcacaggataacttctcaaagaaaagaaaagagttgtgcgatatacctcttttgcaggtatctctcctaagagagctcaagaaagaagaattcatcgaattttttgatcagtacataagaattggtgcacctcaacggaagacattaagcgtacaagtcttcggcggcaaacatttggcagaattcaagaaggctattgccgaagctgatgcacccaaaacttaccgaatcactgacatattcggcttcaagcga

SEQ ID NO: 22121 - DNA, 749 bp, Oryza sativa
tccccagcatgcagggagtacacaatgtcaaaattcaacttacgtgcattaggtaccacagaagaagaggaacctaatggtcctaaaccaaaggtaagatgcaggcgatattacgctcagatacatcatggacatgtctaaaaaaaaagatacatcatgaacatgcagattgcagaaaaggggatgatttaattgccgaaatcgacagtcccgcgagccagactagcaatgcatgggcaggagcatggtacaaagtacaagaaacaggcgacgctgggcgcaggcagcggcgaggcgcatgagccggcattgcatgcaggtccagtcatgggagcaagacgccacaaccaaagagatcaaacaccacccgtgcaccgacgcgcgcgctgacatgaaatcaagaacaacgagacaaacaagcaagcaagcaaaaaggacgtggtgtactgatgatgcacagtggcgagcacggaccttcgcgacacccgggcgtgcactcgcagctgacctcgaggtcgccggaagcgtagacgcggaggcggcccacggcgtcgccgtagcggtggctggtgcacccgcacgtcacctccacgaaatcctcgcaccggcgcaccccgctgacgtcccgcagctcctcctcgctgaacagcgccgcgccacctccgttcgccgccgcagccatgcctccaaccaagaacagcaaacacaccgcaacaactcaaaataaaacagcgccagacgggggatcc

SEQ ID NO: 22122 - DNA, 584 bp, Oryza sativa
ggttagtgtcatcaaatcgaacaattaatcgaccttgatatctttctgcaaagtacttgttcaaagagtgcagccttggcatgacctatatggaggtaaccactgggctctggggcaaagcgaacacacacctctcaaaattttgcaccagggagatcaacttctggagctgaaggatcctttgagtcattaacctttttcttaaggtttggggcaggggatttcccaattcctcgtttcccaacataagcagctataacctcatccaatgtgtctttgaagtctgaatctatgccattgaaccaacggacaagattttggtatttctttgatttccgtagactctcccatcgttgaccaatccctgaaagagaagatatacatcaattgttagcgcacattatgaagcataggagaagcttgagagtagaaacgtgaaagaggcccatggctcaccagccagatttgaccatacagtgatatcagcaatcgtttaaacatgacccaccagaaaggtccgagacatccagtatccatccaccaatgagcaggcacctccaattttgatccttaaaggaaagtgg

SEQ ID NO: 22123 - DNA, 1178 bp, Oryza sativa
gcgccacgcgtgtgggttaggtgagcacagcggggctcacctacccgcatttatagcgggattggacgagcgcgccacgccgcatttaatgcggcgcagcgcacgcttatccggtccgcgactggtcgcggtgtgtgaccggtcacagaccggtcagatcgcgggttaggtggcaacaggcggcctgtcacacgcctcgccccgtcccgtcggaatgatgagagcttcctggctctcgtccctagccggagccggcgtgctaactcctggagttggtatgtcagtcccggtcagatccattccaggcttcaacgcaagtatggcaaggaagtcgctggccattaaatgaaggttgaaatgggcgtccaccggaaaagcgggcgagcggggcaggagacgtgcgctctgcttgtcagaggtcacttccggctgtagactagccctcattgtaaaaagcatgtttcccttcttaggcagctagaggcccatgtggtgacccctgaccagataaaaaggaggcccaggcctaggaaaaaagaaagaggagagaagaaaggaggggagttgggactctggcaaagggtttctagagcctgaacttctttcgctctcggcctctctgtattccttcacacacagatccaccagaacacaggagtagggtgttacgcttctcagcggcccgaacctgtctacgtcgcccgtgtcttgcgcatttcctctctcgctgacgttcctcagatcgagggcgaagaatctcacttagcgcccccggccgaatcggcaaaggggggcctgcgcggtctcccggtgaggagcctcacgctccgtcagcatactataacactgatagatatattataataccaacgaatcgatttttttaaccgccactagcttgtatggtgtacagtacacgcatgtaatcttctactctcctcgataaggggagagaccgagagaggttttcgctggaattatcgtcccccgtttcactttgtgcagttctgcgagcataacagagtttttgttaactcggtgaagtttccaacgaatctgagctttcgttatgcaggacttgacttggacatctttatttacaattccatgaaaatatcgaatttttttcgtttttagattttttttttaatatttacagaaataatctatcgaccaaa

SEQ ID NO: 22124 - DNA, 784 bp, Oryza sativa
tgggcctcgcgtcggcgctgctctacctccacgaggagtgcccgcagtgcgtggtgcaccgcgacatcaagccgagcaacgtcatgctcgacgccaccttcagcgccaagctcggcgacttcggcctcgccaagctcgtcgagcacggcagccagccgcacaccaccgtgctggccggcacgctgggctacctggcgccggagtgcgtcatcacgggcagggccagccgggagtcggacgtgtacagcttcggcgtcgtggcgctggagatcgcgtgcggccgccgccccgcggagctcgacgaggaggacccgagcaaggcgaggctggtgccgtgggtgtgggagctctacggcaagagagccatcctcgaagccgcggaccagaggctcaatggcaagttcgacctcgagcagatggagcggctcatggtggtaggattgtggtgcgcgcaccccgaccacgcgcaccggccgagcatcaggcaggcgctgaacgtgctcaagttcgaggcgccgctgccgtcgctgccgcccaagatgccggtgccgtcgtacttcccgccgccggacttggtcgctccggtgtccgtcgaaggcacgtcgagcaccgatggcccaggcgtcagtgagtgtggatcgtctgggtccaatgccggaggaggatcggggatcaatgataggcttctcgatccatgagcaagatttttttggggctcaattcatcaactgtagctatgccaaaaggttttctcttttttttttccctttttgtgtctgatttt

SEQ ID NO: 22125 - DNA, 654 bp, Oryza sativa
tattcagaattccagataattctgtagtatcattttgaccagctactggaaatttctttggttaacttttaggggcttagaggtgtaaaagcatataccaccagcaaatattaagtgatgcttttttagtttttattggcttgaggcttgttgcaatggatgctcttctggtttaatgactttcaaatttggaaattttgaacttcggatgaaaatgagctcatccttttttttactaactaagattaatatctttgaaattcaggttcaggtttgcatacatttgttctgtatctgggccctcatattgccctcttcactattaaggctgttcaatgtggtcggattgatttgaaaactgctccatacgataccatacagcttaagcaagggccatcatggctggacaagaagtgttcagattttggaccaccagtgtaccaagcatcggctcattctgtccggatcccagtctttgaattactccctcaggttcagctggaagctgttctttggggcattggcacagcgcttggggagctccctccttattttatatcacgagctggtaatatggcataacgcttatttcttaagtaaagaagcttagctatatgctttacactttctcacgtctcagtactggtgaaccta

SEQ ID NO: 22126 - DNA, 693 bp, Oryza sativa
catcacgtcggccgagggtcactcgggcaaatccacggtggctctgggtgtcctcgacgccctgagtcgcgtcaccccgcgcgtcggcgtcttccggccgatcgcgcgctcgaccgccgagcgcgactacgtgctcgaaatgctgctcgaccacgacggcgtcgacctcgcctacgacgagtgcgtgggcgtcacgtacgacgacgtgcgcgacgacgccgacgccgcgctcggacgcatcgtcgagcggtacaaggcggtcgaggcccagtgcgacgcggtcgtggtgatcggcagcgactacaccgacgtcggcagtcccgccgagctcgcctacaacgcccgtatcgcggccaacctcggggcaccggtgctcctcgtcctcggcggccgcgcgcaacagggacagggtgagacgctgggactgtcggtcgcccgcaccccgcaggaggtcgggcagatcgcggccctcgctctccccgagctgctgcacgagcgtgccgaggtgttcgccgcgatcgtcaatcgcgccgatcccgacctgctcgacgaggtcgtgtcctcggtgcggcacgtcgtcgacacggccggcgcaccgcgcagccgacggtgccggcgtgggcgctccccgaggaccgcttcctcatcgcgccgtcgatgcgcggagtgctgcgctcggtcgaggggtgcagg

SEQ ID NO: 22127 - DNA, 614 bp, Oryza sativa
agctgcacgccggcctcgacgacggagagcgacggcagctcacgacgctgctgcggcgcgtggcgttcccggactgagccccgcgcgtcggcccggggcgtgcgccggcccgccggtcgggtagactcgtgtcggctctccgcgcggcggcatccaggccaactcccccaggacggaaacgtagcaagggtaaccaggctctaccgggtgcgcggagagtcttttctttgcccgcggatccggatgcctcgccctcagcggcgcgcgaacggcccgtcgatcaccgcccactgcagcagcatgatcgtcttggcatcctggatctctccgtcgcggaccatctgcagcgccgcgtcgatgtcgtactcgaggatctcgatctcctcgccctcctcgaccaggcctccgcggtcgccctcgcgcgacgccccgtcgtacgcggcggcgaagaagtgcaaccgctccgtgactgatccggggctcatgtacacctcgaacaccgggtgcacctcggtgacgacgacccccgtctcctcctcggcctcgcggcgaatggcggtgatcgggtcgtcgtcgtccaacagcccggccgcggtctcgatgaacatcccgtc

SEQ ID NO: 22128 - DNA, 650 bp, Oryza sativa
attttgcacttctcccatatgagtgtaatgtgaaacagaagaggaagaaacaagagaaaaatgtcagtgccacatattttctttgaaagggatcagtgccacatattagtacctaccgacaaatgttagaggaacgttctgctttgtgaccgtgttgatatctgatgaacggttattccttacaaaattgatgttctgctccacagtgtagttatcaaacatgctgttatacaggttatagtaatgcacatcgataaccgcaccaaagagactgctggctactgagagaaactccgttggatcccctgacattcgagttgacaggattacataggcttgcaaagtgtattttcttacagcattgtatgcgtcttgatagtattttgttaatgtatccacaggtacatctggtgccagtggttcgttgagtaattctattgctaggaggcttgaacttttggcatatctgcattcagaggaaaaaaataagttaagaacatttcagaagttctgttagatggattgagcataatctgagtacagttgatttgccaattttttattattgacctggatgcaaggaaatctatgacacccacagtttgtgcgatgtttgcagcagaggtgccccactccaatgagccatccct

SEQ ID NO: 22129 - DNA, 538 bp, Oryza sativa
cttgctgcaccttggtcccgaacctgcacttcctggtgaggaggctccacgatctcctcggcttccccagccgccggatctcctgcttcatgctcatgcactccttctccagctccgacaccctcgccttcacgtcggtgatggcctcggcggggagctccttccccttcccctcgtcggcctccgcgtcggcgtcggactgcccggccgccgccgcgcccttaggcacgatggcgctgccccccgggtgcggctgcggagcgccgtcgccgcccgccgccgcgttgccggacacgaagaaccagcctgcgatggacgtgcggaggcggagctgctcgaagaagagcacctgcaccaccacccgcagcggcaggcgctcgttctgcgccgcgtgcgtgcacgcctccagcgacagcttctggcagttcatcagcctgcacagctgctccctctccgactccgacagccacgggtgcgactgcgtgcatggacgccgtatcatcatcgtacgtgtgttgatcacgagatgaaatcgaaa

SEQ ID NO: 22130 - DNA, 763 bp, Oryza sativa
tttttatcggccggctttccccggtactagttgttgtctatgggaagaagctagtcaaagaacatctcagttctcagaataggaggccccccccagtgaagccggggaatcattggacctggggggtttgactaaaaaacatctgggtctgcaagggtatatcgaccatgctggtgtttcatcctaccatgtcccatggtggtgtttcatgcattgtttcatcctcctactccttggagttatggtagaagtcgacgcaggtctggcacccgcagtcggtgaagcggcagatctcgcacccgaagcacacgcacttcacgcagccggtgcacgacgtggagcgggagcagcctctcagcaccttgcggctcgcgcgctcctcctcatcgccgcaggtgaccctggtgggatcaatcaaggttatatatatatgcaaatgtacacaagaacaaagcaaatatatgaaatatggaaaaccaagaaatgtcaaactgaggatggaaggaacacagaacaggtaacggtgcataaaagtacactactggtcactaggcaaagcaatgcttcttttttaaaggaaaatttaatgtaaacattgcagccaaatttagaatgcatgtactcatgttactgaaggaacagcacccttcagcgatcctagaaaattttccctacatgctactgaatgctacagggatacagtactgaatgtgtcctgtggctacaggccgcatgagtacatgaccctgcagagatctggaag

SEQ ID NO: 22131 - DNA, 2161 bp, Oryza sativa
agtagaatggaatttttggtacacaggccattttgcaatatatataggttttgcaatgaatactcgctatggctttgagaagaaagttagcagcctcaccagcactccaacagttgtaaggtggtgtttgaatacagaaacttaactttagcctatgtatttagacactaatttaaagtattaaatataaactacttacaaaactaattatataaataaaagctaaattgcgagataaattttttaagcctaattaatccataattagaaaatatttactgtagcatcacataggataatcatggattaattaggttcaatagattcgtctcgcgaattagtccaagattatggatgggttttattaatagtctacacttaatatttataattagtatccaaacatctgatgtgatagggacttaaaagttttagtcccatctaaacagctataagatgattggcaagagtcaggaggtatgtggtagatgtaaaccattagtatcacattgagtatatgggatatgacaaatagagaatatgttgaaaagaagcttacccaatacccatctttacaagagatttagggcgtttttttttgggggggggaggggtggagagttgggagtacgattcactaccaaataaatatgcatggcacgaagtggtgaagataaaaccatacttcaatagttggaggacacaaccgttaacctagagagtcggctagcaatcatcaaagtagtccttcctacatcggtttcttcctctctttttctctcgggggaaattgatatgtgttaggctactttgaaaagaaaaacttctcatacatatcataatctcgcatataccctcgaacaaccttacgtatagtttatacaaaagcccaccatactattatagcaggatctaatggttgcttctcatatttatatttatagtcccaaaaaagacaaaaacatgttagaagagaaaagaaaaatatatctttcatgcatgagtaaatacaagatgatgtgttttgtaaacaatctagacatatgctcagaccatcttaaaatacttgcatgagtacactcaaagcatacacctagtagaaataaaaataatgatgagtagtaattttacagtagggtaacttggacttcattcgttcctgggagatccgggagattgagagagaaaaacatctcgttttccgcgcgcgcgcttccgttttttgcaaaaaaaatttctataggaaagttggtttaaaaaaaccatattaatctatttttgaaatttaaaatagttaatacgcaattaatcatgagctaatgactcacctcgttttgcgtatattcccaatctcctcaatcactttctcctcaaactcaccttggtataaggtgtgtttgcaagagcaagttcccaatactctcctctcgttttccgcgtgcatgcttttcaaactgctaaatggtgtgttttttgaaaaaagtttctatacaaaagttgttttaaaaaatcatattgatctatttttgaaaaaaaaagctagtacttaattaatcacgtgttaattgaccgcttttttcgtggataggagatgggttcccaaacacccacctccaaacacagccataagcacggaccaaaataagcgaaagcacatatatgatggtgtgaatgggcacttgcatccctccttgataacggaaacatcaaaacggttggtattcggtactcccaacccaccacccttaatctccataaatacggtgttactcgagagttggcatgagctggcccatagatgccaccgcaaccggtatgaacagtggcagtgtgcaaacaccataaaacctcagcttggcctaccggccgccgcccgccccatggacagggcctacgacaagcacaaattgattactctatccgacttgtttggtaggtcgaggagtcaatgtgccgtccggtgggaggtcgctcgcgttcgcgggcatcatcaggcagcgaaaaaaacgactttcccgatcccaaatcctcctttccccttccgtcttcaggcgagcccacacgagcatcacgccgcggtgcgctgcaagcctgcaacggaataatgcaaagcgaagggaagcggacgcgcgccgcgtacgggccgcggggcgtggcacgg

SEQ ID NO: 22132 - DNA, 1410 bp, Oryza sativa
cctatatcctttttcctgctcaactgagaaccgacagcttttgctgccaacggtgatgtccaagccttctggagatcttcttggcaatctctagcttctcgcgcagccaaggatcactggtttcagctccagaaaaggcatggcttttgaagattgtcaagaaatcagtatctttcaagctttccagaggaaaaattttcttgcagtcaagaacagctggaagtgcattccggcgggacgttactagaattttgcttcccctctgcagagaagctataggagctaacagttgctcccagtcccactctgtctcacttttggattcgtcaaaccaaacatcatccaacactagcaggaacttctctgattcttgcaatatgtcccttaatttgcactgaagggtatcgagattgccaatacgtgggcactcgccctttccagcggactcaatgatctcttgcgtgtgacgatgcacatcaagtttgcgcgagatgcagacccaaatcctggcatcaaaatactgagccaccctttcatcattgtagacatgctgagctagtgtagtttttcccataccaccaactccaacaattgccagagatgagtaccacctagccatgctacctccggcattcacaggcttacagagaatatcaattatacgatcacgatcctcgtcgcgaccaacaacatttgatgaggaaaaggaagtggtggtgttaggcctgatgggtgctgtgaccataagttctgtcgaattgccagcttgtatgccaagctgatcgtgaaaagccttagcttccaccaagatttccttcagttcttcgagcttgctgattagcttcctgttcttagggcgcaaattggacatcttgttggatgcagcatgcagaggctttggaacggaattagaggaggcaaccatcaacgatgcttgtgcgcctttctctgctacacgcttgaggatgtcatactcgagctcatccagcacatcttcagtgtcatagaaagctgctttcagtttgcgcagccacctttcgatcttgcccttatggggactcttctcggctgcttcgatcaccagctgaaactgtggcaggatggtggcctccagttcttggagctcacacaccatgtccttgccaaggtaggttgaggcgcggttgatgaacttggtgatgatcggtgataccacccatcctaaggcagccagcgctgctgcctccgccaaggaaccgtaacagatgttcccttggtttaatagtctcgtggctgctgcttctcagagtggaaagagcagcacatgaccaaaggactttctggacttcaggcctataatcaaagaagcaaaagtgagagatgagaacctgggagttatcagagccaaggatgaagattagtgctctcaaa

SEQ ID NO: 22133 - DNA, 2063 bp, Oryza sativa
ggagccgctgcacgctgatcactgcatttggctgtcaactcatctaatctcttccaaagctcattgaattttttctcctggttctgattgcacagcctcttgaacatgttcatgagctccttgttcttgaattgcttgaagaaattagctcccatatgacgcatgcaccacctactctgtacatcttcccaaacaccggggtatcctcgtttcatactcccaaactgcaactcttctatcgctcgctgacggagcgaggggctcctcaccaggagaccgcgcaggcccccctttgccagttcggccggggaccctgggtgaggttctaagctcccaatctgtggaaggttcgccagactggaaacacacaagacacgggcgatgtatacaggttcgggccgctgagaagcgtaataccctactcctgtgttttggcggattcgcgtatgaagaagctacaaagtgcaagtcagcccccgattctcctgggatcgttttttcctcctcctcttttctaagtgggcaaggtcctccttttatatctcaaggggatcccacatgcaccatctctccctccctttctttcaacttgacttctcttcattaatggacggagatttgcatcgctgccatccgaatcaccttctgacgggacagcccatacctacctccacttccgccggaagcaggcgcgacgtgggagatggctgtctgctgacgacatgaccattgtcagaccggtcaccaatcggtcattcttgtccatcacgtgtcagtttaacaatctgcatgttcgcccttcttcatacaacatcttgcctgtaatggttaggatgaagcctggtatatatctgaccggaaccaacgtgtcatctccaggagctaacacgccggctccggctagggacgagtgcttggagactctcgtcctgactggacggggcgaggcgtgcgtcagaccgcctgtcgccacctgacccacgatctgaccggtctgtgactggtcacagaccggataaacgagcgcgctgcactgcgttacacgcggcgtgacgcgttcgtccaaaccgcaataaatgcagttaggtgagcgccactgtgctcaccaaacccatacacgcggcgcaaaatccacaaggggtcggggcgccccagccctcggggccaaggcgggagcggtccgaccccctcggggagacaaagaggagggcgaacacaccaccctcgggcccgacgccccccccccccgagggtgccaggccacgtgggcgattgtgtctacctcaagcctctagtcacgatactcccggtcccatgtcatcgacagtagcccccggcgttatgccgaggcgattaccctcctcgagggaagcggtcgggcgtgacgccacttcctaaggcctggtgacaggtgggaccggtttccacagttgggcagaaacccaacagtcgcaaatcacgcacatcggcaatggttactcggctgtcaataatgaacggtctcttcaagactgccacattacgcgcgaatcgggacgtgccggttcgttttgcctggagatatggtgatggcgcttcggtcggcgagcgtaattaacgcgcgcacgagatgttccatctcgactgccacagccgcatatccacctcatgcaccgtaaacgggcgaatgggataagtggaagagtgggcgcgagaatcgagggggcaagatagtgggcgcgagaaacgaggagccgggcacagcgttggcaagggtataaagtcgccgaggaagagatttgcttcctttctctcgccattattccccttgtcttcgccgcttgcgccctaactccttgtttcatgtgccctaccttcgccacacgcgctcgctctcaaacatctcttcttccggcgtcatggcacggggctccgctccgcttgacggtagcgtgctgccgccttcccgcatcgtgagcgagagacaggccgggctgctgcgccgcttcatgccggaatctgcgaccggccaggagatagtctcgctgggcgaaagatgcccggcgccacgctacccggggcgg

SEQ ID NO: 22134 - DNA, 1692 bp, Oryza sativa
gagtgatacccctgacatgtgaacgtggtggggtatggtaggtacgcctgattgaacttagcaattaacttaacaatacgataagatcgatgcaacgtacctgacgacggcaccacagagtacccatcgtagggtagtcgacctctggtcgctcctcgtacagtgactcctcgtacgcgtgctggtccacctcagggcggccgatcgcaatcctctcagctgcctagatagaaagaaagagagggcacccaccaaaggtcgcgctgggatccgtcttcgtgcaagactcacaaagtgcacggtacagagccgccaacaacgcggaaccccagctccactgaggcacctcgcctaccgcggcgtcggcgatgctcctggcgtagtgcacgagtcccttgtcgaccgcgtgcccgtgaccgccatagaacatcacccagccaaaaagccagagcaagtacgcctccaaacatcggctgtaggagtactcgtcggcctccgcctgtagctgctcaacctgcaagccgtcgataaaatgttaggcaccttaactgcggactaaatatgtaatacgattgtcatttcggtacaaaaacactcacggtgaactgaagcagccacctcttcgtaggtccggtgttgcggtggtgtgccaacggcttgagcgggaggtgcggtgtgcgctgtactagtgcgaaacgtgccgtcagatcgtcctgccagtccacagccgtggtcactggcccaacagcgtctcctgcaagcggtagccccaacaagtacgatacgtcctgtagggtaggggctacctcaccgcacggcaagtgaaaagtgtgcgtctctggcctccatcgatcgaccaaagctgctaggagggacctgtccacagtccatcgtctggccgggtccgcgtcgccggccgcagcctccaccagccgacacatcggtaggaggccggcctcacatagcctgcaataacaaattaatatgtcattataaaaaatattacagtgcaactaacttatagtaaaacactgttcgtacctctcgacaaaggagtcgtgaaccgtgagtagctcaccgcacgttcgtgctcggaacgtcccaagctgagccccctgcaccgcagtaaggtgagaccggtgtcggtgatctatcgccgggtccaacaactgaggtgtatcctgacgtgccatctctgaaaaatatagtgtttcgtgttagaacaattcaaaaaatagtaatgtaaaacaaaagataacttgcaaaattataaaatagtaataaaatcatgagattaattatgtacaacaagagtacaggctatttaaatatagcaaacgttactaatagtacataacgatgacgtgcaatttaacatatatgtagagttcaataatataacataacattacgtgtcgaagtccgacatacatcagcatacctaaagacgttaggcgccttagtccgacgttacatcacgagacctaaagacatgacatgccgaagtctgacattacacgacgaaacataaacacatcgataagttcgaaacgaattacaagcaaatccacatgccgacatagaacataagaactacaccacgtagccagacgtggcacgacgacgcctaggacgtggtcgagtggaggtagtgccttcacccgtagggcgagctccatctgctgctgatcc

SEQ ID NO: 22135 - DNA, 4598 bp, Oryza sativa
ttgttaggtattctcttgggagccagtaagatgtcatgacgttgttgacatgggatggagcaatttggctgaccttagtatttatgaaggaaaactcttgggatgctcctaccacgaatgccgagttggtgtttgggttgctgatatatcggtgagttttactttttgtctcataggatgtatttcttctatggtctaatcaatatctttcatccagctcattgggccctatgctcttggtgttttgcccaaagcaaatttctttgctgagctggtacattctttagacgacaatccttcgaaaacgattgataccactgccaagtccattcctgctctagcaacgacacatccaaaaaatctgtacaaggtcaaggaaacagggactggtactgcttcaaacacccatttgtctctcattatgtataatgtattgaagtacctttacttcgatacttcacactgatgctctctctctctctctctctctctctctttctggtagtagctgaaagtggaattcgtggctcaaatttgactccagcaagtatggataaaaccaagagagataagagtggtgcaactcctcgaagacctgattcttctttcaaatcatctattcagagctctactccaatgaggcgcatgaaagctgctgatagtccatacacaaatagaaaaacagtggagcgcaattttgcacagagggatgcctcgctagcatcccgtacgggaacagctaataattcttcaactgttaaaaaaggccatcttgctgagtcagtatctgtaaaagatatttacactacaccacagactgtttctgtgcctgtcgttatgcctagagacattttagaggacaaaacagcaggcagcattagtggaggaatcagagggagagctgcagttgcagatgatttccatgctcctgttcattcaaggaaactttcagttaatagttttgtgggtgatagtgttaactcaacaaaatccatgctaactgatcctgatgtttgctctgagggtttctctggcttaaaattctcttttggactaactccatattacaagaaagaagaatatgataatgtggataaagttgatagtatggataaaggtgataatacacaaatgacagaaaaattggacagaacagtgtcgttggagcatcaacttcagtcaaatgatagtaagtcttagagatcctttcctacattctaagtttgcactctgcagttctgttcattttggcaaattgacgatgaaactctttcctgctacagcctctgagccaccatgttctactacagaaacaaccaaggtcaaatatgtcagaggaggtgtgtgtacgttaagagattgtctcggtatctacttgtgctaaaattagttctttaatggtacttttaactccttttgcagttgctgtgccattaggaaaaacaaagtctcttgttgagagatgggaaaagagagaggctactaatgttgagtgctcaccaccaactggttcttgtggtgaccgtgcagtgagatctgatggtccttcctccttttcagtatgtacccataattttaagcccaattaatttcaaagcaatttgaccttattatctggttggttggtgcattcatgaatgcatgaatgtttaagaactgtacttactattttcctaaagtccttggtgataatctcaaacatttttcttaaaccaatttatctttctgggacatgtcatacatactcattcttgcatattatacaatgtaaatttctgtattcgtttttccccttactgcgaagtacattctatctggagatagaagtagaagggataaagtattgttagaaaccagattgtcataaatcataatgtaatgttttgtggacttaagtacttctgggagattggagtattttcagaaataaaatcagaatatgggctagaaaaatatgactttacctttgctccatttttatttgttcatgctctctagcatttacgaattttttcggtactcaaatcattatattttgcaatggttgtaatggacaggcagaaccaagtcaggcatatgagaaggacttgtcaacaattgatgaggcgatgattccaatcaatttgatgcagaaccatgatgaatttataaatgccgtaaaatctcggctgacaaagttagaggtgtgtcctgtctctgatctttttacttgcggacttctgtttgttaccagctcatgtgcaccatagaattccttccttgaccttttgtatccaataaacagggaaccaatcttgcatgccattgcatgatagattatacatatgatgaagctcttctgtgttctttaggctattcagtacagggaaaatggcttatcgttgttagtctattgagtacaattagacaacttagaattgaacattacctttttctttgatacttgcgttaaatgatttattggcattttcttaaagacaattggtgtggacacacctataaattgaaggtgaagtcagctctagtgaagattgttgatcaatcccgcaacaccctaaaattaatcagctagctttgaatccattatttctgatagcctgatataagatgagagtgatctacacttgtatgtaaattatgcattggcatgcacttttcccaccatctactaattatcctacaagtggagagtggggaatagtcagtgaggaaagcatttgaaaactagtaaaagttgcatatatcatagccatcactccatcagcatatgatattaatgttaactgtcttcagatgatgcgtcatgtctttgaccaaaatggtatcaaaggagcgattgctgcagtggcaaagttgcctgacaatgctgtaagtattctcaagatgccgtgcgatattcttggatgtacatgtacttcatattttttagctgctaatggtttgacccttttttttacaggttctagctgatgttgttagtactctgaaggggaaacttgatctcttcaacctagacattttcttaagctttctgcctgttcttgcggggttactgaccagcaaggctgaaaggtgatatattggatgtctctattccattgcatgttggttcttgtctgactggaccaagtgatacatagtaacttaagcgcacatgctctgtgcacacatgtagacacaagatgctgctgttaaattgaattgtctatcctcttgttagtctgttcattctattgcaagcaaggtcatggatctattttctttacaaaaccatggagatattggcatcttacattagaaaatgtttggtttagtagtaactttgtcttatggttactttgcctttaatttcaatttgtaggcatgccattgtttctttggaattgttgttggatcttataaagatctttggaccagttattcgttcaacattgtcagctcattcagcagttggagttgatattcaggctgagcagaggtacgtgcattaatgttattcaagggaatgctatttaaaggacgccgcaaaacctgcaaattgcaaagagacactggatgtgaggtgacaagtgggttctgtccctgcacttcagttaggaaccattgttttaaagaactgcagtgtttgtagcatcctataacctattgctctgcctatgccaagatgaactggactgttgctgacttcgttgatgtcacaggttgcaacgttgcagtcggtgttttaaccatttgcaaaagattcagcaagttctacacccgttgattatgtaattcctttccttcccctccctgtatgagatgctttatcctttactttatcagactattgttttcttaagcttgctgacagttgttcgtgtgcaccatgttgtttatttttgttgctacccacgtcatttgttggagctacctttcctgacattctgtgatggtttcatattttgctggtgcaggcggggtggtcaatcagcacaacttgcccaagaactgaacctgtctttgcaagacttggtggtgatctgaaacaagcggggaggttcattcatactagtacaacacagtgagagtagataactagacatcattctttttggcaaaaaacgcgccagcgccatacagtttttgtagcttgttgccatagctttgcaattgagctgtgtaattgtgttttgacttggcttttgattcggcgtagtcccctgttgtacatgtgagcttggctgtgcataatctgtaattaacatttgttacatggacagccccggatgagggagaagcaagttcaaaaatggttgatgtcagttcaacgtggtgattcattctcttctttcatgtaatgaaactgttgcccgtgtaatctggaatctggtgataattcaattcaccatcaacgaagtggttgaagttttgaagacagagtttggcacggtttgaacgcattacccattccccgtttgacttcaaattcaaaccagctgggtgctgatgactgtcttgtcatcatttgattatttcctaagccctgtttccttcgttcttaagaaaacactcgtctgtatgtttttttaccaattctgggggatccactagtctag

SEQ ID NO: 22136 - DNA, 1633 bp, Oryza sativa
aataacaaagtctcaaagcacttttaagtcatagccactaagacactatccagtgctccaatgttgctgcttaaataaaatgtatgtttagttaaataaaataacagaacacttacgccagagactttcctttgaaaggaaatgggggagccacagcagaccagatgcagaacagtatatggatctgaaagggggcaaacactgttagcactgcacggaatatctgcaattttgcaaccaatagtgtggcaaaccattaatcttatactagatcattttaaccttacagttaccagaaggtaagggtcttaccaagtaaaacaggaaaaaccatccaacttcaaagcactctcagtcctgcaacatacattgtaacaatacactatgtcaaatataagaagaaatagtgtgcagaaataacaaaaacacaagtatattcacaacctcatcgcattgtaaagggggcgataccataacacataggctccaggtacaccagatataaagtagataatggctagcaaccagatcataacacctattgaattgaaccgcaggattagtttgaagtgtcagtgcagatggcagctgatccataagataaatatatagtaaggtactcagtcagccatacctgcccctttaatccatgctgctgtagttgcaattatgttccagaaaagacatgccgccaatcctgcatgacatcaaagtttgcacaataagaagcagctttgtagagcaatgctacaccaacatgcaaataggtactagctctcacaaccaaaattcagtccactaaatagtgcttctttttacaagatgccaagtattgttagcgttgctttgaaaatctttttacagaaagacatttagcccagctacaaaacagggtagacaccacatgcttatgcttattaggcttacataattactgcaccaagaagataataactatttttctcaaaagacacaggttgcaacttctatttttttaaaaaagaatctcttaattggatatataagtcaagattagagaagttcattgatatcaaaatgtctcaaagtaggcacgtttttctcatgtcactactcacttctggcattgactcagcagaaattcattgattggacagtaaatgtagtgattcaggcagtattttattcacaatgtttaagcaaaaggatataaagaattgtggttccaccaggtattttagttcttgtgacagctttcccaacatgagggaacaaaaagagagttaaaacttaaaactaaaactaacacttacccaacaatgaagaaaatgcaaggtattgcatcctttgtaggtggattggtatctcatttgaaatgtcatgatgaataataggaagaagggtgcccagtttttctcttcaatgcccatcccagctgaaaaataaaagaaagagttgaaaggcagaagccgcaactaaaatggaaaatagattgcaccagaccaaacataagcgcaaaattagcaagaatagccttttcaagaaaggcgaacacaatgtactccctccgtcccaaaaaacgaatctacgactggacgcgatatattctagtataatgaatctagacagagatatgtccagattcgtagtgcta

SEQ ID NO: 22137 - DNA, 2034 bp, Oryza sativa
gaaaagaggagatatctagatgaaatcatttgataatgttagtttgcattagcacgctggtatccttctgtttatctaaaaaaacagccatccttcttttcaaagtgctataattgagtgtatagatatccatgttttgttcatcatttcaaaccaattgtgcaatgtcaatgattcaattaatggttagatcagcgaggtctattgggtgccggatctttgtgtcaaatccatgccagctaaatatctttcacattgcataatggttactagttcaatactcaatactaacacaatatataggtgcttcccaatacatcataggaaaaaggttaggaattaggactttggccaggggaagttgacaacttgattcattagaatagttttttacttcatcaaacattggttaaaaatcacattgctcatgaaaagatcaattgaaaattccaagtttcaagcataactacagaaggcacatacgctttcccgtttgtttagctcagcctcctttgcctgcagttctttctcctttttcttcatgtcctgaattacatacgaacatactcaatgcataagcaaccaaccacaaatacagcaacaaaagaatatatggtatcaaacatccaaaccaaggaatagtgaaaccatcattactagattaattgtgttcttcagccttttaaagagataagataacaaaaaatgaagcatgcaactgttgttacacactaacagagtaataatatcagagtgaaagagctaagtacagtatgattttctcacgctgaggtacagaacataacttgtaaatatagtagcacgtagtattaccgctcaatggaaatacaagtaccttggttgaatcaagaggtatgtccactgtggcaccacgatcattatagaacccaggttcgtgaggaagaggtggcatccgagagttggaagctggaggtacacttccaccctgcagaacagggtacatttaaaaatgaaacaaacagatagttgaaggaggctgctaaaattagaatattcagccaactctgttatccctttttacgcctattggccgaaagctcaaaatttgacagtttagaaatcctagatggagcatgtgcacgcatacgcacaattcacatgattatggactcgctgacacgtgcatatccagcaaactgagagtaaactgactgcaggcttacgacactaaatgtttatactggcagagacaatcttcaatctcctaatgttatagacgatctgaaccaaacaagtgtgaactgccccattttacggatattttccaataattctaagagtagaccgaccattttcacaagttatacatatcgattgcaccacatattccctcgtaaaaccagaaacataacgtcccaacacaacctaagagccaattttcaatccgagcatcatttctcctatgaaaatgtataacaatacaaggggaaaagttgccacgcctcgcgatcagctagcaaatagacaagcaaaaaaggccgtattcgcgccatccaagtccaaccccctaacagcggatcctaaatcactaaccctagcgccaacaactcaggctgatccaaagcaccccacatggcgtgccgcgtgcaggaccagacgaagcggccacggccagaaaaccagcacaacacatgccaatccgggacgcagctcgactaccccatccacacaggcgcgaggacaagcttctccatgcctagatgaagcaaggaggaggcgcgattgcgacgcggagggggggtttagccccccgacccagctacagcctaacccagcagctcaccgcgaaggggttgacgtcgtcctcgtcgaaggggttccggtcgtacctccccgccatagctcccctccaccccaactcctcctcctcctccggaagcggccgcgtcggtggtttctctctccggcgagggaaggggaacgcgcgtgacggtggcgaccaactgctccggcctccgggcttccgcttttacgtaacctagtgggtttgga

SEQ ID NO: 22138 - DNA, 2458 bp, Oryza sativa
gacagaagctgatttgcagccattcaagtgcttcttccttgaaggttggctgttcttcggattcatctatcctgttgttccctaacagaagaaaccatgtagggtttgtcattcgggttgagctcggaccacctgatgagccccgtggggatcctttgctgagtccggtgacgcacacaccaaaatctacggctcagcatcaaacctcggtcttgtgccgtttccgtggaggcagccgatggggattaacggtttgtcaagcggactgcacatcttttgaggcccagggtagcagtcgtcgcggcttcgccgcagatccctgtcgacttgctcctttttctgatgttaggttatttcaggaaggttgctttcgtagttcagttaaccctcctttcttaaggatggctcttttgcttggatatgtaatggggtttattccctagatctgttcctgcttaataaagttgatgtgttttcaaaaaaaaaaaaaaaagccgtggagtggaggagagaggaggccatttctgggaaaagggaaaaggcctgtggcgcgcgggccccgcgggcgctgaggctgacgaggaggagggttggctggcggtgtggacgtttgtttacgaaaggcgcctgcacccggcgtgttgcagcgcagcgcagctgcggctgcagcatatgactcgtgtgacatcacgagccaggttgttttcgtcgcgttcctcgcatgcagtgcaggcttttgctagcagcttcccccgccgtctcgcgcacgggagtttcgccgggcgcgcggcccggccggccggctggctcgatcgtcttctgcgccgagcgcctctccatcccgcgggtttccgccgggcgaggaggacgcgcgcggggatcgtgcacgcgagtcgcgcgcggtggagtttgcgcggccaaatcccggtaatcgtgggtgactcggtgcgggtgtgcgtggtgatcgactgatccgcgctagggtaggttggacgtccgcgcgcactcgatgtggtgtgtcacgcattgggggtgtgctttggtgagatcgctgctaacttcctggcacaaaagaataaatcgtggtagtgagaagtgtaacacgacgtcctaacaagtgtcggaggtagcgcgagctgtaccccttcgtggtagtgatacacggcccaacattgttgtgaccgcattaaatattaacatataatcagcagttttgagctgcttaatgatgagtggagcgcagaggattggtgtggtagtatgagcatgagccacagaaagtgctgttgtgtgaccgcattaataagccagttttactcctatactactccctccgtccccaaaaaagacaaaccctagatttttgtatccaaaggttgaccgtccgtcttatttgataaaattatgaaaaaaaataaaaagacaagttacgcataaaatattaatcatgttttatcatctaacaacaatgaaaatactaattataaaaaaatttcatataagacggacggttaaacgttggacacggaaacacaaagtttatcttttttagacagagggagtatatcagaaagtaaatttagtacttcctccgtttcacaatgtaagtcattctaatatttcccacattcatataaatgttaatgaatctagataaatatatatgtctagatttattagtatcaatatttaatacgagaaatactagaatgacttacattctgaaatggagggagtacgtctgcaaaggctgaatcacgtgcttagatccctgacccctcacgataggagaagctaggcacatagtagtggactttttcatgcatgcatgcagaaggagctggcagggtgaatgaagcaatatcgcatgttcttcatgaatcatgaggcaagataatggaaccagaggactttcaacttgggcagcaaattgatggtattgttattgtgtttcacgctaactcgactatttttttaatgtaatcatttgacatacccttttttttcaaacataatggaatataaatacccaattacgacaaaccggagtgttttttataaaaaaactttaaaaaaaaactacgacaaactggagttcaatccatcaatgatgagctcaaaagcaaggatctgattaaacttactagcagtactactagcttttgactgctaattgtgccgattagagggcaaaacacgtgccaaaacctaacccaataattgggcaggagtttcgttgcggcccggaagcacacacataaagattgattggtcgatcgttcgatctaaacaacccgcaaaagccaggccggagaagagagcgacgccccgggccgcacaacccgacgcgtagccgctctctcgcccacccgcgcccactggggcgttgctatagctgccaactcgaaaacaccccgcgagtcgccaactcgccaccgcgccgcaagccacaacagac

SEQ ID NO: 22139 - DNA, 655 bp, Oryza sativa
cggagctgcgcggccaggacatggcggacaatttctcctggtcctacaaaaggtaccgataatttcataacaggaaggcgattcatcaatcttgcccgccttatcgtcatcgtccatgatgatgatcacgcgtggttatattgttcggtgtttctttttgcgttaattcctaaatcatttttagcatgttcttgcttacccgatagatttagcaatttaggaatgtttataattgattcttgattaggaagtacaaggctgggtatatatggcaggacctgatgatggacgacgacctcatcacccccatctccgacaacgagtacgtgctcaagggctgcgacgtccggcgagccaccgaatcgccaaaggagaagtcgtcttctttaggtgcggtgatatttttttctggtcttctttttctcgttcgacgatgacgatggctcgtgattaacaaattcacaaaatttgtttgtgatagctgaagagccaaagaaactggacagtcaggaagtgaaggtcgcgtgcgatcagaagcaagtcgaggaggtgacgacgacgacggcgccagattccgacgagagatcgccgaagacgctgccgccggtcgacgaggactcgcccggcgagccggcgagccgtagtacggcgccgt

SEQ ID NO: 22140 - DNA, 1585 bp, Oryza sativa
aaaatagcgcgatgccacctgacgaaggaggacacgacggcggtagtgcagcgccactagaggaagatgaagcattccaaggacaccagcgggttgtccagcgactccttcccctcgccgtcgccgccggcgctggcggcgtccgcaatgctgggctcgccgtcggcggtcatggcgtcctcttctggctgcggaggtggtggaggcgggggctcgagcggagaaggaggcgcttcctgcacccgccgcggcgacggcctcaccgggacgggcggcttccgctggagggacggggctgggctcgcggcgcggcgctgctccggtgtacgcttcgctgccggcgacggcgacctccgcactgagcggtcccgttgctcgcgccgcggcggaggggacgccgaggcccgggcgctgcgggagcggacgccgtaggcggcggcggcggcgcggtcgcgccgggaaatggcatgggccagctcgccggagacggacaccgggcgcttcctcctggccggcttccccggcgaccgctctggcccggtcaccgagctggtcgcgacggacgactcggacgccgcctcggacctatcgtcggtggcgagcgacatgcagctaccaagatcgctcaccgtgacatccgcatcggcgctaggcttcggcgcctgcttctccgcctccggctcctccaagacagccacattggcgacgggcttcgcctcggccctgaccttagcgctcggggtctcggagagcacctccttgaccttctcctcctccggcaacggcggcgggggcggcgggtcgcgggcctcggccggcggcttgcagcggcgggagaacacagctgcactggccagctgcttcctgcgcttcttgctgaagcagcagcccatgccttccagctgccaccggcacactagctaggcggccatctccggtggtcgagaccagcgcgaagggtagtgtggttggttgtttgtgtcgggaggaggggtcttgtggctctctagtgtgcttcgatttgggcgaggtggttatggcgatgcgaggggactgaaactgaaggactagtgtgcagcgagtgagtggcaggttatttatgagtttgatggtgttcgcttaaaatggtggtaataggtacagggtacagactacagtacctgtgtaccactctgcctgatcgtaatcacacattatgcattctgtgtttctgtttggtggagtggagacggtgaaagcctttctgaagcgggtatctttggaagttctagcaaggcagtaaaatcattcggttgtgattttgtgaaggcaccgttgatcgttatggatagcaccattatcggttcagataaagatacacgtgtaccgcccaatgaccagtacgagagtacgagtcaacaaaccaataccgtaccgactcgatctagagccacaccgagtcaccgacgcagtcgtgtagccatcaggccatcacccatgcttcgtaccgtagcagcaagcctactcatatcacgttgatgtggaaatacaacgccggcgagacgaaactgcccctgttcctcggatgctaccacatcctattcct

SEQ ID NO: 22141 - DNA, 17752 bp, Oryza sativa
  unsure (1)..(17752): unsure at all n locations
aatgaagtagtagaattttttttcaagaacacatactttttttaagtgtgaaataaataattcgttttaactatcaataacctggtgaataagcttaaaagtgggccttaagaattgcaatcataagcaaacaaaagttttcgagtgcacttgtcatgtgtcaccaaaaaatattaaacgttgtgttcttttagtttttccatttaacgcagcacatatattcatttcacatagcctttgtggctttgtaacaagccgaaccatctctaatacttcatccgtttcacaatgtaagactttctagcattgctcatattcatatagatgttaatgaatctaggcatatattgacggtcgttatcgatcagtttcgagcgtcaatattaccgaaagagagaagaactagttatgcttgcaatgcatatttgtgttagaaaaataatattccactagtattagatttactaaccttttcaagaataacaataaattggagaagaatcgacatcaaaacagacgatcaatcaatcagacgatgtcgaggatcagacttatacatgaatgggccaagaacttagaaatgacacgtcgaaacggccaaaattcaaaagtctatatagaggagcagaagaggaggccacctgccgaaattgggccaggaaggcccggcccctggttcggccgaacccgaaccctccctggcatcgttggatgcagggtttcttctggacggtgtggatcactctccaatgatggttggagggcaattccgaccgttccaactgccacaaccgtcattggcagcctattcaaggagttcctcttctcacttcctcggttcctccacacacttcaagcgagagctctctcatattctctcaagtttagtttagtgttcttaagctagtggagtaggaatagaatagaaatcagagtctggaagtcttcgggtatggctctggtagctctcctttcctcttttgtaagctttgtactttatttagaatactcttctttgtacatttttggtattgaaatacgttccgaatatatgaatgccaactttactttatgttcatgttatactgattatactgctagcttatctggaagatgcataggtacgggtataatgtttgctattgcaattactctatgtcatgacgatgatattagagtagtatctggtagtttaggcgtggtgtctagattattattgggtatcattatttggggttatatgttgcggatgagaggtgggccgctgatggtgaaagctcagtacaggtattcctctgcgcgtgtatatagttctaagttaatttcctgggaagggtactcctccgtatttagccccgtatggtcatgacagattgtcgtaaggaactcggcagtggggtggcttctcgaagtactaggagggcatcggaaagagggtattagctagttaatcatataactagaatgtatgtatactatgtatatactagaagtataggaataggttcttttctattttctttccacttaggttagataatttagtatgagaataagtagacttatgcttgtgtgtcatcttaccctttgaattatcttaacccctgcttagactatgattattacaactaacatataaactattagtacggttctctctactatgatcttcccacatgattaaataattacgatacccttggaatactctcgggtgaaatgctacaatggtatatccgtgcgcttacggataaactctataaccataatataccaggagtatttctgcgccattgctgggaattatatttctagtaatatcgttaagaaataccaacagtatatatgtgtgtctagattcattaacatctatacgaatatgggcaattgtcgaggaagtgatcctctctagcaggagatcgtgggatccccctttcgtgagttcggccggggggaaaggcccgcctctggaaatcacgtatccgaccccaaggctgctagctagcgtgtaaacaacaagattatacaagttcgggccgctatgaagcgtaataccctactcctgtgtatggaatttagactgagagttacaaaggttcctaaactccggagagcgctctcgcttcccttctcctagagctcaggttttctgagagccgtccgctttctcggtgggcaaggtcatccttttatacctcaagaggataccacatgcactgcctctaactactcttctatcgggtggggacccaccctaccttgaccggatctcgacctgtgccttcgcctggaagctaagccacagtttgtccttgagtggggcccagcgccgtccctcgcctgacacgggggacagccttgtcattcccttattaatgggtaaagacttgtggtggccgccctctcatggggagaactgcgaatgaccctccgatgggacgggtcatacctacctccactccgccggaggcagatgtgacgtgggggcacggccgtccgtgcagtcagacgtgaccggcgacagaccggtcacagatcggtcattcgtgaccgacgcgagccagtcgggcacgccgcacgtctgcccctactgcatggaatgcggcagggggcagttggggcgctgcacgcattaaaggtcgttcagcctgggcccgctccccgcttgctccccccgccagatggcagctgggcgagggcctcggggcaaagcggcgtgagggcccgaggggtatgacgtggcaccccgaggccccccggccgctcctgtgattcgcggggtgcgggggtagggctaggctgtagggtcacgcgacaggatgggaaggtaaattcccctcacttcgcataccccgggcccatatctccgacagtagcccccggcaccacatcggacgttggcctccagaggtcggtctgacgtggcacctcacgacttctcaatctggggttgtgggcccggcggggaatctaagcggatgccgccgagcggccaggttggcgtattaacaataacggcgatttgaccgtcactaaccgcgctgatgatgggggcgcttaaggcgcgaaaatcgggggggggggtcggttggaccacacctcgactccctcgcccgccacgtatgcgacggtactgatggcggcccgcctagattgcgcccgtgaacgtcgcacgccctactccgagtgtgccgctgacaggcgcactaaatgcggggcgcggattcagtgagcgacgtgatgagtggtagcgggaaacgatcaggcaactgcaggcgcaagaattgtgggggcaaccgtgagggcgtgaaacgaggaggcaagcgcgggcgaggcagggataaaaggatacggtggcggggactttgcctccttcctttcgccaactacaagacacatcttcctcacgtgtaaccacgtgccacataccaccacggtatacgaacgtaagacgtgacatagttttcaacccatcctagccatagacaagagtaccgacccaaccccacctatggccggaacctccgggacaggtaggcaggactgagcccctagcagcaggacaccagccctgtgccatgacatctcgactaccgagtgtcacgccctgtagttcccctcccttgctctaaattcataaaataaatcgtccgaagaaattgtttaatttaacctagagataaatccctaattaataaatgcaaataataatcggaatcgacatgtggaatttttcttggattctacatgtcaaaatatgctaacaggatttttagtggaattttcagaaccttggaaataattttaaccaattaaaataagcaaagtgcaatattaaatccctgggaaaatcctttttcctttttatcttttcttttccctcctttttcctttttcttgggcctggcccattccctcccgcgccggcccgcttcacctcccccgaagtccatccaacctcccctctcctcccgggcgccgacaggtggggcccacctgtcggtcgtccctaacctccggcagccgccaccatccgccgccgaaaccaccgcccacgccgccgcttcctttgcatccgcgccccactccgcgcccacacgttcccacgtcaccgccccacgccctgccctcttccgtccgcgcgcgcgcccgcacggacgggattcgatttgaatcctctccccctctctctcctcctccacctcttcacgtcgtcgccgcggaaccgccgttcccgaccacgtncggnctcttcacctctatataaccgaccaccgcgcctctctccacctttttcctctttcgccgtccactcccgagctccctatcgccctagcaccgggcacggacccgccgncattattttcaccgctccggccgcctctagcagccgctagggtcgccggcgcaccccgccatcggcgccgcgcgtccgccatcccttgagccgtcgcgtccgccgttcgctcggccaaatccgtcgtccgagcccgtttctccctactccggtgagcttccaccattgccgccgccttcggccatggtttccgctcgccgtagactccctctctccctctaatctctctctttccctctcttagggcaacccggagcccgtcgccgtcgtcctcccgtctctcgtcgttgccgttcgccgtcgctcctccctcgcgccggccgagcccctcggtgaggatcggtctccctctcttcctctctctccctttgccgcgccgcccgccgcgtagcgccgccgctagggccgctcgcgccaccgcttcggccgccgccgccgtctttgcgccgtccgccgctgcctccgtgcgcgcgccgccgccctcgccataaccggccggccggcttgaagccgagccgagccaggccgccttccccccctttgtgacgctgcccagtgggcccgcctgccagccgccctctctccctctcttagtgccgctgaccagtggggcccgcatgtcggcaccgccccacccccttgctgacgtcagccctgggatgaattattgcgcaataaattgattaagggtttttttttatagtaataaacacagataatcttctaaaaatcataactaattcatccgagctccgtttaagcccattcaagtctcagtaaattcataaaaatgtatagaatccattaaaaatggttttgtttcctgtttcagtagtcttatagcatgttttgcttgtgtgctttgtttgtcgcgtagatttcgcccgtttcgtcgtttcgcggattctcgaagacgttgctgtggtctcatcagtgcgagagcaaggcaagtcatacattgcaattgatcatattgtacctaatatacaaatgtcccgcatttctattaaatattacatttgttttacaatatcatgtgggatgggtcctattactcagccatatattgcttaccttatgccattgataacgtgggtattaaaatgactagatattggtttaggagatgcttagccatgcttagttcaactagtgcacaaagggggattacattaaagcatagacttgattattggcatagctttgatttagtgccaccgtaatggtgttggttaattaaaatacacgtcatggtgggctgtgggtgcatggtcttgctagtcacacccatggcatttaaggaccggttcgcgggatgccctggaagaacttatcgtacttaccacaagccagcgtgggcaaaggctgggcttgtagtgtagcttttctctagccgacgtacccaggcgagggtgggcgtgatggagttgggtcggccggggtgtccggttgatcggcttccggattcaccgcgacacgaaaggggggctgcccgttgcctgctggggacgggggcgaaccctaaggtgtggtgcgatcggttagagagggttatgcgaagggtcctgtcacggcctctttccggtatgtcgtggtggcatgtcggcgcacgggaacgtgtcgtggggctgtgtcttgtgggtacagttgtacacctctgatcagagtaaaactattcgaatagccgtgcccgcggttatgggcggtcgaccagattcaccgtgattagtttcaccctagttagcttttagaactggttagttcaggtggtggtttgggcctgttgcaacgtggtgtaacgttggacagtgattggttaatatagattaattactacagctgttttactgctttcaactactgcttgaaatgccggctttatgcaaaagaaaatttagcctcccttggatatatcttgcatcatacctcctcttccggtgtgacttgctgagtacagtgggtagtactcagtcttgctctcttttcccccacaccagagttgaagtccttctcagttgaggatgtctcgaagaggttggtttcgtcgctgccgtcaaggatgcctgtggaatggagtcgcccgctgcagaagtcaagccttcaggcttagctcgcttttatctttttccgctgcatttgtaatcttttatatttttgtaagacgtggatctgtatgtcaacaattgtcgtttgtgtaccctggctggtcctggacaggggtttaatgcacattcagcttagaaattctggttcgtgaatttctgggcgtgacaccgagccacagctcgtgtagccttcatttgccctagagatgtccatcgacccccgacttcgtccatctccatccgtgtacttttgtttataaccagactgagccacaaacaaagccttacccactagacatgtggaagtacggtagtgctttgcaatagaggcccgaagaccggtacttatatggccgaggtgctactatcaaaaccatgcaccccgagcccagcctaaaaccattttgaggattttgaatagaggggaaggtgtgagtccaattccacaataatccaactattccatagtgtccaggtgatgagaatattcccaaagtctagagttataaaaccacctaatgttgcctaattaaccagcgaagcatctacctaaattcatactagtggtaccatgagtagagtgtccactagttggggttttgtttattctagggtgaacaaggtaataataacaatagcaataataataaggtcataacaaaggtaaataggcatggctaaataaaatagtgataacgcgagaatttaaataaagcgataacgcattaatttaaatcaaaataattttataaactgggattcaatatgttcaaggatgatgtgacttgccttgctcgctttcccaaacgtcggcttcaacctccacgaagagtggatcttccgaagctgcagcgtctacacgaccaacggaaacgaaaaaggcttttactctaataaactccatataacaagcaggaacaaagcacaaaaatgggttcttgacttcttaaggaaaaattagagacttgaacggtccaattccgagttcaaatggccaagttatgaccatttgaagtttatatgctctttaaatgaatatttgtgaatttctttatttaaattttaatttaaaaatggtttattgtcagccgagggggaggggcgcgcggaccgggtccacgggagtggggcccacgcggcagcctcacggtccacggtggaccgggtgctcccgggctcacaccgccggcgccgtgggccccacgcgtcagccgcacccgagggcgcgggcggctgacggccgggccccacacggcagccactcggcgtacccgaaggcggccatgccggcgcggtcggcaggaggcggcgcgcctgcgcccctatggtcgccggcggcggccataggcacggcggagcggcggccgaaagaggggagggaaacggggaaacgaggcggcggtctacggctcaccctaggtcgacggcgacgacgaaaaaggcggccgtagcggaggaaggcggtggcgtggctcgggtcgacggggtcggcggcgttccggcggtcggcgagctcgacgagggggtggacggggacggcggcggtgcggcgaagccggaggaggcgacgccggggcgggaaacggtcccggcgagcggggagagccggccgaaggtcatcggcgacggaggagagagagggcgacggcgcgagctcgattccggcgaggagacggtgcggcaaggggcggaaacgggcgagggaggcgcggggagggtttaaatggggttggaagggggagagggcggccggggaaggaaggaaaccggccgggaggtccggccgccatcaatggcgccggcgagatttgcgggagcaaatccgcccgtttgaatgcgagagagagagggaaaaatggggggaaagggggaggggatcacggggaatatttccccccacattattgcacgcggggacgacgggaggcggcgggattcgcgatggcggcggcgctaggcgcgggcgaggcggcgggaggaaggggatgacgggtgggccccacccgtcagcgagggtggcgtgcgggcccgcccgtcagcggcacgcgcgaggggaggggccgagtgggccgcggggaagaggagagagggggagggaaatgggccgagccggcccaagagagggaagggggatttttagggtttttctttttataaaacctttttaactttgtttatttcttaacaattattatttgtgctctgaaaattccactaaaatttatttacacattttaggcttttaggaaatatacaaaaatcctctaagccttatttgacttttactttgcacattttaagttttggacgctttcacatagattttaattattctagacataatttaaaggatatattttagggtcgttttgggacgcgacaggtgtggccgacgatgtggctgttccagtccttcttcgtcccgcagctgctgcatggtgcggtggtggggggatgctacttccagccccgacgaggcacggcgggccatacatcgagagtcatctctggaagaagtgagaggactagaagaaggactggttctacaccgcattgccagaccacctgcgacttcggttctccgccgccccccccccccccgaacgatcagccgcatggctggcggtttcggagctgggcgaggagtacgatgtagtgcagactcgccttaggggcctgcgaagccagggcctcacgggggcaatggtctttggcgattacttccgccgccgcatcgtacctctccaagagcggtcccgcggcacgtgggagtacactggacccaacgatcccatgcgcacccatgtgggtgagcgctgggactggggcgaggacgacgcgaagacggtgattcgtcgggtgctgggtctggacaccgccgagcaaacactgatcccagacaggatccttcccatctgcagcgaccgcgaccgggaaagtatcctggctgtgatgtcggccgtcggcgccggcaggggtcggtcccgccggggcagcgccgtcggcatgggtagcagcggcgcgaccgtaggtgggagtcgaaccagtggctccggcgggggtggtagctccagggcacccggcccgagccgcgggcccgggggagattcggccaacgacccgaaaggaaagcggaaaatgtccaaatctcgaccgccctctcctccgtgcatagggggcgccgagcgcgtggcggaccgaccgaagttggacggaagaagaagcggctccggaagaaaggtcagacggagccgtgccgggggagctttatcgagcccccaaattggaccttcaaccgccctccccacaggtacgactgccggcatccgcttcggtgctctttactcatctcggcctcttgttccttcctcttctttttctttgttaacgcgatcagggttcttttgtagcgagattccttcccagggggtctcggcgtctgaccctttgttggggtcaaaatccgagcgaccggagcggcccgggctcggctgatccagcgccgcggggccttcacagccttacggcggggcccacgggccgcacgccgggtctggccccgagtccaccacagtcgggacaagacctgccgcgagcgacagcggccgcggcgtccctcccgagggcgacaccgaggcccagacccgcgtgtagtgccacccgggagcgggggccgaggggggtcgcggcccgaaagctgaggctgggggcagccctgagcccgaggctgaggccgaaactagggcgggcccgagcccgaggccgaggccgagtctgcccgagggcccaaaacgggggggcgagaggaacagccgctcccccttgcatttggggtgccctcggggctggccgcgcgggaggggggttgagagcagccccctgtctcgcgggggatccagcagcactccgtcgttacaggggcggaccgcaactttctcttctccgacgccggcaagtatggagcctctcctgcaggtgctcgccaccgccgattccaccgtccgggaggggctcaacgcccaagtacaagccccggcggaggagcgggcggccctggaggcagagtgggcacagcttgtggcggaccgcgcgcgggttgacgaggggcgccgcgccgtggacgacatggtggaggtggggcgcaaaatgcgccaagcccaactggcagagatccagacgcgtgaggaggcggcactgatcacctcaagcatcctagatgaagcgctgggtgacatccgcttgcagtacgaggcctatgcgaaggacctgacgaagagggtcgaaaatgcctgcggtgtcattgatgcggctgccgcccaagagcggcgggcctcggaggccgacgcctcgctgcgggctcggacggcggcgctcgaggccgaacgcaaggccttggacgagcgcgctcgctccgcgcaggagtttgaggccacggttcgtcggcgaatcgaggtcctcgaccggaaccagcgcgagcaagacgcgcgcagccgggagcaggcgcagcgagcccaggagttggaggagcaggctcaggcgctagaggagcaagcacgtttgctagaccagcgggagtccaccttggccgcccacgagagaacggcgacggaagcggaggcctcccttcgtcttcgtgaggaggccgcagccgagcgtgaccagacgacccttgctgcgaaggcttcggcggcccgtcgtgtagaggagctacggctccgggaagaggcgtgccgggaacgggacgccgcgctcgccgagcgcaaggccgaggtgaaccgccatgaggtggcgacgcgccggctgcgtgtcacgcccagaaattcccgaatagaattccaagtagaatgtgcattaaaatccccgtccaggaccggccggggtacacaagcgacaaagttgacatatagatccacgtcttacaaacattataaaagtcttacataaatgcagcggaaacttaaaagataactagagctaagccttgacttggactgcagcgggaacaccactccacaggcatcctcaacggcacggacgaagcctactcctcggaaaagccaccatctgacgcatactcaaactctggggtttggggaaaatagagcaagactgagtactacccactgtacttagcaagtcataccggaataggggtatgatgcagggaatcatcaagggatagctataatggttcatttgcataaagcgagcatttataaaccgaagatggaagaagaaaaacagttgtaataattaatcaatattaatcatccactgtccaacactataccacgttgcaacaggcccaaccaaccacctgaactaaccagttccatcagactatactagggtgagactaatcacggtgaatctggttgaccgcccataactgcgggcacggctattcgaatagttttactctgattagaggtgtacaactgtacccacaagacatagccccacgacacgtttccgtgtgccgacatgccaccacgacataccagaaagaggccgtgacaggacccttcgcataaccccctctaaccaagcacaccacacctcaggtttcacccccactcctcgcaaggcagtgggcagtcccctctcgtgcctaggtgaatccgaaagccgcataggccgtcgcagggcccatccaaactccatcacgcccacccttgcctagatgcgtcggctagaggaaagctacgcttcaagcccagccgttgcccacgctggcttgtggtaagtacgaggaaggggagggcggcgccgacatgcgggccccacatggcagtgactcggggagggcggttcacggtggaccgagtccacggaccggggaaggggtggcgcgccacgtggtgcacacgtggcgctgacgcggcgcacacatggcagccacgcggcagccccgcgggtggctgaaccgacggccccgatctacctcgggtagatcggacggcggcgaggagcacgcggccggcgcgcacgggcggctcgagccggcccggcggccatggcgcacggtggcgctaccgcggggcggcggcgcggcaaacggcggtgtccgacggcaagcggcggcagcggcgcgacggcgcggcgacgctggcggcggctaagcggctaggcggtggcgcggtgactagacggcgcgggagagagagagaaagaggaggaggtgcctcaccaacgacaagcgacgacggcgagcgacggagggcgatggtgacggcgggacgatctccgggaccacctagcgaacacgatggaaggggttagagagggagagggatttggaacagggcgaggacgccggccgaaggcggcggccatggcagtgctcaccggcgcacggcgcggagtgggttccagcggtagaatccgacgggagaggggtggacgggctggcccgcacgatggcgaacgcgacggcgtcgtcggcgcggctcggcacggcgtctagcggcggctagcggcgaccggagcagcggcggcggtggcggagaggagggcgacggcgctagggcgttagagagcacgggagagctcggcgagattgggaaaaagagagagggagtggcggtggagcttaaatagaggagggggagcccggacgtggccggtagaggcgggaatcgccggccgaagtgggggagtggggaaggagagagaggcaggattcgaaaatcgaatcccggctatctcgagcgcgggcgtaggcgggagagagggggaagtgggcgcggggaacgcgggtgcgagggcgacgtgggcgacatggcccgagagacgcgggagcggggcgcggcggcgccggctggaggaatgggacgggcccgacaggtgggtcccacctgtcggcgaccccgggagagagaagcgggcggccggctcagctcggctgggcctcggccttcggccggcccagcgggaagaggaggcagagggaattgggccggcggaccaatcgaaagaaaaaaagggggaaaagaaaaagaaaaggaaggaaaaggactttcctgggattaaatattgcttgtgctcaattttaattggttaaaattatttctagagctctgaaaattccactaaaaatctggttagcgtattccgacatgtagaactccagaaaaatttcacatgccaaatccgattattgtttgcattaatttattagggtttactcttgctttacaccggtattttcttgagaccatttataacttcaatttaggcttgggaaagaacttcagggtgtgacactgggcgagcaactcgcggaacgcgaggaggccgtcaccgggcgcgaggctcggcatctggagagcgctcgtgccgagcgcgcggcgatggcggcgagggcttctaagctggaaggccgggagaaggacctggcggcgggcgggtagcccggcggcgcgaagttggtgagccagcttaccgtggctcagagcactcttgccgacctagggcgcctggtgcaagaccaagctggggagatcgcggccctccgccttaccaacgagatcggacccgggcaactctccgatgccgtcgatcagctggagcgacttggagtggtccggtttgcccacagcacagcgggcaactcttcaagccacgaatccccgtgcttcttcaagacgttgtacgtcttagtcttgaggcccttgaggatttctacgttggctcgctcgacttcgccgttgctcttggggtgggcaggcgaggcgaagcatagcttgatgcccatgtcgtcgcaatagtcgccgaacagctcactggtgaactgggtaccattatccgtaatgatacggttgggcaccccgaaccgggacatgatgcccctgatgaacttgagggcggaatgcttgtcaattttgacgaccgggtaagcctcaggccacttggtgaacttgtcgatagcgacatacaggtgttgatacctgcctcgagtcgctttgtacggtccaaggatgtctagcccccagactacgaaaggccaagagagcgggatgacctgtaaggcttgagccggctggtgcgtttgcttggcgtggaactggcacgccttgcatcaccggacccattcctgggcgtcttgcaatgcggtcggctagtaaaaaccttgtcggaaggctttaccgactaatgtgcgtgaggccgaatgtgccccacactcaccttcatgagcgtcggcaatgagctcgacgccctgttctcgagaaatacacttcaagagtatcccgttggcggcccgtcggtagagggtcccttctacgagcacgtactgcttagagatacgcgaaagcttctcagcttctgcgcgaccctcaggaagagtattattgtcgagatatgcccagatgtcagtcatccaggcgacgtgacgaggggtgtcggggtcgaccccctcgggccctgaggcccgtgggtcgtcggggcttggggcggaggtcgtggcaccggggtccctcgggggggccaattataccgacggctgcgcgagcctttcctcgaaggtcccaggagggagtggggctcgtgccgacgcgatacgcaacaactcatcagcgattgcgttgtcacgtcggggcacgtgccgtagctcgagtccgttgaaatggcgttccatacgtcgcacttcacggacgtatgcatccatttccgggtcggtgcatcggtactccttggagacctgattcacgactaactgggaatcgcctaggaccaggaggcggcggatgcccaatccggtcgccgccctcagccccgcgaggagtccttcgtattccgccatattgttcgtgtctcggaagtcgagccgaacgacgtacttgaggacgtccccgcttggcgaagtcagcgtgactccggcccctgcactttgaaggttgagggagccgtcaaaatgcataacccagtgcccgacgcgaatgtcggcgtttgggtcctctgcatctccggggagggagggaacgttggacggaatagggtcgtccactggggtccactccgcgatgaagtcagccaggacctggcttttgatcatgtgccatggttcgaagtgcaggtcgaactcagcaagctcgatggcccactttacgacccgaccagtgccctctcggttgtgcaagatttggccgagagggtaggacgtcactatggaaacccgatgcgcttggaagtagtggcgtaatttccttgaggccattaagactgcataaagcatcttctaggcctgtgggtatcgggtcttcgcgtctcggagcgcctcgctcacaaagtagacgggccgctgcacctttcggtggggccggtccttgttgtcaggggcagatgatctggggcgcccttgctcaagggccccaggggggggtctcgagccatgtcaggaccataggcctcgggaccactcgccaaagcctcccctcctcccacggaggcctcggggtcctctcgggggttgggggcttcgggcactgggctttcggggaacgaagtgccattgccaatcaagggggcctccggtccgctctcgtcacgctcgactactagggcggcactcatcgcatggggggtcacggccaagtagagcaccaatggttcctccggccccgaggctaccaagatggggggaggtgaggtaagctttcaactgactgagagcttgctccgtccacacaaacggcccggggcgctagaggagtttgaataggggcagcgccctctctcccagcctcgatataaatcgacttacggcggccatgcatccagtgacacactgcacatccctaagcttgcgggggggggggggcgcatcctctctattgcacgtattttgtcgggattagcttctgtgcctcaggaggagactagaaaaccgaggagtttgcccgccggcacaccgaacacacacttgtcggggttcagtttcatgcgcgtagacctaagattgtcaaaagtctcggccaaatcctgcaacaaagtgtcctggtggcgcgtctttaccaccaggtcatcgacatacgcctctatattgcgccctacctgattactcaaagtaatacgagtcatatgctgaaaagtagggcctgcattctttaaaccaaaaggcatagttgtataacagatagtgcccataggagtaataaagacagttttttcctcatctaccctagccatgcggatctggtgatacccagagtaggcatctagaaaacacaaaaggtcacaccccgcagtggagtcgactatctgatctatgcgtggttaagggaagggatccttagggcatgccttgttgaggtccgtgtagtcgatgcacttccggagcttgccgttggcctttgggatgaccaccgggtttgccagccactctagatggataacctcgcggatgaagccagcctccaggagcagcgccacctcctctcggatgaaggcctaccgctccggggcttgacgccgtactttctgccggacgggtcgcgcgtctggccgcacggcgaggcggtgctcgatcacctccctgggaccccgggcatgtccgacggcttccatgtgaagacgtcggagtttgcccgcaggaaggagacgagcgcgctttcctatttggcgtccagggtcccgtcaattttggcggtcttcgacggatcattgccaagggggatctccttgacgggcacctcgtcagccgaggtgaggcacttcttggaggcgcaggacgcggaggcctccggggcctgcggctccgtggccaccgccaggatgtcgacgcgctgctccgtgcaggcgagggcgaccttgacattaccaaagacggtgatggggccactagggcccggcatcttcatctggaggtaggcgtagtgggtggcggccatgaacttcaccaacgcaggcctgcccaggaccgtgttgtagggcagattgagatccgccacatcgaagtcgatccgctcggtgcgaaagttggtggagtcgccgaaggttaccgggagctcaacgtggccgagaggccacgtgtgtcccggagtcacaccgatgatcggcagtgacggctggagcttcatccccggagccttgagcgcgtcgaaggcagccggggagatgatgctcaggctgccccccctcaatcaaccaggacgcgcttcatcctgacgttgtgaatggtcagggagaccacaagggccaacttccctccacgagcgagcactgttggatggtcgctctggtcgaaggtgaggttcacctccgaccagcgcgccttccgagctgcctcgtg

SEQ ID NO: 22142 - DNA, 11800 bp, Oryza sativa
tttgaaaaggctatattgaagaaatttcttattttgttttggttctttctatatgcaaaaattaagggcccctttgatttggaggaaaaacataggaatttttggaggatttcaatcatataggaaattttatatgtttttctattcctataggaaatcaattcaatagttgaatagcaagcaatgttcagaaaggttgaatgtgcacttgatatgttaataaattacctttcaaagtatgtgtactttctaatttttaaatgtgattttatatttccttgatatatattatgaaaaaaatgccttgcacgtgcataattactagtctttcaattaagtaggagtaaaaacacagacaagttacagaaaaaaacaaaaaacaacttctcagcgagaagaactcgccaagcccctcaactgcgaccggtacaaccacacagcacacggagcaccacaccactctatccaaactaccaatgagaaacaacgacagaacccaacgacaaagatcgatgttgagatgctgaaaaagcggtacaaagctttgactttgacttcgcgaggcacgtgtcattgttgccgagcttgccgcccaacatccaacagctccgactccacggcggtcccgtcatcgttggcaaaggcactgccaaaacaatcaagacaacgccaaattcacatgttcaacatcagccaaagcccatgcatcggcaaccaccaacacccctagacagaaattgcaagtgttatcgttgccaagcttcatcgcacccaacaacatagcagctccgactccatccgacagaaacaaacgaagagagttggatgccaccaacaaacaagaaaggagccaagaaggcaaaggcctcgccaaacacctaggcatctagtgcttcgagccttcgagttgacacagtagtctaccaacgatgatcgatgcatgggtaaggttctccaaaacggcgccccatggacgacacgacgtgaaagcgccaccaccgcttgtccggaaaccggatcaaggttttcacctagagattggtagcgacgaaggaaaacaccataacgacgccaaaggtgccgccttcgtcagccacccaaaggctaggcaaggctttcgctagcgagttccattcagtaccaccaccagcccacaacaactgtcgccgaaccaccaccttgaccctccagacaccaagctagcccggtcgaccaccccacggctcaggtaggctcacagcaggatgtcgcaaagccaccgtgttcaccctctcccggaactccccatggccagaatagggttctagccataggaggggaggagttccacggagaggaggttactcgaccagcaaacgagaagatggaccgccgtcgccgccagccgcttccccgctcgcaccaccaatccttgagaagtcgctacctccttgcaccgccacctcacgtcgttggccaccccgtagtagaccatcgccatctccatttgcaccacacacggtaaaggacatcgaccggagagaggacgacccctcccgccatccatggccaacgacgatagggctgccgactcccacgtcgccgatttggctgctctccctgtctgccacccgagccaagccaagggaaccctagatctaggagtgtttgggaatggcaacgaagctcggggtgggagctcctccgccacgcaccctgacgcacttggtgccaagctcagggcggccgctcctcccctcgccgccatgtagccttcgcgccatcgccgccgcacggcctcgtcgtcactggccgccccttcctagcaagccacacggtttccgacggctagcactggcggcggcgaggtaaggaagaggggaggagggtggcggcactagggtttagcgcgtcgccctcgggccaccggtctgaacccgcggtccacctgggcgcccaacgcgcgcgcgccgtcctcttcgcacgtcaccacatccgccgccccttccacgctcctcgttggtgttggtggctgttaaatgccaattctataccgccaacatctacataaggatcagataataaaacatccaacatagtaataggtgtttaatctcacatattccacaagtgttggtgaatatctatatgcagatgataaatcccagtgctgggaggaaaatcagactaaagtggggagaattatatatccatgcaaggaggggttgtgaacttcatcgaaacatcggtgaatcagcccaaaactccgagaattggacagaggaggaccagaggagaaggcaggccgaaggccaggccggggggcccagcccaagttcggccgaaccccctggtgagcaccgttggatccaggttttggcgtggacggtcctgatcatctcctgatgacggttgcgggcatttccgacaattcgcatagtacaaccgtcatacctacctctatataaagacctcacttcactcacttcaacacacacttccaagcttgagctgaattataagaggctctatttcactatattgtatactagaataggaagagagtagagtagaagaagtcggaagaattccgaagctgtcggtaatcttctcctatttcttttattctgtttattactctgaattcaatataatattcttcctgagtaatttagatttatcttgtgagaattatctcttggttagttcctaaatagcatatgagattattgttcactataatcaactaaaatatagtgattgctttggtgagttagaaacactaaagtagatattaattacttagacgtggtgtttaggtaattgttatccagtaattgttgcgtatcccacagtacgtttgaggtaggtgtagaggtggtgacagccctcgagatcacttaagtcctccctgtccgggtacgaagtagagcgacatccaggaacagcgggttgccagtgcctgaagtattgtgttaggattaaagttaagctttcctaaacattgtttctcactagtaaatcctctctatcctggcctattttttgcttggtgtccttggatgaaccggaggaagctctgatcacacacgttcccttggatttgatacccttggaatactccgtaggggaagtgctacatcggtgtatccgtgcgcttgcggattttatctgtaaacgtaagaaataccaacaagcatttctggcgccgttgccggggaacggttgctgatcatttccgaacattgtttatcctcgtatcctttttcacttttttttattctaccttcacccctactatcctagagaagtattcctgttaaactcttctcgaccatggagcaacctctttttgagctgtttgctcctcggggcgaattctatgagacacctccttcatcggagcccatttatacagctggctatgaaattcgtcccgaactaattagtatggttaacaaaaatcctttttctggctttgatctagaaaatccctaccatcatctacgagactttgaacaagtctgctcatgccttaagattcgtggcatgagacaagaaactgtgcggtggaaattgttcccgttctctcttcaagagagagcaaaacaatggtacacttctaccgttggatgtgtaagcggtagctgggaaaagttgcgagacagattctgtcttgccttctttctagttactcgtattactgcccttcgagtagaaattctcagtttcaagcagatcaaaaacgaatcaatcggtgcagcctggtctagattcactaatttagtgtagtccggaccaaccctgtccttactcgagtatgtgctacttcaacatttccatacggctttggataaggagtctgcattctatctagacataaccgctggaggatcgttcatgcacaaaacgccgtcagaaggaagaacaattttggatcgtattctagaaaatacttccttcatgacgcaatccgatgaaccccagtcgaaggcatccgtgtccaagatagaggaacctctaacgatcgagccactcgatgaaccatccacttctgctagctcgattgatgagaaggttcctgagcagccgtctgtcgagaatgaagaaattcagactacagagcgtgccgcaattttgtttagggacggttttgatgaagactatggcaataccccgaactatttcagcaagaagaaaccactcgttcctttgccacctcccgatcctatggaattgggcttcctacgagaaactgtctgggagttaacatccataatgcgcgatgaatggctaagggagccagaactttcatccgaagtaattcggataaatactgctccccgaatcattccttgccatctggaagggaacgacgtcagtattctctatagtccaactgtcggggacaatctcatttccgagtcttttgcattcgcttatttaagcgataaggcagtgactccgacaaacaaattcttcaagcatccaaacggaaatatcatcgaaggatttgggattgtacaagatgttcctgtctgctttgaagacagggaggcgatcatggatttccacgtctttgaaatccaagattttgacatcctaatcaggctgcccattgagcaacttctcatcaacacacctcaattagatagcctcagaataacgctggaagggaatgaattctcaattctattctcacgggcgaggatcgccttgactgaccccctcccagaaattgagtcagcagaagaggttactgtagttcctcctcatgagtcttccaaggcccttctagaagatgaggtctcagattttatcaaggaagaagcagaccccggtgagactctcgacctaccaatcatggaaccaccacctcgacctccgcttgagcttaaacctctacctccaggcctacaatatgccttcctgcataatcacagagaggcccctgtcataatcagtgacaaactctctgaagacaagactcaatgtcttctcaccgtgttagaaaagcatcgttctgttcttggctactcgctccaagatcttatggggattaatcccgcgctttccacccatcgtattcctattgaccccgagagtactccctctagggaacctcaacgacggctcagtaatgcaatgcgagaggttgtaaagaaagaggtcttgaaactcctgcatgccgggattatttatcccgtaccatacagtgagtaggttagcccagtccaggtagtgccaaagaagggaggaatgacggtcgttgcaaatgctcaaaatgaactaattctgcaataaaccgtaaccggatggaggatgagcatcgattacaggaaacttaacaaggctacaaaaaaggatcatttcccgctacccttcattgatgaaatgttggaacggctggcaaatcattcctttttctgtttccttgatgggtattccggatatcatcaaattcctatccatccggaggaccagaggaagactacgttcacatgtccatatggcacctatgtatatcgtagaacgtctttcggactgtgcaacgctcctgcatctttccaaagatgtatgatgtctattttctcggacatggtcaaagatatcatggaagtcttcatgaatgacttctcagtatatggaaagactttcggtcattgtctgcagaatctagacaaagtcttacaacgatgccaagaaaaggacctggtgcttaattgggaaaagtgccgtttcatggtccatgaagggatagttcttgggcatcgagtgtccgatcgaggaatcgaagttgatcgtgctaaaatcgacgttattgatcagcttcctcctcctatgaacatcaaaggaatccgcagtttcttgggacatgctggcttttatagaaggttcatcaagaacttttctacaatcgccagacccctgacaaatctgctagccaaggatgcgccctttgagttcgatgacgagtgcctaaaatcttttgaaattctcaaaaaggcactcgtctctgctccaatcattcaacctcctgattggactctgcccttcgagatcatgtgtgatgcaagtgactttgctgctggtgcggtcttgggccaaaccaaagataaaaagcatcatgcaatcttctacgctaacaaaactctaaccggagcctagttgaattatgcaactactgaaaaagagctgctcgcggttgtttttgctatcgataagtttagatcttacttagtgggagccaaggtgataatttttactgatcatgctgctttgaaatacctgctcactaagaaagatgctaaacctcgcctcttaagatggattttgctgctccaagaatttgacttagaaattaaagataaaaagggagtatgtttagttccgcacccaggccaagatctggcaaattggtttcttctggcccacaatgtaggaagactcaaaagaattcgtcagaagatgcataagctgccagaggcaaggaggaatcactgctcgcgatgcaatgcccctcacatacaatttgcaagtcgagatattcgatgtttggggtatagacttcatgggacctttccctaagtcttgcaactgcgagtacattctggtggcagtcgactatgtctccaagtgggttgaggctatgccgtgcagtgctgcggatgcgaggcatgccaagaagatgttcacagaaatcatcttcccaagatttggtacccccaggatggtcataagtgacggaggttctcatttcattgacaaaaccttccgagacctcctacgagaaatgggagccaaacacaatgtggccacaccttaccatccacagaccagtggtcaagcagaaacatcaaacaaacatatcaaaaacattatgcagaagacggtcaacaaaatgggaataggatggaaggatatattgccggacgcactgtgggcataccggacagcgtacaagacaccgttggtatttcttaacgacattgctagaaatataattcccagcaatggcgcagaaatacttctggtatattatggttacagagttcatccgcaagcgcacggatataccattgtagcatttcacccgagagtattccaagggtatcgtatttattttatcccgtaggaagatcatgtagagagaacttaactaattacttatatattacttgtgataatcatattctaagtaggggttaagataagtccaagggtagagtgacaaacaagcattaactactcattctcataataattaatctaagctaggtggaaagaaaagagaaagagaatctattcctatacctctaatataaatagtatacatacattctagttaactggtatactagctaataccctctatctgatgccctcctggtacttcgagaagccacccctgactgccgagttccttacgatagcccgtcatgaccatccaaccggggctaaatatggaggaataccctccctaggaaattaacttaggattatttataggtgcggaggaatacccgtactgagctgtcaccatcagcggcccacctctcatccggaatatataatcctaaataatgatatcccgtaatctagacaccatgtctaaactaccagatactactctaatatcatcgtcatgacatagagtaattgcataagcaaacactatacccgcaccaaagcatctcccagataagctagcaatatactcactataacatgaacataatgtaaagtaggtactcatatactcggaaagtattccaataccagaaatgtacaaagaagagtattctaataaaagtacaaggcttacaaaagaggaaaggaaagctactagagccatacccgaactcttccgaagactttcggactcctgattcctattctaattctattccaccagctagatactactaactaaacttgagaggaatgagagagctcttgcttgatgtgtgtgttgaagtgaagagagtgagcttcttaaataggtaggtaatgacggttatggtggttggaaagttcggtaattgtcacaccctaaaaatcctaaatatataaattgttgcttaaatggaattattagaatttattttaaaagcctagaagagaagatctaattttaattaataaattccaatataaaatggggccagataaaatttcattaaatactttgcttaattctataattcctagatttttctgggatttatttgagctaaggaagtatttttaataaatgaaattgcatttaatgaataatttaaattgaaaaaggtttttaaaagtctcttttggctttgggccgaaagacggcccaaaaacctctctccctctctccctcggcccagtcggcccagtccagcagcagccgccgctcgcgcgcgcgtccgcccgctgacaggtggggcccacctgtcggagtcatcgtcttcctcgcgtcggccgccgcccgaaaccctagcgccgcgccgccgtcgccgtccgctgctcctccgccgcttctttggtcaccggtgagttcgccgcaacgttctctacgtcctggtgccctccgttcgtgccgaagcgccgtcgttcgccggcgagcttgcgcgcccgagccgccgagccgccgccggagatgacgtcaccgctgacgtcatcagggtctgtctgctgtgagccgccgtggaccgctcgatctcggccgtccgttttggatggatcgatctcggccgttcgttcccgtgaaccgctgccgtgcgcccggtccaccgcaaaccctagccgctgacgcaataaaccctttttccttttcaaaaataattcattattgcgtcataattcaattaaaatccatataagtgttttaaatcgatttaatctttgaaaattcataactaattcatcttagctcggatttagttggttcaagtctctaaatttttctaaaattgagatctacatgttaaaaatatccacatgtattgttcaagcttgtttatgtgctgtttgggtgtttttgctcttttctgtttagattccgacgtttccggagagtccgttttcgcaggagaagaatttgaagagttccaaggccagcaaggcaagtcacacagatcccaaacaatcctttgagcatgttgatcccgtttaaagctattgtttctattcaactatcgcatttattttcgaatgtcattgggtggaattaacctattgtttgttatagcccttttgttcttgaatactttattccttgataccttgggttattataacttgactagttgggctatatatattggttcgactacatattagatgtgattgcttagccatgcttagaaacattagcacactattgggataacttatgactcactattatttaatgatggcttaatgatagttcacgatggtcaatcgtgattggttaattaattacttgccaattaaaacttgataatggtgggttgtgagcacatggttttgagagtcgtgctcatgacaattaaggaccggttcacgagtttcggttgtgaaacattaaccgtgccaaccacaagccagcgtgggcaacggctttaccttttgtatagcatggttcattgcggagcaccagactgagaagtggcggagataaacccacgggggtcgctggggagtccatgccttgtttataagggggtgattatgatccaggaaaggtgctctgtagtggattgtgttgtgcgaggggtattgtcacagctcctttccgaggtaccgtggtggtattgaggcacatggtgacatgatgtggggctgtgtcttgtgggtacagtggtacacctctgatcagagtaaaactattcgaatagccgtgcccgcggttatgggcgggtctaacaatgtctttcgtgattagtctcacacctctcatcatgataacagatgctataactggtaataatttgtttagctcctggtttggaatggtatattcctggtttggagatagatctgtacagccgggtatggttgttcagaaaggttgggcctatacaacagggtatgttgtatagcgttgaattaatattgtttaattattacttaactgttttattaaattctgaaatgtttattaaaggctgtttatgcaaatggaaccctattatgccatcctttgttatcctgtgcacttgcatatttgctgcgtgacttgctgagtatgtcatatactcaccttgcaatcattcatcagaggaagagttctacagtgaagctgatggtgtggaggattaggtgtagccctggtcaagctgcctgtggagtggagtcgtctgcgccgtttatcttatctttccgctgcttagatctttattgattgagaggaactatctacctctgtaatgacattttatacgcttattaattagagtaataattgtactctattatcaatttgttattgtgtgcctcggctgattcctggacgagggttcacacacatgtaagcgtttggaattttggatagaaattccgggcgtgacaagttagtatcagagcccccttgaccctaggttatgccaaatggttatccatagaagccctctaaaaatattggaaaagtagaattgttctcctccccttctcttttaattaaaccaaactaatggcacatgcatttcataatctcttttagtggttctcattcaaaatttattccagtgttattagtaccgtacatctattactgtactaatggctcatctaccagcaaaagttttacaatattgttttatttagtcttgctgcaatgaaataaatttagcatgttgattttataactttattccttttgaaaccggttgttcaaaagtacaaaatttgtgacctcgtttccagctgtttcaacttatcttgcaagcttggtttattttatttacttaccttttactttgattttctaactttattcaaattaatccaaaaacttgtgctattaattggataaatgtcttaactccctcctttcacttgtctttagatgccgcgctataagcctgagtacttgtttggtgttgagggatttgtccaagagttgcgtacgatgtcctttgtcataggatttgggactgcctctttttatgcccagattcctcatgatcgtcctgaagagaagtgccgagtcaaagtcaccttgaacagtaatagtgaagatatcccctcagtgatgttcgaagctggaggaagaaactacatccatgcatgtcaggaggtggcaaggatcgccataggagagctccgcgatcgctacagtgatcagttggccgacactgagtatcgctaccatcctcgccaaccacagggaagtgaccgtggcagttaccttgacactgaaggaattgagaatgatgctaccacaaggcatttggttgagatgctgtgggctatggatgaaacccgtgcggagactgtgttagcggctcaagatcatgaagatcggaatcgtggtaagatttgcaagctagaggacaaggtggatcgtttggagaaggaactagccgcattgaagggagaagcaccaccgcagaaggccaggattcgtcttaccgcaaggaagagagctctatttgtccctcgttaccaattggcgccaaaggtccgtgtggtggaaaaagaagttaccccagccctagcggatcctccggtcgtcaatataagtgatgatgaaggagaagaatcgaagcgcacccattccaagatcgagtggggagcaactcaagatgatggagacgagccgaacgagccttcaatcaactccgatgctcggaagaat

SEQ ID NO: 22143 - DNA, 6720 bp, Oryza sativa
tccaacaatatcttcatggtaccatcctgcccttcagtagcagcaagatgtaatggtgtcccacagtcagataacgggtcaacataagctccttttgcaagcaatagttttaccattttacaatcacctgaataatgaaaaatccatcgagtatttaatacaaaagaggacaattgtaaattctaacaatctctttctattgcaaagttattgaaacccctttttttccagaagatgtgctacaaaaaccaataaaagaaagtatggcaaaagaccaagatctacacagatctacactttcagcaaaatgacaagccgataaacagggaaaattgaaaatgcgtaggaccaatggcatattttttatgagaatatgtattcctagaaattacaagaaaaccacctcataggaaaaaaaacataaatgtttattgtatccactgaacaaaaaagaaatttacgtaaaaataacttttagaggatgcgtacacagcagtattaggttatttaatgacaattagcagtatttagttattgtgttggaacaaagttttgcttcattattaacataaaggaagaagaatatcattatgtaacaacagaagattgcttatagtaaggaaataacaccacacactgtctattacaacagaaatacagaacttcataaaaaagtgcaacaaacatatgcataacagtgatactcgtttatagtgggggacctaatccagcagcagaatgcagaggagttaggccaccctcgcttgctttgtctttatttgcaccgtgatcaagaagatacttgaccgtgcctatgcgtccactgtgtacagcagaaaccagaggtgtcctccctgtcaagcaaacaggtgaacacctatcaaaacagtatcttcatctcaaaaatatagagccagaaagagcttttccaagagaatggcattcagaagttgctactctagagatataatgcaggtatgtgaaatttaggtgatgtgaggaataaaacagtaaattccataagacaaaattgggctaattggaatggcataaaacattgatcgcacaagacaaatttggacagatcctaatggcaagtgtaaaccttcaattaaattgtatagtcagtgcagaacttatgcagaatcaagtacatattcttggagaatgtgaatatgtgcaaataagtgaattaaaaaactaacatggatattatcttggtaatattttataattggaatggccacgatcatgaataagcagaggataataaattggggttaactggatccatgccattataaatttaccagttttaaacaatgtcattataactctgtctaattggatatgccaccacgtaccctttggatgcagtgaaattttattttagactaaattgccctttatcttctacctccgtactctccactcttcctcccatccctaagcagggatagcggcagacccacctcctccccaagccccgttgccggagccaaactcccacaccttgcgtccacccaacaaaaccaaaactcgaagcatatcggcttcatcaatcaatgatgaacccaacaaaattttctatctcaagaaatttctgcatgtcttttgtttttcccccggtttggttgatggtcaaaagcttggatttcagagtgcaaacttgctcgcatctgggcaaacattggatattttgaatgattttagcgccttgtcttgattttggtgtttgtttgcttgggcatctttggagctaaaggtttaattttgggaggatatttagcggttcgcagacatttggtgggagcggaggacatgaagttcttcagcaccgctacgtgcccgcaaagccaacctactcgcccagatcctcgagcccgacggatgagtttgtcaatgagcggcggatctgggagagagatagagataagggtagtttggtccaaaaaggaatttcagtgcaaacaaatggtaagcagttgcatatttctaattttaatatatttgcaatggaatcttccaattagatgaattgtaatggcatttttcaaaaggggcaaatttataatggcatgaatccaattaaccccaacaaatgggtatggatgctgaaccatgctttctttattataaattcacgaggtaaatcaaaatgacatccagaagctttttatggcatgcacaattctagaaggaataaaactattgattcaaaaaatattaattgagatgtatatattaaaacaaaaaatttgataatttgacacttttttcgatgcccaattactttaactgacatttgtgatgatgacatgtggggccatctgagtgaatgaaagtgggccaggatatcaaataatcgaaacccatttaaaagagtgttaaattatcatatctcttagtctatgcatgaaaaccaggacaccccacaagcccccaatgcaaagtgaaagttgcatattgtgacaaccaaaaccaccctacaccgctcactgggaacaatcagaactatgcaaactagggtttgtatccagagaagcagaccttctttgtcgaggtcatccacatcgaaccgcatcgtctcaaccaggtacctgaccacattcatgctcccgttgatggcagcgaggtgcagcacgccggcaccttccatgccttgcacgcctgcctgcctcgcctctcccacggtctcccggaggcatcccctccccgtatccagcatgttcgccaggtctggatcaaacgaaatcgaacaacaccaccacagcacccacaaagaaaacaaaaaaaaacggaagggaaagaaaagatcagcaccgggagaggagtcgaaatgacgaaatccaagccggtaggtagaatccacccctgcatactcttgaagccgcgcaggttgtcgttgtacgccgcctcgaggagcatgtgatgcgcgccggcggcggctcctgcggcgggaaggggtagaggagttagcggcgggttcgttgcgttgcggcctgaggggctagtaggattagctagcggaggggggctcttacctgggctcaaaccggaaacatgacgcggcgacgccatgggtgggggtgatgggcgaggtgctccggtggagaaaagtagagatcgctagggtttgagagttggcactgggagagaaatataggggggaagtaggagctgttgcgtggttttgaaagggaggggaggaggagaaaggggaagaattggcggaaggaaggtggaagcgtatgcgggaagctcgttggatactgcgccactgcgccgtgaaaagagcgctggttgcccagcaacaacactagaggctgacatgtgggacaagtttgcactagggcccatgtgtctttcattactattgcaagtacacgtatcacaaaatggagtatacttttttttttttactaaaccggcacaggaactgccaattatctagactaatataaaaggtacgagttgtttagtgcaattaacaccgtaattgtaattagcgtcggattaacgctcccacgccttttccccatcgcaaaatccctgcccacgtcatcaaatcccgcgccgccccttgcctctccctccaaaccgtcactgggcggcacccaggatcgcgtgccccaccctcccgacgcccctacccgccgcccccgccgccgccgccagcggcgcctcccgctcggccccgaccggcgagtcgcgtaggagggaagcgccacacttacacaacgagaggaagcgctgctccgggggcacgagaggaagcgaccacgtgccccaccctcccgacgcccctccccgccgccgcccgccaccgccgccagcggcgcctcccgctcggcctcgaccggcgaatcgcgtaggagggaagcgtcacacttacgcaacgagaggaagcgctgctccgggggcacgagaggaagcgctgctccgggggcggcgtccggcgcggcttgactcggacgcgacggcgacggcacggtctctcctccggtggccaccttctcctcggtgagttcatcccctacccctcttccctcctcttctagggttagggtttctcgcacacgtgctgctgctgcggcagtgacggcgcacgacgatggtaggcgtggcgggggacgccggagagtcacaccctctcgccatggccgttgaagctccgttgctgcggcaaggagaagcagcttcaagagttctttcttccactgtttcttgattaagctcgtcaatggaagcaggcagggccagtgttagtgtaggcatgtagctcactgaattgtatagagtaaatttttgttcagatgttcaacaaagagacaaaaggcacatgcattgtacaccagaaataatctaggcaaaggtgatcatttaatggcacagtgttctaacttctaagatattattttcagacaagttgggtttgttctgacatataatggggttttcttcttctcagcttattggttgacatgagcttatgctgaaagacaaaacagtcaaaaacactgctgaatgcagtacaaagttttaccttactgaaattaattagtttttgataaataaactgtattcagataaataaattagttcaatgtcatgggcatgggggtgcttcaattagtagctgaatagaagggacattttttggaatgtagacttcactctaaacattttttgtgacttgcagatcttttacacggagacttcaaatctactggtttcttattttttaatttttcaaattcaagccttacaattcaattgtagactaatttagtttcaaatgaacaccaatggacaatcatgattcattttagaattagaaatcttattaccactgttactagggcagctgtggcacatatcgaaagtagacattttgaaaagcagaacatgtgaagtgactgacttgttgtagagacatgcatctgcatatgatgggaagtagagatagagcttagggcttcttgtgtactgcaatcctgaatttacagcattcactgcaatcaccattgcttatcatctccctggttccatgccctctcttttttttcgtgtcttagtgttattctatttcctacatgtgaacttttcaatagtatagtattgatttcatatatgcatcgatttcatatatgcatcaatgttcttgaccatcagcaattaagttagtatatttttgttctgattcttgatcatcaatcacacacacctgtcatattttgctgaaagattcttttggttgagatgtgcaagcagcaagcagcaagcaacaacctacagatagcagtccattattttaaatgtcgtttttggtagttaaaactatgaaaaatgcacataaaaatttctcttttctacatcatagattgagatcacagccgccaatccgaaacaattggtcactgcatagaagtgttccttaaattattgcagtttcagacagaaactaaagggagctttttccctgcaggctttgggaagaaggaagtctgcaaggatactggttttgtgcggcatcggcaaatgttaatcctgaacctttgaatatgtatattgttgatgcaacctttgaatagagcaaatgttgatactgaacctttgaatatgtataagttagaaggtctgctgcttcataatagtagatcatatgtgtatttctgaatatatcttctttgtttggttttttccagtacggcactctgctactattctaggtacatgtccgcaacctgtaatattattttgcggtgtactgattgggcggttagatttcgaaagcaatctcaaattatctgtcctatccaatctattgccagattacccaggtgccatgtgcaatactattttttttttaaaaatgtggcaatcaggaagtttgagaaccagtatgtactcctaccaatgaagtttggaaagaaaatttacatagtttgtggcaaataatgttcaggtttgcagattaacatgctaccacggtcaaaactgtatgtaatacttgcaagtgtcagattttgtttgttcccctactttactaaaactgtaaattaggttaataacttgtttctgatatataacaataaaagaaaccatgatattaaaaagtatctgttaatgctattaggcatctgaatatattggcttacttctattgtttataatacaggttgacactgtcgacaaatgaagattttggtaaaatcctatcatgtttgaccatggtgtttcactgttaggtacacggtatttaggagctattcgtatagtaaatactggaatattgaagtaaattatatgttcagcttattaactgcattgcaatatctttgatctggagacggttttaattttcatttgtgtggtcgcatcctttaatttatataacttcataagaatatactccaaagtacatgctggtttatgtatttttatgccttcctattctaattgtctaatggctcttgaacaatagatgtaaactacgatgtctgaagttttccatgttttcttccttatgaaaatgagatggagctatggcaagctgctttggcaatccaagtttttcatgtggcttgagctgaagggaagatgcctcatggctgacaatctacagaaaagaggtggcctcatcaagcgaattgctccctatgcaacctgacgtttcaagatgacacccaaccttttctcaatgtgcttttcacaaac

SEQ ID NO: 22144 - DNA, 601 bp, Oryza sativa
aaagaaattgcagaaatataaaatgcaagcagcttgtattttgttaagtggataagaaactagacttaaaacatattagtttttgcattccaaacttagaagataaactcgagtgttgcaccaaatatctccgtgctattttctgcacaaaaccttgaaaaacacctattgttatttagtcaaacaaggccaatgtacctatagttatttagttggagaagaatgcccaatcccagtaaaagctgcaatccaaggaagcccactccttgtgtaggggttagaatgcctgatgcaaaaggcctgcttttggtgcgctcaacctacaagaaaacaaatacttttctgtcaaagatcaagatgctgaaatcccatcagagagtaaactgctttatgttcctggttgaccattccactgaattgttcttggagcaactggtgatatggtgatgacatttaatatggttattggttttttaacttgaaaactgcaacagtctgaaaggcatttctcttaacaggagaaagtacaacgaaacggaaacgattaacacaaatcaccttgttatcaatgtctcgatcaagaagatcattgaccgtgcat

SEQ ID NO: 22145 - DNA, 5437 bp, Oryza sativa
aacatcgacagaaaatttaaagaatttggaaaggacgcacgaaacatacggtttggtttaagtacggatggcatgaatccttttggagagatgagcagcggccatagcacttggcccgttacgatgtgtatctacaacctccccccctggctatgcatgaagaggaagtacataatgatgccgattattattcaaggccccaagcaacctggtaacgacatcgacgtgtacctaagaccactggtcgaagatcttaaacagttgtggaagaaggaaggtgtccccgtgtgggacgaggacaaacaggaggagtttaacctacgagcgctgctgttcgtaaccatcaacgattggcctgcacttaccaacctatccggacagtccaacaaggggtacaaggcttgcactcactgtatggatgaaacagaaagtacgtatcttaagcactgtaggaaggttgtatacatgggtcatcgtcgattccttgcagcaaaccacccggtacggaagaaaggcaagcacttcgaacataaggccgaccaccgtacgaagcctaaacatcgcagcgggaaaacagtgtttgctatggttaaagatcttaaagtagtgttcggaaaggggcctggaagccagcatatagagagcgaagatggtcacgcggcgatgtggaaaaagaactctatattttgggagttaccatattgggaattcttggacgtacgccacgcaatcgacgtgatgcagactccagagcagacagagatagggacgagctgacactcgccctgcagactccagagcatccaggacgaacacgagggaaaggggtgattccttggaagattggtttcaaggaggacatccacacgtacaggagtcggatgaggagcaagagagataccgaggcgaagattgcagacctagagttccgggtatcgagctacgaactcaacatgcaagaggaggtggcaaggaaggttgatgaacgcatggccgcacatcggtcccatgatccccagccgaccattcctcctgcaatggtgagcccgtcaggaaaccgtagcagctgcgcctcaacggggcaggtaggatcacagagcatggacgccatgcaaacacaggacgaatcgacctgtcccgttgatgacatcactcagcggacaccatgtgagctgcatattcctttcaagaacttatcaataaaggtaagatttagccattccgctagttgctgcttatatatgttgattactaataaataatctctcacaacatgaaggtggcgtcgggcatggccatcccaacggacccttcaggtacttatcactgcaggccgattccagcaggatactcgaaggtcgaagttgagttggtcgaaggcgcgtacgaggacctcgagctggattaccctggaggagacggtgagacgcatctacgagacacaagccatgccattattctatggcgcaggcggtacatcatcctccctgggcgacaagcggcgtctcgtgcaccatctcctccggctccgccatctcctcctcaggatcctgcaccgtctcctcctcttgctccgccagcaccgtctccacctcaggctccagcatcgactcctcctcaggatcctgcaccgactcctcctcatgctcctacacctactcccccgcaagctcctcttccggcaccttcaaagtcaagggcccccccagctccaccgcctgcccacacaagggcaacgaagaaggcgaaagttgacgccgccaagaacaaggacccggggtacgattgcacgcaagaggagcttgacgcttacgttgcatcagaagtcaagagacaattcaagcctcgaagtccagaaaagaagattcctatagaccccagtgtcaggaacttcttcaggggtatgtctgcatctgtcaaggaggccatcaagctatcggactatgagcgaacgctgaagaaagcatcttctggaaagtccaaaccagtccctcagcttggagagcaaccaaaccaggagatcgagccgttggtgaccggtaaagaaatgacgatagaacaatttattactgacaccggtctaactacggatcaattgctaggagtcgcaccaatcgaaaaggcggaagtgaaatacatgtacgaactcggtaaaccgcttgtcaagcctgagctgctgcagtccctacccacacaaatgtacaagttccatcagctgtacatggagatgagcgccaccggtagagagatgatcggagcgaggatcagggacacggacttcttgcaaggagatgacattctctggatcaatttcaggggaatctacgaactataccagctggacgccctcgacgtctctattatgagttgctggattttgtaagtatatcgttaagttagatttcttactatacgtctcctttaattaattaggtccttgtatataagtagactatagaaaataatatactcccttttatcgttgtagaatggagattcaaagggcccgacggcggagggttttcgatactggattcatcgaccctcggaaagtaaacgtcgcaatgctcgaccaatatccacaagaaacagaggacaatctcgtccatctcctgaaggcgcagcattacaagacgttcatactgttgccatacaacacagagttagtttaattttactgtcttcctacatacaaaatttcattcccatacgaacttgctaagtgtttcatatgtaatgcatcccacgcacattgcagattccactgggtgcttttactcttcgacctggatgcctgcaccatcaacgtatatgactcaatggataaaaaagagtctacgtttgacaaggttttcgaacttatagacaggtaccgtcataagttcctttgttaattaagaaaatcttgttatgttaattgctactacgaatcatagctttaaactccatgtagggcttggtatcggttccgtcatttggtccgcggcaaatggagagaaagacttaggcggaagttcaaatttcctgtgagtacacatgctctgcatttatatttctccgattcaaatacatacaagtgtatattaattagatctctcgttgtttgtcatttatttgtagtgcgcaaagcaaaagcagggaactaacttgtgcggctattacgtgtgcgagtattgccactgccttgcaaaccaaatcatcaccacaagagagctcgaagtacgtacaaataaattcaaaatttcattacgtagcgatttattgtttaattactaatcaatttcatacattcatatagtttattcgcatgagggataacctgaccacacacaaggaatttatcgcggcggttcaagaacaactcatgggattcatcaacgaagaaatccttgatcctaagggtgaattctactacgacggaaacacaattcaccggtccttagcttctgagctagcagcgagtactactacatcgaaatcgtagctagctaggacatataatggattgtaataatacatgactacatatgtttctatatgcatgtgtacacattttctataatgtaaatatatttctggtcatatatatatctatatacatatgcatttgcataacatatatatgtataaatacatatatattatgcatgtatatacatataatataatataatatatatatatacatatatatatgtatgcatatatatgtattgaaacaattatatatatatatatatatatatatatatatatatatatatatatatatatatatatatatatatatatatatatatatttgtcccggttggtaacaccaaccgggactaaagatggctcagcctgccacgtggctgagccatctttactcccggttaattcacccgggactaaagatagcgatctttagtcccggattggtactcccggtttagaaatcgggactaaaggggggttacgaaccgggactacaaagggtttctccaccagtgattaatggagttatgtttcctgtccacacattctatcctcgcgcgaagctacccgtatttcctgaacaagtttcttttatttaagttaattaagaaccgtaagcattatgaacttccttttgtggcaagtagttggttctgaacaattttgtatttcatgtgatagtgatgccattgagatactttagaacttggcatgctcgacacaatgttacctaaaggaatctcttcagttgctgtctgactcatttgatcatcctgcctcggttttcactacacctacgaatacaatattggttagcaacgcatctactaacggcaagtgctacgataaatgtgaccaccatctttaaatttatttatttttttcactcctgaactgagagacaacttatacaatgtatcacctctggtaccaatatctttaatactctcacatctttcttaaaatttgtgtggaggttacttcttgatttaggggtggctcatcatctatctcctttccatctcatcactcaatccaatgtggcactcttagaggcaccatatttaccattgtagtacttgccataatctcctccctcacacaaaagagatgacaacattcaccgtcgggaaatgcatcaccatccttaccctgtggtaactttattcccatccttgcccctgcacggggaataaatccccgtggggtctttgttcctgattaaaacaatatatgcatgtcaaattatatatgcaatataacatatatttacactttatattaatatatcagcatatatctagtaaagtatctactatctactgctccctccattccaaaaaagacaaaccctgtttccgtgcccaatgcttgaccgttcgtcttatttgaaaaaaatataaaaaaaattaaaaagacaagtcacgcataaaatattaatcatgtattatcatctaacaacaatgaaaatacaaattataaaaaaatttcatataagacggacaatcaaagttggacatgaaaatctagggtttgtcttttttttttttgacggagggagtacttcacatgataaaaacataatattatcattttttttcccagggaagtgctacgcctccgcagctaatgcagacatgtggttttccgtccccaaagaacaaggtgctttagcatcatttggggcctgtttagattcctgtcaaaatgtttcagcatgtcacatagaatatttggatatatatatggagtattaaatataaatggaaaaactaattacataaactgcgtgtaaattgcgagacgaatcttttaagcctaattgctctatgatttaataatgtggtactacagtaaacatttgctaaagatggattaattaggcttaatagattcgtgctcgcagtttacacgacgaatctgtaattggttattaaatcgtagactaataacacaa

SEQ ID NO: 22146 - DNA, 9267 bp, Oryza sativa
tcctccgcatataccagcgcacagctcctccttggtcttcgccggcgagcacgtctcctcctgtcatccccgttgtccccgccacggtaccgtgtctggctctactccacgccgcgcccgcaacatcaaagggaaggagagagagagagtttagtactagttgtactccatatgacatgtggggcccatgttattcttttatttttttcggattggaatgccacgttagcgccacatgtatgccacatagaaccaaaaccgttccggtttggagggggggggggggtaatttgtccggttttacaagtttagggtgtgaaatatctggtattcaagtttagggtggtaaatcgggcgaccgcgatagttcagggggtaattcgtactttttcctactacacatcccgtttataagtatgtgtacaaggttggatcttatgttaaaaatctttaaaatttctatgtttgaaccaatccaaagaaatttcatataggatttttggatggatattcttttggtcctaacaatacataggaaagaatttctatagggttgaattcctctaaaattccttaaaaaccatttgttctaaagtagccctaagtattgcactaagcatccaatgaaacatatccgtatcttatactactgttttaagttctaaagtaatgtttcacccttctattacaatgttgcattgattgtctagtaaaacacagcacgttcgattttacagttcagatcgaacgtcaacgtaatgtccttgagaaaaaagaattacaaaacataaaatgcagggaaagacctaagagaatgcatgattagtctacgtttaatacttcgaatgtgtgtccgtatatccgatgtgacacgcctaaactttttaccctgtatgtaaacacaacctgactttgtatgctcatagcaggccaaatgctatgttatgtccaatgagcagtaaatttggtgagacgcattaaaaaatattagtataatctaagatggttcattatatggctactcctaggctgtgtttgcaatcctggattcccaacatgcttgtgcaggtttagtagtcttctatgaaattagactaatctaaattactactccctctatcctaaaatacaagagaatttagttgaatgatacaaagaatttacacaataggtcaacgttatctttttttatgctagtcactattttttttaaatcttcattttttttagtttataagaaagtccaaaaccttacgccgaaaaacccaaatccataaactaatataaaatcccccatactccgcttcttccttcccaatcactatcctccgcctccgcctccacctcttctctctaccaaggaatgcccaggccgtgtggcaaagagctctccgatcgccgcatgtgatgtgagcgagggtgtcccgatctttcgatgagaggataagtcgattggtttgagcgacgttggcgatccgattacaactatccagggatgttgtgccttagcaatcgttacaccaactccagaggcggtcatgaatctcgacggatgcacgataagcccaaccacgaggtgtttgttcttgcaagcaattgagaactagcaagaacaagatgaacaagcaactcaatttgtgaatcaaaagaagatggattgtgtcgatgggggatacccgtagacaggatatagagggtattggggtacgccggtacgagcatctacgtagtacgacatcaaggaaacaagagacagagattatactggttcaggccccttgataggtaatagccctaatccagttggtatgggattatatagtggaaaccacggattacaaagggaataacagaactcgatgataccgacgagatcgtagtcgaattggttcgaccagatcacctggcgacttggctcctgtaggctccggcttcgtaggctgtggtggatgtcttagctatgagattcgatgccttaggtcctcccgagggggtcccttttatatcgcaggtcaggtggtctccaagtaagactcggagacatcggaccctgtatgatacagtgacgacccagtcctatacgggtagaaacctttccattggtggacttcgtgatgaatttccttagcgtatacagagaacgtccgtacacgcgcagatgtaccatattgccgtatagcgtacatccaagggtagagggtataccttatctgtaaccctgatagtagcccctaacttctgcttaaatgaactcatgtaaccgatcgcgacttctgatgttggagttgttgtcattctcgactggtcgatctcgatgtgagaaccgtagagacaaggagtggtcgacaacaccatgcgaagttcaactgttatgagtaaatttaaattgaagtccaaaaaccgcctcgcgtaacggacccagaaatttccggcggccatctctctcctttccttggaattcgcaccgttggtagtgcgcctatttaaggctgttgtgaaaactttctagcctccaaacactcttcgtcttctccgcttccacgcaaaccctaactcacttgcctcggtttcttctctggcgatctccggcggcaatggacctcgacaagtccacttctaccagcgcgtccttgaagaagttgcaggaggagggcgctctccccggtcgcgggaccatggagagggaaccaggaggtactgaacctgaacccatcctgggccgcatggttgcggttgaggactatattctctgtggttttcttcctccgccttctgagttgttccttctcgtcttgaatttctacggtctttctctgctccatctgaaccccaactccatagccttcctcagcattttttcccatctttgtgaggcctacattggggtagagccgtttcctgacctcttccgtttttactacgagttgcgctggatggaacctaagaaggtatccgggtgtgttggtttccgacttcgggatggcctgaagtcgcgatacatccccttccagtgcccctcttctcgtagtaaatggcgggcgaggtggttctatcttcagatagaaaattcggatccagtcttcattgtccctgaggaacaaccagacaagattttgtcttggaccgccaaacccgccttgaccccatcccttcagtctttcatcgatatcatcgatgacctccgagtgagagggttgtcggggtatgatgtcgctgccgacttcattggtagatggatccagcagctccaggctcgagcccatccagcttgactactctgggctggaggacgcgacccgggtttcttctcggggtatttttcttgtattctgggttcctttccttacgtgcgcattcctcctgacttatcgaaatttggttctcgatctacaggtttgaacagcgaaaccgtggagcgctgtgtcggccaggtgatggtcagtggccccatgacggcgagcaacgtccccgcctccccgcccctctttgagagaaaggggcggctgagcgcgaagccgcaatcaacgtgagtgtaatcgatgaccctttatctttttcctcttagatcgcatcatgacttcatgttgtgcaggctctccctcttactgacgtcattgagccgctcgtggaccaccaggcggcggcttcgttgaaagagggcgtcgccctagaggcgtccgacgtggccattgccgctgttgctgccacgactagtggcggcaatgttccgaggaaagggaggaagttttcctccgtgctcggcaaccgccagaagacgcctaccccatcggtaagcctctttggttatcgattgcgtagtcagaagatgtcgccctcacatcgtactcggtttacttcggcctcgaatgcgtctcccccgcctccacgacgacagaggctggtgacacttggcgagaagtaagtggacgaaatttgaggcccttgacttaatcaaattctggcagcttgttataatgaccaacatggaattctttcatagggcggcacgggcgaaggcggcgcaagatgggtctagagggaactccagcgcgtctcctgcagtggcctcgacagatgacgtggtcgtgcccaggagtcgtgaggtgacgcccagcggccctgccagcgatcttgtgcccgctcgaggcccgcctgctgacgtcctcacctgggaagagctccaagtcgagatggggcgcatcctcgaggccggcgctcacggcataagtcgcgagatcgcggaggcaagggcggcggcagcgtcgtcggcgaacgaacgcgccgacaagctagcgcgtgacctggcggaggttcgcgaggacctccagaaaatgagggagctggtggccggcaatgagcggcaacggcaggggctcgagaaccgcatgtcggaactcgagaacaacctgtcggagatccgtggttcgctgcgggtgtggtgtcacgaccaccatcccggcgaaccctgacgagttctcgctgacgtcttcgctcgcggaactggcgacggcgatgaaggcgatcccctccaagcacgcggccaagatcggggaggagacgtccaacgggatctacaccggggcgtgtcacgtccatgcctctggtttttgagggggtgattatgatccaggaatggtgcactgtggtgagttgtgttatgcagagggtattgtcacagcctctattcgggtacttttcagtatcgcgacgcatagtagacatgatgttgaggctgtgtcttgtgggtacagtggtacacctctggccagagtaaaactattcgaatagccgtgcccgcggttatgggcgagttgagcaatgtttttcgtgattagtctcacacctctcacaataattatggatgttatacctggtaataatttgcttagctcctggtttggagttagatctgttcagccgggtatggttgttcagaatggttgggcctgtgcagcatgggtgtgttgttcagtgttgattaaaatttctgattaattactccactgttttacttctcttaaatgttttgctaaatgctgctttcgcaaatgagcctatattatgccatcctttggtatccttgtgcacttgcatatttgctgtgtggcttgctgagtatgtcatatgctcaccttgcaataatcaatcaacctcagttgaagaaaaaggatccagaaggagaagacgtttggcttataccctagttgagctgcctgtgggagtggagccggagcttcgctagattttattttccgcagcagttttcttcatgatgaggactaagtgcctcataagtaagtatttatcgttttagtcaatttgatgaatctgtatattaaattgtcagtttgtgtacctcggctgattcctggacgaggattttatgcacaaataagttcggaaattactagtgaattttcgggcgtgacaaatacccaggaaagcctcacaggcatggatgaaattacaatatgaactatggaattggggtttaggtgatgcaaactaatcccatagaactccagaatcccccggaagaatcttgaggttggaagagaaaacccactgtagaagaaatgagagaacaccacaacttcgtgtgtgtcaggggtcaggaatgcttcgccgcatgccagacgctatccgatgactctttcgctggaagaacaccatgcgccaccatctccttcacgttttcctccgtaacatcggagggtgcccattaactttcgaaggtttctctttcctctgccatggatgtgagttgaatgatgcgatttgatttggaagtggcaagaaatggatgggagatcgatgcggtggttgcgcggaagatttttgtgggagctgtgaagctctagagagatagattggagtagatctttgaaccctagctttcgccggtgtggttttgcactatagcagaaaatggggaaagtggcgaaggtttcggcggggaagacgaaacgacgccctgtcttcagcatttatttcgctagggtatcgggagtgctaatgggcctgggcctaaacaatactttcagcccaattttgttatcagcgtggctagttgtgatccttggggacttaggcatttgtttttgctttggcaacacttgctcatggtagaatagcccaatgatgttaaaatccattttaacatagttagataattctttggaattattacgatgcaaataaaaaggtgccaaacagaaaagtgctatactaattttgtaggcctttttaggctacaaagctgttcaggtcgcattgagatgactgatattgaatagtcactctcggcatgttatatgcttactttggtaatggcgtgagtcatagcttaggctatttagactcctcgtttatcatgctttataccacatttgatggatctttttgagagtttttactcggatttttgtcatatgtgttgatttatagacctttagagtgtttctcactcgggcctcttctatatcttctttttggcgtatcaaggctaaagcagtcggctggatgttttatcagacgccgcatatgcttagctatatgatcccttggatgattcggttgtaaaaccactcggatggatgttcagatgcactttgactatgtgtttagtttttatttaactaatcacatagttgggggctacacctaattaggtgcatctagtcgatgcacctgatttttttattttcagcccatcacagtctttgattttagtactcaggagaccaaggcaaaggaagttgaagcactcggatcaccattttgaattacgagggaagactatttcgtcgactgtaaaggtctcaggggctactgtggagattatggatgccccatacctagacggcatgtatatccgactgggtatgggttgccatgtatagatagaatatctttaaagggactcgggttaaattccaaacttgtatgtcaaggaaaaacccgagatcctagtcggttacgattgtatcttatctgtaactacctattccgttagggatatgggctgtactttgtaatacggaccccttcccctatataaggaggggtccgggtgcctcttggggtacgatttttctcccagatcatacgatcaataatacacttggcggatcaatccccggacaggagtagggtattacttcttattaagaaggcctgaacctgtataaaattccttgtttctaaacccatccagttttctagcttgatagccaccccttttagtattgccgaaatcttgtttcgacacgcctcttcggcttcccgtgtacatacaaatttgtctagttttttcagcagagcgaagaaaggttgtcctcgttctcccatccaagcgacgaacctgcttagtgccgccatgcatccggttagcttctgtacttccttgagtcttgtaggcgacttcatgttcttaattgccttgatcttctcggagtttgcttctattcctctgccagagacgaggaacccaagcagcttgcccgatggtactccgaacatgcactttcagggttgagcatgaggcgatatcgtcggagattgtcgaaggtttcccgtagatcgtcaattaatgagtcgcctgtcttggtcttgacaacaatgtcatcgacgtaggcctcaacattgttacccagctgatcattaagtgccccttggaccgtgcgctggaaagtatttcatgcggttatcagtccaaacggcatcttaacgtagcagaatacaccgaacggcgtgatgaatgctgtcttctcctcgtcctcttttgccatgttgatttggtggtagccggagtaagcgtcaaggaagcttaacagctcacaaccagctgttgagtccactagttggtctattcaagggagagggaagtgatccttggggcacgccttgttgaggtcggtgaaatcgacgcacatcctccacttcccgttggccttccgcaccatgactgggttggctagccactctggatggagtacctctctgatgaaaccagctttgagaagtttgtcgagctcttctcgtatggcctatttccgatctggtgcaaatctccgcagtttttgtttcactggcttggcatcgggtcgcaccatgagtttgtgcttaatcacctccctagggacccccggcatgtcgggcggctgctaagcgaacacgtcagcattgtcgcggaggaaggtgatgagcgcgagttcttatttctcgttcagtgatgccccgatcttgactgtcttgtcggggttggcactggagagtggaacgattttgattgcgccgtctggtttcggcgtcttagttgttttgctcactttcttgggtggctcggctgtggcgggtgggctgggcatgtgctcgaccatgtcgaggctccgcttgtcgcattggaccgccagctttgcgttcccttgaatagtgattgttccctttggcccgagcatcttgagtacttgatacgcgtagtgagatgcggccatgaacttcgctagtgcagttctcccgatgatggcattgtatgctgtgtcaaactcagcaacatcaaatgtgatctgctctgttcggaagttgctcgcttggctgaaagtcacaggaagcgtgatcttgcccaatggcttggacgatgactgaggattgatttcgtggaatggttgatcggtgggtgtcaactcacttcgtggaatccccattgcgtccaaggtgctggcgaagagaagaatgaaggagctgccgccatcgatgaggactcgcgctaccttgatattccgaatagtgggttcgaccacgatcggatatcgtcctgggataacagcagccttggggtggtcctcatctgaaaactcaaacttctgttcagaccacttcatcttgggtgcagccccctgccatgtcgaacaaacttcacgctccactttcttgtattctcgctttgaggagtacgtcatggaacctccggagatgtgcgagacatgaagatcggaatctgggtacgccgagtccgagtcctgagtggaagccttggcggctttctgtcacaccctgaaaattcaaaatatataaattgttgtttaattggaattttttagaaataattttaaaaagtcttgaaaagaagatctaatttttaattaataaattccaatataaaatgggcccagataaaatttccttaaatactttgcttaatgctataattcctagatttttctgggatttatttgagctaagaaagtattttttaataaatgaaat

SEQ ID NO: 22147 - DNA, 6675 bp, Oryza sativa
atccaaaaagaaacttgagtttggtacacacaattttgttgaaatatgcaaaaattgttttgaaaaaaaaattctagtttccaagatgtaaaaaaggttttggttttcatgagggcacccactgttcattctgccataatacaagtctacaacttttcctttgtaccttcaccttgaaacctaggatgaattttaaagggagtttcttaggtttgtacaaccttatatgttctacagtcacaatgtttgaattctttaaatcattgcagcatgtcaaaaatttgagttttcagaaacgggtgacatgggagactggacccttgaagattaaataattatgatgctcatgacagcatatagtcattgatgagttgggctgttgcagtaggatgaatactagggacctagtaaagctttctgttgcaactgcattcgcttgttcccagttggctcatcccttgtctaactaggcctcgatggttgcagctgactatttagcacacacaaagcatgatgaaggagatgggttacgatgtttatgcttgctgaacttgtatggtaatgtaggatagtaggtgggctggttgatttgttttccctttgcccctttccttttattaatcacttctgcctgtttttctctctgcattttcagtttcaatgctttctatggtattaactcatcacatgcctgatgccatggcatgtgatgagtatgtgtcgtggtggtctggtaccattcctcgctacctttaggaaccatggcgtggatgctatagcaaattatcatgaatgcttaaacacatcatgcccaggcaaccaattctgtctttttccaaatccctaaagcatggtggtagttgctttagtaatatctcatacagtcatactttccatgcatcatgctgcaagtcttcatttgtttagtattcttgatgatactctgattcagggagcacctgtgagtagaagtataacagagttaaagtcactagggagtatggcgttccagagcaagaactatcttcatgctgcaggattctacagtaaggtattaacaccatatttttcctgtgtgtttgccttttccaacctttttctcaattgtgtaaattatagtaagggggtgtttagatccaggggtgtaaagttttagcatgtcacatcgaatatatggatacacatttgaagtattaaacgtagtctaatagcaaaacaaattacataatccgtatgtaaactgcgagatgaatttattaatcataattaatccatcattagcaaataatgtttactgtagcaccacattgtcaaatcatggagcaattaggcttaaaagattcgtctcgcaaattagtcgcaatctgtgcacttagttatttttttagcctatatttaatactttatgcagaagttcaaacgttcatggagagggatttaaacagggcctaacttgtgttgttcactagttcactagttgaacctggcaaggatcatcggagtatatgatttacaggggttctgatatggcttatttcgtattattcttgaacataaacacgtgggacttcaaacatttggaaaatgtggtttcagaatgttttaaaatgcaatggaatcaatttgaagcattttgcaaaagaaaacagcctttcatgcatgcagattttgatatggcattggctgatttctaagattctggtcaagggacagtgaattccctgagtgcatctgggcttcagttggcccagttatctctagcaactggataggatccaaataatagccagctgcattctttatgttatcgctttgttttgttttaaattatctggggcattcctgcatctgcaaaaaaaatatatgttgatgcagtcttacatttgccttattgaggatagtgtccattttgtgataatggaaacgtaaacgtgtattcaccaaattatgtagtgcacggcagtactgatttttttttaccacctttttatctcgtgtcataaaatagtgctgatttggagttctgtgctttgtcagaacatagaaaaactatgttagacaggaaaattatcttaaatatcatattttataagagagaagctagctgtggaacgaactatagcaaaatgtattttgaatccagggtcacccacgtcccccttcagggaaaatcaaatattacacatgttcctgtgattttaattttctgagaaaattcatgaatatagtgcatataaagatggcaaaaatttgctataggacactcataaaatgtgtaattggctgagagacaccgtaaaaacgtgacacagctgatggacactaaaaaaatggtgtaattagctataggacatcagagacaatattttataattccagggtcaaaagagatgaaaaaaatttcaaaatggcgagattgcccctggcgctatcttctttcacctgaaatcacaaaattagctgggagcagccgccgcgcaaggttgtcgacggcgagtcagcggcggcgcggagcgtgtgcaggaggcggccacgcgcgaggcctgtgacggcggctgccacggcggcgcggagtgtgggcaggaggcggctgcgcgcgatgcctgcgacagcggcggccgcggcggcgcggagcgcgtgcaggagctctgctgcttgcctgcttctgctgcgcagcagcaattgttgtcttcggtttggatatgattcgcaggatggcgaacttgtcattgccgtcgctgcgggaccagccgccgacgccgatgaggtcgcgcaggcgccagcgccgcgatgatgaggacgacgactctcagccggcggaggcgctcttgggaacctgtcgtggatgggcgagccgtgagatgaagatggcgccaggggcaatctcgccattttaaaaaatttctcacctcttttgacccataaattataaaatattgtctccggtgtcctatgctaattacacaatttttgcagtgtccatcagccgtatcacgtttttgcggtgtctctcagccaagaacatattttttgagtgtcctatagcaaattttgcctataaagatgtacaaatctgcaaaaaataaattcaaaatccatcctggttttcaaggtaaaaaaaggacatgttgcatcattaacaaacgagcaaatagtagacatctccatgaacagcgctgcttgtctccttttgtatcttgaaatctaggaaacaatgaattgattttttgctggtttgcacatcattatgagctttttctggaatttacaatacactgcaacatgctgaaaattcaaatttatttgtaaaggggtcgccagtgaccctagacgctagaattgcattccagaatatatctggtcaagtgtttcttttaaatatttgtatgaatctatgcacaggaatatgcagatattttcatatcttgttttggtagttctgaaaattgtgattttttttaaaataaaatcttgttaatgatgttgtttcttgttggatgcaggcaatggaccttgaccctgatgatgccaccttgttctcaaataggagtctttgctggcttcgcagaggtcatggaggcaaggctttgctggatgctcacgaatgcagaaaaaaacagcctgattggtcaaaggcctgctaccggctgggcgcatctctgatgtcactgaaggttagaacttgggagttatcctttttggctttgtgctgcaaattgttgttttgatcatgttcttttgtcatcaggactatggaagtgcgtgcgatgcactttttgatggactcaaattggacccagcagatgttcagattgagaatgcgttacggtatcccatctttccctttgtatacataactaatgtagtcagtaatgcagtaatgtttaccatgtgccagttgctagtctctatgaacaatgaactccatggcttagctcatcttttgtcgttgtcgttcatatatcaaaatctttgtgggttcaaggtcgattcacactcaactgcaaaagagttgtgaacgtgtttctttttattatggtgttttgggtttgttaggattttgcgaatccaatgtgcatttcgatgaaagtcaatgcattcatgccataacatcacacttacgtaccttccatctccacaactatatttctatgaattatttttactacatctgtcccagaatataaaaatttttagggttaaacatgggtattaaaaaagtaggtagaattaaatgggagaagattatgattgattgagaattgcaagtagttgagaaaattgaatggtggaaggtagtgattggttggtaggagcatgttggcgaagaagttgtattttgggacaaaccttaagtgttagaagttgttatattttgagacgaagggagtattttgaaggcatagtgtttctcattaccatgtgttgtcacgtaaggttacccttaccgctgttaactaggcttaccgcggggtacggtaatggttactggtggtaggatttggagaattttgaccaaattcaaaatttcaaaaaaaaatcatggatgtagttcttgttttttagtggcggatggtgaagaattttttttaaaaaggagtaagataaaatcaaattgagtgcaaagccgataatagtttagaaaatagaaaaaagaaaaaagttattgggccttaaagttgcactgtgcaaccggcccattaaggcccaatacaagagaaaatatctccataatataaaaaaaggccatgtctaatttatgcattttacattcaaaagttaggttagcaagtatcgtatatattcttctaattatttctaatttatacttttagtggtttttcaatttttttagcattattctgttcagctaaacaacttgcggttaccgcataaatatcacggttaccgcatcaaaccgtgtccaaacctccaaatttttgaattcaaatattcgccgacgaaattcacacggttttaggtggttaccacatggtaaccgccttactgcgggggctagggatgctatgtggtaaccgccttactgcgggggctagggatgcaagtgggtagtcctattatccgcataaaaacctgcttgctagtttatttcttatatggtagtacaaaatttagaagaaaaaaccagcttacccgccccacttgcatccctacgcgggggtgcaataattcccttctaaacggtaagagaaaccatggttgtcaagcattggcaactacaggccaccacgtccagcttaaagaaaatgtttttaggattgaatgtggtcaaaacttctgtaccaatatctctatagtattcatactgactttgttaaaacgatgtctagattgtcctgaaaataaatgttttcatggcagtaatttttaataggttataacatcatagtacaacagaaactagccttagaagttccatgttccaaaatgagactcattcaatacttgtggttcttggaatatgcagggaagcttttcagaacttgaagttatctcgaagcaccaaggccaagtgaacttgttcttccttgatggggattcactggtggagaaaccatctttcgtcggtcggccgatttccacaatagtcccggatgcaataaaaaccggggctaaaaatgatctttagtcccggttcaaaagggtagcgggcatatttgatctttagtcccggactaaagatgatctttagtcccggttcgaatgctgtcagggcctgtcaggccccaccgggatctttagtcccggttggtagagatcgtaactttagtcccggttggtaataccaaccgggactaaagatcccggtgatctttagccccggttggtgctaccaaccgggactaaagtcccacccctatatatatgtcttcttcctcctccagctgcccgagcaagcttcaaaatttcttcaaaaaagaggggaggtcatgccaaaatttctattgaatttattttggtgattacatacaaatcggaggtgcctaaaaggtttgcaacttcatcctccaatgttttttttgtcatactacatttgcacctatgttttgcacactttttttggctccaaaatttatttgtaagttgatgagagagaaaatgtgtgtggggaagaaagaatatatagaaatttagttcatttgctaaacagggttttataaaatagttgagaaggaaaactctagtgaaagttaatcttaaataatagaaaacaaactaaaatgaaaattaaaagaagtaaaacacattaaaattagtttaaaactttacgaatagtttttaagaattatttggtgtaatattttatgatttttgtatgaataaagatatcttataattattgtatgactgtcattattgtaagaataattatttgtgtacggtttttttgactcatgtagatggatcggcaatggatgtacgctgaccggcggtccaaagagtttattgacggcgtgcactattttttgagagtggccgaagctaacaggcaaaggggttttatttgttgtccatgcaataagtgtaagaatcagaaggagtattctgcatccaggactattcatttccacttgtttgagtcggggttcatgccaagctataattgttggacatcccacggagagcaaggtgttgaaatggaagaagatgaag

SEQ ID NO: 22148 - DNA, 3414 bp, Oryza sativa
gatcatacgtctataatgcattgtatgtcctagaatagggcccttttggcgttccttcgtagatctacggatttcacccctacacacgaaattccactctcctctgtctcactcaagtgaattggtttcgagagcattccgccactttttggtgactttcactttcaacccgattcacccccaagacgatgttggcgcagaagcaataaaagtatgatctcgttgtcgctttcatcaacccggaacgatagtgtaggcgagcccggatgtagagatggatgatgtgtaaccaaagaagcagtgcccaaaatgcctctagaaagatcagacagaagtaagacgagctgtaattgtacgtacatgtaaaggagcttagtatggagttgcctggattagatcctcgttggtccttgaagaagaaggcggaagacttaaacccttcatttcctaatttttggttcggctctcctaaagaattgacttcctagagccacatgtttcgtcgtggtgctgatcgcgtggtttgcctcttcgtccaattttagaatactttttgattttttagtcccttatcaacatttcatcaatatctccatcttccttgtcaagttccctaaccccctttatagcttcacgctgtttgaatagttccaattaatggaatcaaagtcattacacgagtgagtttagcaagtggaatatctgactttgaaggagctgctgcgaggtgtatggtttgagtacaattaattcatttttttatgtatatgtatatatatgtatatatgtatatatatatatgtgtgtgtgtgtatatatatatagacatatatatatatatatagaagaagatcagagtcaatactagaaaaatcatttttctagacgatgacatttttttctaggcaggtagggctctcagagctaaatgaccacttgcgaaaattacaaccgtggggtgaaatcgttatccgcctgcaaaaatctattttcgcaggcgaaccacttaagcgatccgcctgcaaaaattccatttatttttgcaagtggacctcttaagtggtccgcctgcgaaaattggcgtggcatataaatagatgcgacatcaataatattttttctaagtcctatcctctcttctcccccagctctcctctctccctcagccctcagctctcctctccctaagctccctcagcgaccgtgggcgttctggggggcggcgacggcaaggcgcggggccggtgggcaacgcgagcgcgaggtcagcgatggcgaggcatgggtgggcgacggcgatgcaccggggctacggcatccaccctcggcgcggctccccttccctcccttctagatgtggcaaagagggaggggagggcggtggtggctgcggttccactacctcccagatccggccggagggaagggggagggcggcggcggcggttcccctccctccccaggtctggccagaagaaggggggagggcggcggcggttccccttcctcccaggtccggctggagggagggggagggcggtggcgagcggctccacttcctctccctctccctcccaaaaccctaacctagatcggccggaggtgggtaggggcttgggtgggattaggcccataagtttgtatacccaagcactatatatatttcactaattatccttgccaactcttatctaacttgtggctaaggattacatagtcagataaattgtgacatgtgacaccttagttgtaaaagtttggtaaattaaaacaagctttcgaacagcccattcttcaacaaaaatatttcgtagaggcatttaattattagccctgcagaatatcgaaaactacaatttcaatacaatggaaagtacatttgtagtttgctttgttttatatttttacattaatcttgatgtattgttattattttaaaaagaaaatcataatctcataacagtttacaacaagtaaaccttgtttttccacttctaggttagaacattattcgcttcaccataagaaaagaaacatacaagtgtgagttgtttgtattgattcggtgttaaataaatgattgatagataagaaaaatattagccacttgacaagtagactcccccttagaatatttaattaactagatatgttaaatattattttatatttaactgtccaagctcgaataattcgtagtaccataaagctatccctcattatggtagcaacgcaagagtgctgaggtcaccttgatgacgtttaagaaaaacagagagatcacccagcttgatgacgcagcgaaattatcctgtttctatattgaaatctaacaagaatcagaaaataaaaaaatattggagcggttaccatatgatcagcaatttgtcgagttggaatagcatttacctaaaccactaataaagcatatacatatgggttgtagaaattcaaagatatgttttaactctctctttttttatgtgggcatatatgccaaagatgatatgttggcaagagacattattgaaacctaattattaatgacctgtttaggacttcagttagcttccccaatgtttttttttttttttgaaatgcacatggcattctcttcatctggaagctagactggaacattttgagctgtgccttttggtttcaacatatgggcaacattcccatgccacacatccataaagaacatcaatctggttaaagagatttgataaacaagacagggatttgggatatttggtagtactagcattgtacgcagtggcgttttgggccaattggaagactaaaaaatacagtgcatggttttaaagtcatgcgtatgtgatttataatcatgtaaaaatattgtttatatgtgttgtttactattggattattttggttttaatttgtctttctacagaaattggagaggcagggaagttaaagacatgctgttggaagacaagtggcaggctgacagcagaagtttcaaagaatcggagaatattaaggacggcgggatgggcgctcgctcgctgcgtccacgtcggattttgctacagtagctacagtgcgcgcggggtggaaattatgcgaaaaagccctccgatttttcgtaataatgtataggtccctagcgtcctgtgtttgaagaggaataatcgcggacaggggcttttttgtgatatgtgaaagaagaggggcttttccgcaaaacagcatccactaacgcataccccccacagccctagctgccgcctctccctctcccaccacccctcccgcgccgccgccgcctgcgcctaccctcgcgccgccgccgccgcctcccactccccctcaccccgtccacgtcgccgagcgccaccgccgcctccactcccgccgcctgcgcctaccctcgcgccggcg

SEQ ID NO: 22149 - DNA, 2932 bp, Oryza sativa
tggcgacgacgacgacggtcgatggggtcatttcctccccacagaggtgggggtccaagctggctgcggcaaatttagtttgttcacgctgttcagaaacggtggttgcgtttcatgtgtacgggctgcgttgattggtgcatgtgaaggcacgtgtctttgagtgtgtccgtggcagcttgggcggtgcatccgtggtaaagaaggaaggggacggcatggcattttctggatgcactcgcatttcctcttcgtcgttggccgcgccattccgtgcgatttttgctccgatatcagcggctccattgttttgcccccctgatttggtattgaatcgatgctctttctatctcagtgccaaatctgtatgcctggtgtgatttcttcctccttatacattttctccctggtaatggatggccagttaattggtgttggatgtttgcttgctgttcttcctcgcttgtctctgcatatcatagcatggtacaaatcgttcagggtgcctgctcacaccactcaagatgctctgattgggccattgtggtgtatgccagtcgagtctcgtcgctgcgggagggtcccaccagtgcggccagtgtcaggtgcactcaccaccactcgtcgttcgagggcgggacagagaactcgagcatgcctagtcaatggcagccggtcatcggggctgcgaggtgattggtggcgtctgtgcgtgttctggcgagtagtcggtcccacggctttagccaatcatgctccactgttgttcgggccccacgtagtcgtggtccatgccaattgcagttggccgttgtagcaggctccgccgatgtgccctttttccggcgcagtgttactgctcggtgtgttacgtcggagagctcgaggatggcctccgtcagagcactgatgtgttacgtcgtatgctgtggctgaccgatggccctgtcatctgtggggtcctattgacagcctctgagtatgttgttttttatgttacatatttttttgttttgtttaccagtataagtagctcattgcctgccaatcttctctttcccttctgctttttcgccatttcctttgcattgccttttggtgcccgttcgctgttcttcttgtcgtctgttctagcccattctccgctgttgtgctttcttcgttcgatcatgaaccctggggggtgaacgcgtgggctggtgggttttctgtatctagcctagctgccttcctttgtgtctgtgccgtgtgtttcctttttatcctgtgattaggcttggtgcatctcaggtagccatgtactggcctgtttgttgcacgagacttactgtcacagagtttttaggttttaggcgattttccccgtgttcatatttcccttttcacagtggatcattgcttatctctgttgttcttcttttagtaaatacttctttcagtaaatagatggtggctattacatagatgaagcacacggtcgttagttaatgacaaatatcattgctttttttttcctggttctgattcattattggatcatgtttcgccactcagagtgtgtcccgtggtgttttcttttcgtgcagaaccatgtggttcatttgcatttttgagtctttccttaagtgcatctctgtacgtttacatgtttttttttgtcccttcacatcgattttttttggcgcaggtgcttattgtcgcggtcaggtccgtgcgatacgttcgttgctgttgtgctgctgttccctttaccatcagctcctgttcaggtgagctttgtttctttgctatttctttggggcagacatcctttttgttttgtagtttatttgtgccttgtggtttggtgtatgttctttcttttatctgatatccagcttaaattacattcttattccctgcaggttgcggaccgcatctcctgtgcccgtacatgtcggctaaggtataacaattggcctttgttgcttcagctatctatacattattcgagctgcgctgttccttgtgggttatatgttctatatgtgtgcacgacatttctgtttttctatgcgtttagttcctatatggaagggggtcgtgtggttaggcctgctcgttgacgggatcgccgattgctagagcgtagcagcgcttctcttagatgtatggtttgttgcggtttgttttttttagatgctttagattttatatcttttcctgggtggaaagattaaatcgtctgttgcttgtttagcatcttcctctaattcagctgccagcgaatatgtttgggagactgttgctccaccccatcagggtatgtgatttactgatctgtgtgcgactgttgttgtggcttgtttatatttatgtagtcgttgctcatatatttttctcgctttagtagacgatggatttttccctatctaccctgcatggtattcttcaaaaagacggcaaatgtgttcaaaaaaattggccatgaaacgattggaggctacaggtttttccattggatctttggttttctgcatatgttcttgctgacatggcttacatggatgttatatctccttccctataggcaaaaaaccttgccgtattgctcctgtctcttgcaacaagtttgacagtgattatgccaagtttttaagaggttgctttcatctctgattcgtttccattcccttgtttgcaatgccagcacgcttggtttaaacataaatttctttttttgaatgcttgcatagagacttcaaaggataggtgcgattatggccctcctgagtatcgctgccgtatgtgcgctgctcagttctggtaccaggaacagtgcaagaaagattctgctattaccaagcgccgtgtctgttacaacctttgttgcaaaggcgggaaaatttttgtccctccatttgcgcagccaccagaacctttgaattcactt

SEQ ID NO: 22150 - DNA, 687 bp, Oryza sativa
tactgttgccactatcgtcgagaccagttcaacccatatttatgttgcggtcgtttgtcctcccaaagtcaagttgatggttttgtgtgttttgaggagggtagattgacatttatagatgaacaccagggcgattttagatgcgaacacgttcaaggcattgcagatgcagtcgccaaaggttgtttagacggtaatagtgttggtaagcgacgaattctccctgcaagtttcactggcgggagaagatatatgtaccaaaattatcaggatgcggctgctatttgtcgtgtgtatggtgcccctgatgtgtttaccacttttacttgtaatccgaaatggcctgagattgaagaagcattgcgcattgagccagggcagcgttcgacagattgttctgacattgtttgtagagtttttaaaatgaaacttgatgagatgtttctgatattatggctggtgttccatttggtcgtgtgcgtgctggttagtgctctttttttgcccttaacttagctgtgctctttatggtctattgttttattgatttttatttggttgttttgcctatgatatgtttgtagttctttatagcgtggaatttcagaagaggggccttccccacgtgcatatactggtgtagcgtgatgcaccaagcactgacgccacaccatttgttgtggatac

SEQ ID NO: 22151 - DNA, 605 bp, Oryza sativa
aaaataatacggcatcatatttagtgacatatgccgaggtgtcgaaactcttgtagtcgtcgtggttggtgaagtagcaaagcttgcgaagtagaagcaataaagtttgccggtgccgaagataataaagatgaagtcgctccaccatggtgacaaagttgcatagctgtaatgaagtgaacacgagtcggcggtaacagaagcaaaccggtggtgaagacgcgcagttgtgaagataaaagcaccagtcggcggcggcataaccagtcggcgacggaagacgatgatgtccatcagtagtggtagctattagcggtgacggtgatgtagccagccgtgaagaagatagcatcagttggcgtcataacaggccagccgtgcaggcggtgacaccagtcggcggcggacgaggcggccggtcggtgaagacgtagacgcccaacaacggcggcataataggccagccgtgcaggcggaaacaccagtcggcggcggacgaggcggccggtcggtgaagacgtagacgcccaacaacggcggcataataggccaacgtgcaggcggaaacaccagtcggcagcgaacgaggcggccgctcggtgaaa

SEQ ID NO: 22152 - DNA, 2875 bp, Oryza sativa
  unsure (1)..(2875): unsure at all n locations
aggcgacggtggctcgcgcggcgcggcagcgggatgccgatggtgacggcgtggcagcggcggcgcgtggctcggagcgacgatgggacgtgacggcgacggcgcgcggcggcacggggcgcgagacgaagggcgcgcggagcgaggtggcgcggcgcagcagcggcgcggcagcggcggtggcgacggcgcgcggcgacgcgacggcgacggcgacggcgcggcggcggcgacgcggggctcgggtcgtggccgggcgcgcggcagaagagggtctagggctaggggaccacgtcgagcacttagagtgtaatgaacagtgtctttttcctatttctctcattttagtctatttcttatataaatttgcacacatacattttactcaatatttgtgttatctcaactaatgaattcaccctagattaatattactcatattttatttatataatttatttgaatttttaattagggttaattcttattccatcgcattttaaatttaattgatccaaaaatggttgcaataatattttatttatttctatccacacctaatctttactttaatttatatttattttaccagtttgtttttaaggtttattcctaattaactatttttactcacgattaatgaacttcgaaatcaaatccaaataaaataggtgaataagaccggcatggtgcaattaatttaaaagctttttggaatccgtatttttagagttttgattttgtcggtcgaattttcaggatgttacaaacctaccccacttaaataaatctcgtcccgagatttcttaccagttttctattatatgcgggtattccgttctcaagaattcttcactttcctaggtggcttcatcctcagtgtgattactccattgtaccttgtacatacgccacactttgctcctagtcctcatttcggcttcatccaatatccggaccgggtgttctggatacgtaagatcattgctaatgtgaatctcttccagcggagcttattcttccggcactcgtaagcatttctttaattgagacacatggaaaactgggtgcacatcggcgatatttttgggtagctgtaactggtaggcaacttctcctcgtctagcgatgatttggaaaggtcccacatatcttggtgctagtttcccgtttaccttaaaccttttcgtttccctcatcggagaaacctttagataaacgtaatctccctccttaaattccaggtttcttcttcgggtgtcggcgtaactcttttgtcgtgactgtgctacttttagacggtcacgaatcaggcgaaccttttcctcggcttcttggataatgtcaggtccaaatactgcccgttctccagtctcggaccacatcagtggagttcgacatcgtggaccaaacaatgcctcattgggtgacatctttaggcttgcttgaaagctgttgttgtaagagaattcggcgtagggcagacatctctcccagtctttgctaaaatccagagcacaagctctcaacatgtcttccaagacctggtttgttctctctgtctggccatctgtttgtgggtgataagctgtgctaaacgcaaggtaacttcctagggcttcatgtactttcccccagaaatgcgaggtaaactgtgtgcctcgatcagatataattttcttaggtacaccatgaagacatactatcctggtcatgtataactcggctagcttagcacagctataatttatcttaacgggaatgaatctcgccgtcnnnnnnnnnnnnnnnnnnnnnnnnnaaatggaatcatatcctgttgcggtcttgggcaatccaacaataaaatctatacctatctcatcccatttccattcgggaatcctaaggggttgcaacaaacctgctggtctctggtgctcagccttcaccttctggcatacgtcacagagcgttacgtactcggccacatctctcttcatattgggccaccagtacccttcctttagatcctggtacatcttcgtactttcggggtgcaatgaatatgctgatttatgagcctccttcagaatcaatccccttagtccaccctgttcgggtacgtagattctctttttataccacagtgtttccttctcatccattgagaattctctcgcacgaccagcggctatgcgctccttcacctcctggatctctccgttgtccttctgggcttcctctatctgggttctcaaaaggggttgaatgtccagggtgtttatccgtccacgaggtactatatgtaggttcagctaggctatttcctccctaagctcaggggccatccctttcattctcaggtgattgcaatagctctttcgactcaaagcgtcggccacaacatttgctttgcctgggtgatagtgaacctctagatcataatccttgattaattctaaccaccgccattgccttaagttgagatctgactgggtgaagatatacttcaggctcttgtggtcagtgtagatatcacaatggtttccaatcaaatagtgtctccaaatctttagcgcatgaaccacagctgctagttccaggtcatgggtagggtagttttcctcgtgtggtcgcagttgtcgcgatgcataagccacgacctttccttcttgcattagtactcctcccaatccttgccttgatgcatcacaatatataacaaagtctttcctattgtcaggaagaactagaataggtgcagaggttaacttttccttgagctgctcaaagctttcctggcactgttctgacccacacaaacttcttttccttcttgagtagttgtgtcattaagtcgagctatcttagagaatccttcaatgaaccttcg

SEQ ID NO: 22153 - DNA, 1237 bp, Oryza sativa
tcgcccgaagcatcagaccaattatcacccatgacttctggggttcgggttagttacctatctcaataaagtatatgattggtttgaggaacgtcttgagattcagtacgcctgacggaactcttctttattttttaaatttgcattagagccagttgaaaaacgaagaacctttttttgttgttacagttccttaagcataaccagttacgaccactgatctatatatatccagccgatacgagggtgactgtctgactacctaaagttgcatatccaagtatagatccctagagaagagaagcaaaggtataagccaagaccctaggaagcattactcttcttttcattccaaattcttcaataagactgtgcgaacaagcgatgaatctatcatatccgagaatactatagatattgaacgaaggcgttcattttctgtctcagaaaacataatccagtgtcaagtccagtcaaattgaaaatctttttttcatgaaaaaattttaaacttgacgtagaacattgtataaaaaacgagacctattcctttatggtagagatagatttatgatagagataaatttttttatagtattttattagtaaaaatggttccttcttctctttctttctttggttaagcgaaaacaatctcgagaaaattccttacttttccatttctttggaaagctcctactaagattagaaattccccaataaagctagcgatagccttgtttcggattttctagcgatgactagccctttgacggctcctatccctagacaccggcccccggtaccaatactagagatttgcccccgagctagccctcctattaatagggttgctttgttcacgcgcaccacgactcattcaaaagagagagtaaaaggaaggatttcccagaattcgtaccaactcggcatttcacgagttaccacacgagaaaatcctatctttcaagctttctctaactaacttcgccaattgtccttcgctccagatggtcaatgtctttagactagccatcagcccgattcaaacctgcagtcttcaggtcatgagcatgatgagttgaccaattcctccggctgttctgttcttttctttccttttgggttggcggagagagtaagaagttctttcattcctatcccgtgtctatatatatatatatatatatatatatatatatatatatatatatatatatatatatatatatatata

SEQ ID NO: 22154 - DNA, 7196 bp, Oryza sativa
ggagaccttgcgaccgtgtactgcttgtatttcgatatatcagtcacacggtccatcttgggaaaaacgtcctcgatcttcatctcctttttttccctatcttcctatccaaactagtgtgtaccccttgacaatttttctcaatctcattcatgccctatgtggagattatgggtaccccatacccacacggcatggttatccgactagttataggggataacttatatatataaaatatgtaacagatcatgacttgggtattacgtttccctgtatattatggaacagcctaaagtcctggtttgataagattgtaaagtagatttaggaaaccgataccgtattggttaaggtttctatcttgtaaccctgccccccaacctatataaggagggcagggagccccctctaggggcatgagacaacctgatcgtcagatcaatacacactcggcggattcaaatccccaaacaggagtagggtattacctctcattgagagggcctgaacctgtctaaatcctttgtctccgcatccatccacttttaggtctcgtgcgctacccccttttattattgccgaattcatgtttcgacagttggcgcgccaggtaggggctgcgtcgaattacccatcgaaaagtgtgatggaatcaactacagaagaaacggcgagattaatctcgatggctcaaatcttcagtcgggttcggtgttttgatctaactgttattagattaatttctaattgtgatttgctcttctggtgttttccttgctttctatgggctggtcggctgaggttaaaacggagctgttgacggcgatcgccaggagcagcgccgacggatgcgttgcggccaccacgccaccacgggcacatgggagcagccgcctatagcttgctcggagaaatttcacgcatgcatgagttgatttagcagattaacatacatgcacgatctacctaatcatgcatgcatatacttctaattaatcttctagtgtgtactaactagattagattagattaattttctaatctcagtttgatctgtgattccttattttgcatgcgccatggtcacctgagtctgattcccatcacgtaaagcctccaagttggatttgatccggactcggaccgtgatctgtacgcacggatggcagcctgcaatctgtctggtgacgtgcatgtgtggatgtgtgtactgttcatgctacaggagatcaatcggccaatcaaaaaatatatgcatgcttcatatatgcagacttacgtacacaagattaattttcttgatgctaattagagattgcttttctctttacatgtactgctggagccaccgtcaccgcccggtttgccttcgccgccgccgactggtgtctccgtctacacggctggcatatcaagccaccgttgttgggcgtctacgtcttcaccgaccggcttgccttcgtcgccgccaactggtgtcctcgcctgcacggctggcctattatgccgctattgttgggcgcctacgtcttcaccgaccggcctgcctccgtcgccgccgactggtgtcctcgcctgcacggctggcctattatgccgccgttgttgggtgtctacgtcttcaccaccggctcgcctttgtcgccgccgactggtgtcctcgcctgcacggctggcctattatgccgccgttgttaggcgtctacgtcttcaccgaccggccgcctcgtccgctgctgactggtgtccttgcctgcacggttggcctattatgccgccgctgttgggcgactacgacttcaccggcagcctgcctccgtcgccgccgaccggtgtcctcgcctatatacggttggtcacaccaccgttcataggcgtccatgtcttcaccgaccggctggccttcgccgactggtgtttccgcctgcacggctggcctattatgccgccgttgttgggcgtctacgacttcaccaccggcctgcctccgtcgccgccgactggtgtcctcgcctatacggtcggttggtcacaccaccgttgatgggcatcgtcatctacaccgccggcctgcctccgtcgccgccgactgatgtcctcgcctatacggtcggttggtcacaccaccgttgatgggcatcgtcatctacaccgccggcctgcctccgtcgccgccgactggcgtccccgcctatacggtcggttggtcacaccaccgttcatgggcgtccacgtcttcaccgaccggctggccttcgccgactggtgtttccgcctgcacggctggcctattatgccgccgttgttggatgtctacatcttcaccgttggctcaccttcattgccgtcgactggtgtttccgcttacacggttggcctattgtgccgccattagtgggcatcttcactttcaccgtcgaccgccttcgtcgccgccgactggtgtcttcattgttattgatggacgactttgttcccacattggccacttctgccatcaccaaggggaatattacaaagctaagtcatcatttattttattctttatatgatatttttccttttcctctgcctcactacaccaattggtcttccattgagtagtgagtcgggggctacagatgttatatcatattttttataatatttatcttgattacttgcgacataatctgagtacaaaagtacctatcgagttatggagttctatcttcctatgctttccgtttggtttgccaatggatggttgcctttgggctgattcctagcacccgggggctcgttggatggaccgagtaacgcaaggtgctaagtattattcggaataaatcaaaagcatagagatgagataaatttattttctgctcttaataatggcaaaagtacccgagtagtaaattctgatccgtgaaactttgttccattaatgacgaactcatgtcactcatatgcatgtttgggaagtgcctaggccgactcccgatgcttggggactatgactagtcgggcagagtgtttaaacgtaaggagtcatctgctcggggaaatcacaattgacaagaggagaaatacatatttataaacattttaaaatgcttgaatttttctcgagtattatatttacatcaggtactactcatcctatctgtttgttctgtaggatccagatccagatatgcataaaagggattcatggctttaagcttatctcctacgctttaggaatggatcaatcagaacatcaccaccggctcgccttcgtcgccgccgactggtgtcctcgcctgcacggctggcctattatgccgccgttgttgggtgtctacgtcttcaccaccggctcgccttcgtcgccgccgactggtgtcctcgcctgcacggctggcctattatgccgccattgttgggcgcctacgtcttcaccgaccggcctgcctccgtcgccgccgactggtgtcctcgcctgcacggctggcctattatgccgccgttgttgggcgtctacgtcttcaccgaccggcttgccttcgtcgccgccaactggtgtcctcgcctgcacggctggcctattatgccgccattgttgggcgcctacgtcttcaccgaccggcctgcctccgtcgccgccgactggtgtcctcgcctgcacggctggcctattatgccgccgttgttgggcgtctacgtcttcaccaaccggcttgccttcgtcgccgccaactggtgtcctcgcctgcacggctggcctgttatgacgccaactgatgctatcttcttcacggctggctacatcaccgtcaccgctaatagctaccactactgatggacatcatcgtcttccgtcgccgactggttatgccgccgccgactggtgcttttatcttcacaactgcgcgtcttcaccaccggtttgcttctgttaccgccgactcgtgttcacttcattacagctatgcaactttgtcaccatggtggagcgacttcatctttattatcttcggcaccggcaaactttattgcttctacttcgcaagctttgctacttcaccaaccacgacgactacaagagtttcgacacctcggcatatgtcactaaatatgatgccgtattattttattacaacaagtggtgttccaatcttcaatatttctactcggacatcctcaacacatatcttcactcaagttatgactattcgatgacaagaagctacagttctcgactctatgttcagttgtttcccaactgatcaaagagtcgggggctacacaaatacaaggctcaaaatttgacaaattttatgtcaagctgaagaaatcaattaatcagccaacgagtcaactccaggagtcattatcttcatctttgcttcggagcagacattctacttcaacaacttcaaatatttcggttagacgagttgggcaacaacatcaactctcctccaagtgaagcatctacaacagctgactggtttcttcgcctccacggctgtgcaacttcatcacttttgattggtatcactatcttcactaccaccaatatttttgccacctctgttgggcaatattatctctatattggtcgtcttgtctctatgccaactgcgtcagctaccatcaatgaacaattgtgactacgtgctcaggggcttactagctcaaatacaagtattatatcttcaatttggacttgctccggatacatgcaacatgaattcatgatcatgggtctattttctatgctcaaagactggactatttattattccccgtaagggttatcaactgaatacttgtgccagtcggaattcaattgttatatctattttggagtatcccataaaggataatcactcagatcagaagctattcatatgagctacacttggtctatatcacccgaaaagatttattactcgggagcatgttacatgcgtcatcctttaaagggtgtcgaaggcatattttttggcctaggcctaatatatctgcagcccatattttcaggtgtggcctgtcacgttcttttagggacttaggcactttttgcttaggccaaagtgcgcgtgatcaattgcccaataccttaaaatccttttatatcgcagttactcaactttttaggagttggtataatgcatcttaaaaggtgtcaaacagtaaagctttatatagctgccccgctgacttttttatatagtcatggtgttgtttgggtttttaagcaattgattggatacaatatcattgctttttgccacgtaagtgtgcatttttattgaccaatattatggcttaggctgattatatattgtggtcattttccaggcggttggtaaatcctttatgagtttatttactcagattttatacctcatatgccatatatttccaggtgtggtggaaccatgtgtcttctagggacttaagcacatctgttaaagcagtgtgcgcatggcgtatgcccaatactatggaaatttctttattcacaacatacaagcttctttatagctattttgctatgtgaattttcaatgatgtagccaactttaggttacactcatcatattttacaaagcagtcggtatatcacttggatcatattattcagggattcataccacatatgctacatattaagtcgcttggttgactacaattatcgaaaccactcggtgcatctagtcgatgcacctgactttattttttcagccctccacagtcttctgatttggaaaaagtactcgggagatcatggcgaagatgattgaagcactcggctttggagtaatctagttcgagagaagattatctttccgactgtgaaggtctcaggggctactgtggagattatgggtaccccatacccacacggcatggttatccgactagttataggggataacttatatatataaaatatgtaacagatcatgacttgggtattacgtttccctgtatattatggaacagcctaaagtcctagtttgataagattgtaaagtagatttagaaaaccgataccgtattggttaaggtttctatcttgtaaccctgccccccaacctatataaggagggcagggagccccctctaggggcatgagacaacctgatcgtcagatcaatacacactcggcggattcaaatccccaaacaggagtagggtattacctctcattgagagggcctgaacctgtctaaatcctttgtctccgcatccatccattttaggtctcgtgcgctacccccttttattattgccgaattcatgtttcgacaccctaaaatttgccttatctcctttgagtttttcccgatccattagttaaaccttgagttgaccattagatttttttgaaataactatatcaccccttctcatactcacatgctacatgactcattaatatctatgtgaaaaattataatttataatcaaatcaaatcgaacagaaatatgcaacatttaaaatacaaaacttaatttgaataaattattatttttactaaatccatacgagaatttaagctagaaattcagaacaaaaattatttattacttgggtttaaattttggtcaaaatgctgtacggatttcatcaaagttcatttgaaatttatttaaaattttaatttcattattaaatttgtggtcaattaattctatcccttcatttttacaattgaatcttactcctgttgagagttgtcttttttatcactaggctagcagacaattaactgattaagtatgacgggggcaatatagtcctttgaaaaaattaacggtcaactaacataatcaaaaggagaactcaggtgcatataatacattagataaaaattcatggacatataaggatcgggcaaattctcaagagcacgtagagaattttctccatggatgctagctagtgacaatcttacatgaatctgattctctggagccctctgttacctttaactagaggttggggcgcgcccttggcgcaccgcctgtacgcacgtgtgccgcccaataagctgatagccagggaagaacggttaaaaagtgttggtgggggaaaagtaatgaaagcagacggcaatagataaatagattgcagcgctaacacacatatgtctgatatttgtaaggtgctgcagtacctatgataataatcttaaggtgcaacactaattaac

SEQ ID NO: 22155 - DNA, 629 bp, Oryza sativa
cgcacagtcttattgaagaatttggaatgaaaagaagagtaatgcttccgagggtcttggcttatacctttgcttctcttctctagggatctatacttggatatgcaactttaggtagtcagacagtcaccctcgtatcggctggatatatatagatcagtggtcgtaactggttatgcttaaggaactgtaacaacaacaaaaggttcttcgtttttcaactggctctaatgcaaatttaaaaaataaagaagagttccgtcaggcgtactgaatctcaagacgttcctcaaaccaatcatatactttattgagataggtaactaacccgaaccccagaagtcatgggtgataattggtctgatgctcgggcgaaaccaattccccaggtgtgacgggcggtgtgtgatcatacgtctataatgcattgtatgtcctaaaatagggcccttttggcgttccttcgtagatctacggatttcacccctacacaccaaattccactctcctctgtctcactcaagtgaattggtttcgaaagcattccgccactttttggtgactttcactttacacccgatttacccccaagacgatgttcgcgcaaaaaccataaaagtattgatctc

SEQ ID NO: 22156 - DNA, 6254 bp, Oryza sativa
tggctttgttttgttagtgttcagtgtatgcctgttgaataaagatccaagattaccttacattcctaatctggctatgcagatgctcaggattattgttccacttcagattaatcaagaatggttatccaatacatgtagaattagtttcacatctgtaggaaatgcagttccagggttttgttcttcagcagtcagttcggaacctctgaagtgaaatcctgttacttcagtggtccaagtctacagatagctcaattgaatgattcaaaaaatggctagacatttcaattttgaaacttggattcagagtttcaggttacctgaaacatacatactgtacatcccaagtccaaagcatgatcctgcgcggagtgcgggcggacaataattgaaagaattaacagctgaaattttcaacacataactaaattttgacagcaaattcgaaaagtcataactgattatgagggcctttcatgacaactcttttgccccagactcaagcctccatccctattgaccactggttggtgtaacatgtaccagtaaatattaagacctactccaggattcaacagagcaattatttttgagactctgacaattatgaaaactcagttgaaccatactgtataccctagtgaaaaaagttaccatgactggcctgctgctgttcattttcgtcagttaccctcatattgggcaatggtcataggctgggtttagtcagcgcaaagtttggattttggtttatattggagatgatgtgactgaaaagttgggtgtgtatgacaggttgatgcgatggaaaatgactgaagtttggatccaaactttggatataaacacagccataaactaatttccaagttaaccttacccatgaaacttggattatgagtttgaggttacctgaaacataaacttggactcagagtttcaagttagcaccagtcttgattctgggcaaaaaagatgtcatgacttattcttaatgaaaaatcgtgtggacggtcacccccccccacccaaccccaatcgagctcacgactaatgaaaaataaatttatcatgacctgctgctgtttattttcactagttaattaaccctcttacgttatactaagtgctactcgttttcaatttgataattcaattcaatagagagcaatcgacaatatataggtggaagaaaagaggaaaacaatgtcaagtaagtaactaccctttcaattcaaaaaaattagattacggttttcttagacatttttttaataccaaaagacatatgggcaatggccaaaaatatacaagataatcagtatcgagatactattagattttagaaaatacatatttttatataaaatatataatatgttgtataaattaaagcatataatattgattttgataaatttaattggtttttaatgtaaacttgagcatatttattcatattattttcaatccacctatttttaaataatattttgtaggatcgtagggatagtagaattaggatactacctaagatttcgtaggaacgtgcgaaaacaattagtaagattgagatactatgaaaattaggataatagatgagataatatcattttgatttggtggatcgtagtgtctagtatactggtatacgtatcgggatactgacaaccttggaaatagaccatggacttgaaggtcatgataagtgcctcaacggctcaaccaaggaggtagctgcagaagaaatccttttctaatgtatcattgtgtcaatacgtgcagcaatatactactataacataagcctgaaaattttaaaagtcccctgaatcagttcctggaacttgtacttcgtctaacttcatgaaattttctgagccaatacaaaatcaagaaaatcccagtcaactgtaggataattcatgaaaaatcccacaaattcgatgtatgatcctaaatgacctttctcaacccctaaagttcaccaatgaggtgacaagctatactaggtcttttaccctttcataactaatatgaaactattcaacaattgaaaacttaaaacccaatttaataattcagaacaatctcaaatgtaacattccagtttttctcttgtttagttgctgaattaggttctatttgttggacctctaaatgttcactcttttttcggagaagccagctccccgaggaagattacacagggtcctaataatttgatttatacgtgtaatcaccattagcgcctttgaatatatgcccacaagtaaataaaatttaaaacgaccttttcaaagcatccaataggtacatgctgttagtggtttaggtaaatattcttctaacttgagtaactgtttttatacggggactagttaacctatggataaccacgggtaatctcatattacgtgatttgcatatatctgaaacagctctaaatttaaattattaatgaaacaacatacacaaaaccattcaaataattttgttgttgcttctatttagtaaatttactaattcaaaatttgtatttacaaagttgtacatattgtggagttgaactttatatgttttcttattatataatactaaaatttagaataaataaaaaaaaagcaacatggtttgaaatcgcacttatagtttttctggatttactaagtactccctccattttatattataagtcgcattgactattttctagttaaacttttttaagtttggtcaagtttatagaaaaatatagcaatattttaatcagaaaacaaacatattatcaaaatatattcaatgttatatttaataaaactaatttagtgtcgtagaaattgctaaatgttgcaataaacttggttaaacctaaaaaaacgtttgcctagaaaaaatcgaagctagagtataaaatttgaaactagcaagtaatcttggagtctcgatgatttcataatttattaattcttgcaattaaacttaataattaacatcgtatgactaacatggacctttaattaggaaatgcatcttcgcacttggtgcgtactattaattttatttttcctcataaaatttttctcaatccaatattgatataaatgcaaagttttaatcttcttttgaatctcaattaaattttttactgaatcaataattatgtaattataaattattaaatattaagtgactttcaattttaatatgtatcgatttttttcgcgaacgcgtaaaaggattgcacgtcaatattagcaggaaaagagtttttgttacacaacggaatcagccagattggcttaataaaaaacctgaagctaggaactactacgatggttaaaacgaaactccaaacaacaggagggggcagagccacactacactcccaagaaatccccaaaaacagcaatgccagctaaagaccacagctggccctccgagcggatggactccaaaatcactgggaccgaagcgagcgcagagtcaaaaaccctggagtttcattccttccacagctgccaagagattaggagtaccaagtagtcaaagccgatacggaggtgctcaggtaaatgggccctggaggatgaccaccaatcctggagccagctgccacgagggggagagagggcaacccagccaggaggggacatcacacggagccagacctaccgagcgaacatgcaattaatgaggatgtggttcaccctctcaagctcctaagcgcaaaaggggtaagcagagtggctatcgataccacgcttctggagaagatcggtagtccagcagcgctgctgaaatgcaaaccataggaagaacttgcatttagcagggcccttcgcgtgctagagcaggtcggcacaggcaaaagagtgctagccaaggaagaacgcctggtacgccaatcgcactgagtagcactggtcacccgtccaacaccagacgaggcgatcctcaacacccggcgagagctgggtaggaagcaccgcgtcccaaactaacaggaactgagagatgaccgggacagtgagggcaccgcgtatatcaccaacccaggagttgttcgctaacccagtagcaaccgtgcgcgatccccggaaacgtggaggcacgacatggaggaggtcaggagctatagaagctagcgaccgaccatcaatccatcgtcagtccagaagagcgtggactgaccatctcccaaggtagtgaaggtagatgctgcgaacatgtcggagacgctccgctcaacagaggccttcagatcagaccagttggggtgtcctgagcgctgaagccagagccagcgaactctcaaggcaaagccagctatcctgaggtccggaatgcccataccactgagatacctaggatggcaaaccttcgtccaggacactcggcattgtcccccattggccgagtccgtacctgtccacaagaaggggtgacgcttcttgtcaatggctttgataacccagcctggcaagccgatcgccatagaaagatgtaccagaatagaagagacaaccgattggaccagaaccgagcgacccgccagagtggtgagacgacccttcgagggggggggagccgatgggaggctttatccacaagtggttgcagggccgcttttggcagcttgcgaactgatagtggaatgccgaggtaggtgcagggaaactcagagatcgagcaaggaaaagaggactgaaccagctctaggtcaagaaccgagcagtggatcggagtaatcaagcatttggtgaagttggtctgaagcccggaagcggcactgaagatagagaggatgccttggatgaactcaaggtcctaccgaacgggggaaaggaagagaactagatcatcggcgtagagggatgcacgatgtcgaatagcacaatcattgaggggaagaaaactactcgagtcagaggctttgcggagcatcgcattgagcacatccatgactagaatgaaaagcatgggggaaagaggatctccttggcgaagacctctccgatacctggcaccccattgaccagcacccgggaagaggaggcactgagaatgagggagacccaatcacgccaacgttgactgaagccaagctgggctagcacctcaagcaagaaaggccagctgaccatgtcaaaggccttcgcgatatccaccttgagaagaagtcggggaacgcatttggcgtggagcgcccttgccgcaagctggacatagcggaagttgtcatgaagggagcggcccttgatgaaagcactctggttaggccaccgacgccgtcgcacctcctgccgacggccccacctccacaccggctgtcttcgccgagccgcaccttcagatttggcgcgggccacctctgtccgactgcctcccgctgccgagggactcggctgcgcaggttgccttcctcccgccgctgcacgccgcctcctgccgccgaggggagcgggccacctccctcccaccgtagcgccacctcacgccaccgagtgtcgccgcacgtcccctcccaccatggcgccgcccgggataaggagagagagaagaaagagaagaggagaagatggagccgagtggaggagaagaggagaagaaagagacaaggagagagagatgtagccgagtggatggataagaacgacgacttgcggtcttgtgcggactcggctcggctcggtttttgtggggcccaccaatgatcactagtacagatccttctatctgtagggagctctaacaggcctagaaatagcgcccggtcctaaggaagttcttttgtggcgggccacaactgtaggaccgtttgcgagtccattccatatctcaaacgggcctcaagttgtggcccgtcacaaatgaccatcatctgtgacgtgcaccaacttgaggcccgtttgagataacaactaggcccgtcatagatgactcatcagtgacgggctatatacttaatctctatcgggcattaactaaaacccgtcaccgatgactattttttcatttttcatatgaaatgtttatatttgtaagttgattatagcaaaataattttacgggtagtaaatgatttcaaatggaaaaaatgtcaacaacaaagttgtataacttatcaatatttacaacttttagtttggtcattttttaatataacatttttttgaacaatttgaatttgaatttaaaaatatgacaacttcaaaaaacattttcaaatactaaatgatttcaattga

SEQ ID NO: 22157 - DNA, 2756 bp, Oryza sativa
aaaaataattcattattgcgtcataattcaattaaaatccttataagtgttttaatccgatttaatctttaaaaattcataactaattcatttgaactcagtttaatgtggttcaagttgcaaaagttgtataaaataaagatctacatattaaaattatccataaattggattaaatttatttaattccttttaaatgggctttaaatagatttaatcttgtaaaattcataataaattcatatgaagtcagaatgaggccgttcaagtctcataattcatctaaaattttgatctacatgtttgtttactttttatgtattgtttatttggtttttattagtctttttcttcgttttgcaggttagcttgtcgtttccgtcgttgcgaaggttcgtgagtgcgccggaagtattcaagaagattaattgaagaccgattattgcaaggcaagtcacacagatcctaaacacaatcctttgagcatgttgatcctatatttaaattctctatttatttcaactgtgcatttattttcgaatgtcactgggtggtgtgaatctattcctttgttatggcctgtttgcattgattactctattccttgatacattgggatattataatttgactagttgagctttatatatattggttcaactagatgttagatataattgcttagccatgcttagaaacattagctcactaatgggatgaatcatatatactacattattatttaatgatggcttaatgatagttcacgatggtcaatcgtgattggttaattaattacttgccaactaaaacttgataatggtgggttgtgagcacatggttttgagagtcgtgctcatgacaattaaggaccggttcgcgagctactattgtgaaacattaaccgtgccaaccacaagccagcgtgggcaacggcgttaccttttgtatagcatgattcattgtggagcaccagactgagaagtggcggagataagcccacgggggtcgctggggagtccatgccttgttttataagggtgtgattatgatccaggaatggtgcactgtggtgagttgtgttgtacaaagggtattgtcacagcctctattcgggtactttccagtatcgcgacgcatggtagacatgatgttgaggctgtgtcttgtgggtacagtggtacacctctggccagagtaaaactattcgaatagccgtgcccgcggttatgggcgagttgagcaatgtttttcgtgattagtctcacacctctcacaataattatggatgttataactggtaataatttgcttagctcctggtttggaatggataattcctggtttggagattagatctgtacagccgggtatggttgttcaggatggtcgggcttgtgcagcatgggtgtgctgttcagtgttgattaaaatttctgattaactactctactgttttatttcacttaaatatttggctaaacgttgcttttgcaaatgagcctatattatgccattctttggtatccttgtgcacttgcatatttgctgtgtggcttgttgagtatgtcatatgctcattcttgcaataatcaatcaacctcagttgaagaaaaaggatccagaaggagaagacgtttggcttataccccagttgagctgcctgtgggagtggagccggagcttcgctagattttattttccgctgcagttttcttcttggtgaggacttaatgcctcttaagtaagtatttatcgttttagtaaatttgatgaatctgtatattaaattgtcaatttgtgtacctcgactgattcctggacgaggatttcatgcacaaataagttcggaaattactagtgaatttccgggcgtgacataccagctctgtagacccccgtttttataacaggaatcaatcgtgtaaacattaccatttccctggatcaagtagtctggtacacacgaattcatagctgaaataccaagtgcacatacacgagtgtctggtatgaattattacatcacaagctcgcaggcatagttttaaatcatcggaccgggcggtccggaattcatatcaaaaacagaagtaagtaagacagcggagtcaaggcagcggcacgccattgccacaggcaacgacggtaagtaagacctactgagcgccatcgtcttcatcaccctcctggtagtaagcgtagggatcctccgaagcttcatctccgacctctgattaagtttatatattgtaagggtgagtaccaaccgtactcagcaagccaccacagcaacaatgcacatgacaggggtattcaaagggtggctatagttcttttgcgcaaagcaagttttgtaattcttttcacgagccctaagacctagcacggactgatcaaattttagtaccagtgttcatatttaaacaatgacggttctgtccaccatccattatgatcccaaggatggcttcccgccattgagtcgtcatggtttactgaggacgtccaccttcccgcctctcgggaagtggctccatcagcatagaaatcattatgcaatatcccatcccatacaatttaagaatttagagtctagccaagtgtaatacatgtcccggtgctcaataaccacgagcacgactattcgaatagatttggtttactcacactgcagtggatgtacactttacccgcactccgcgactgcccaacacatgagcctcgtcccaactcatgagatatgtcacggcaaa

SEQ ID NO: 22158 - DNA, 1204 bp, Oryza sativa
catgaaagcgggcactattgatcattgaactttccataccatttacttcacccttttttaccatatttagaagttcttccctgaagcactattcatccttgaactttccataacatttaatttttacccgtttgatcatatgtaaaggtgtttccatgaaatggtaaatatatatgcttctggaggaaaagtttagggatgaatagtgtccgattttgatatttagggatgaactttacactttcttgaggttgtggatatgaaaaataataattttccataaattcataaataatattggaaatgattatttaaattattcatattagatttaaaaatgataagatgtgagaaataataggaagagtttgtagcaaatctgcaactgtattttcatatgcgctttcaattatttctatctattatttactccttttaaaagaatattttactaacaactccttcatgtttgtacctactctttctttcatgtgttttaatattacaaaatagtcctttccacatatgactatcttatttcatttctaaaacacatgtttattatacaaagacacatatatcgacgaaattgtgaaaatcacaaccaatttgttccaagcaatattagcacacatataatttattttaatccaagcacgagtatttatctagttatataaaaaaaatcaaaacacagtgaaaaaaatccatatatcaagctagagtttctatatcaattagagctatatgtacttaaatatcgtctccgcttgctgttaattttttagacaattagaaagtatttcgccagtgcacagagttcatgcagtcagctttcatattggcatcaataatttacatggaaaaatacctacgttctaaacaattccttatatgtgctatactaatttcttcaggcaccaaaactaactttcaagaaaccaatagggagcatctgtatttctggccacaagtttattggatgcccaataccatgtggtgttctaataaccaggttgatggatatcaatcatgtaatgtccacaaacattgagtacatctcttcaaatgacacaaccatagcaggaagcaggaatggccatgctcccatctttttgtggtatgcactgaagcgtatagggtacaatggtctttgcaagacggttgaaaattgcttaaaaaatgcccagtaccttgcacttcg

SEQ ID NO: 22159 - DNA, 959 bp, Oryza sativa
gtgtgggaaaagaaagaatatatagaaattttgtttatttgctaaataaggttttataaaataattgagtaggaaaatatagtgaaagttaatcttaaataaaagaaaacaaactaaattgaaaactaaaagaatttaaaacttaaaaaaaataaataagaattatttggtggaatattttataatttttgtatgaataatgatatgtcattattgtatgactgttgaaagagtttgtgattattttgtcattattgtatgattgtcattattgtacgaatgattatttgtgtacgattttttttgcatttcatgtagatggatcggcaatggatgtacactgaccggcggtccaaagagtttattaacggcgtgcattattttttgagagtggccgaagctaacaagcagaagggttttatttgttgtccatgcaataagtgtaagaatcagaaggagtattctgcatccaggactattcatttccacttgtttgagtcggggttcatgccaagctataattgttggacatcccacggagagcaaggggttgaaatgaaagaagatgaagtggaagacgacaatattccagactttgctcagtacgctgaatttgaaggaaatcaaacgggcgaggaggacatagatgctgattataacgacgttgcggatgatcttagtcagatgttgcaggatgccaaggaggactgcgaaagtgaaaagggggcccataaattggacaagatgttagaggaccacagaacgtcgttgtacccaggttgcgagcagaggcacaaaaagttggataccactctggagttcttgcaatggaaggcaaaaaatggtgttagtgacaaggcatttggcgatttattgaaactcgtcaagaacattcttccggagggaaacaaattgcccgagacaacgtacgaggctaagaagatagtctgccctctagg

SEQ ID NO: 22160 - DNA, 1352 bp, Oryza sativa
aagccgggcggcggctggaggaagaaggcgacggcggcctgacgcgtgggccccacgcggggcgcgcggtcagcgcgcgcacgtgcgcgctcgggcgggagggcgccgctcgggttgggccgggcggccggcccaggaggggggggggaaggaggcagcccgggagagagagggggggaagggagctgggccgagaggggaggaggcccaagaggagggagagaaggagagggagagaaagagagggaggagggaaggacttcgggctgggcttggcccaaaggaggaagaggagggatttttagtttttctttttaataaactttgatcaaggttgttgttgcttaataattatttccggtgctctgaaaattcaagtcaaatttgagggctctttttagaccaaggagaatttaacaaaaattctccgggccacattggaatttttcttgtacgtattttagtgtttgccaatttcttttcgaattttaattaattctattattccttttagcgaatgatttttatttcgggatgaatttatcaggacgtgacaatgtgatccttgggatgaattggctggcccaattccaaggagtagtggattgcgcgagacgcactgtcactctgtaccgagggccggaacaaccggttgttttctttgcacccccaacctctgtcagaagttcagaactgcatcagatagggctgtcagaaatccccatagtcagagagttcggagacgtgtttccggaagaactacccggtatgccgcccaagcgagagattgagttccggatagatcttgctccaggaaccactcctctgcacaagcgaccctaccgtatggcagcaaatgaactggccgaagtaaagaaacagttggaagagttgaaagaaaaagggtatatacgtccgagtacttccccatggggtgctcctgtgatttttgtggagaagaaagacaaaacgaagaggatgtgcgttgactacagagctctcaatgaagtcaccatcaaaaacaagtaccctcttccccggatcgatgatctgttcgatcagcttaaaggtgccactgtattctccaagattgatcttcgttccggatatcaccaattacgtatccgtgaggaagatattccgaagaccgcattcaccacgcgatacgggctgtatgaattcacggtgatgtcattcggtctaaccaatgcacctgccttcttcatgaacttaatgaacaaggtgttcatggaatacttggataagtttgttgtggttttcattgatgacattctgatatactcacaatcagaggaagaccatcagcaccatctccgtctggtgttgggaaa

SEQ ID NO: 22161 - DNA, 2271 bp, Oryza sativa
ccgcagtttcttaggtttggcaggatactaccggaggttcatcgagaacttctccaaaatcgctcgacccatgacacagttgttgaagaaggaagagaaatttgtgtggagcccgcaatgcgagaaggcattccaaactctcaaagaaaagctggtctcctcgccagtgttaatcttgcccgatactcgcaaggatttcatggtttattgtgatgcttcgcgccaaggattggggtgcgtgctcatgcaggacggtcatgtggtagcctatgcctcacgtcagctacgacctcatgaaggcaactaccctacccatgatttggagttagcagcggtggttcatgctctaaaaatctggcggcactatcttattgggatacatcttcacccagtcagatctgaatcttcggcaaaggagatggttagaactcatcaaggattatgatgtgggaattcactatcatcctggtaaggccaacgtggttgccgacgctctaagtcggaagagccattgcaacactcttaacgtccgtggcattccacccgagcttaatcagcagatggaagccctgaacctaagcatagttggtcgtggattcttggctgcgttggaagccaagcccaccttgcttgatcaaatccgcgaggctcagaggaatgatccggacatgcatggactcctcaagaatatgaaacagggtaaagccgctggtttcactgaggatgaacacggaaccctatggaacggaaagcgggtatgcgttcccgataacggagaacttaaacagctgatacttcaggaagctcacgaaagcccttattccattcacccgggcagtacaaagatgtacctagacttgaaggagagatactggtgggttagcatgaagcgggaaattgcagagtttgtggccctatgtgatgtgtgccagcgtgtcaaggcagagcaccaacgaccggccggactcctccaacctctccaagtaccagaatggaaatgggatgaaattgggatggatttcatcaccggacttccaaaaacccaaggcggatatgattctatatgggtagttgtggatcggttaaccaaggtggctcgattcattcctgtgaagaccacctatggagggaacaaactagcggagctctacttcgctaggatcgtgagtctccatggtgttcccaagaaaatcgtatctgataggggaagccaattcacctctcacttttggaagaagctccaagaagagcttggtacccgattaaatttcagcaccgcgtatcacccgcagacagatggacagaccgagcgtctaaatcagatcctagaggatatgcttcgcgcatgtgtcctagatttcggaaagacctgggataagagtctcccctatgccgagttctcctacaataacagctatcaagccagcatacaaatggcaccttatgaagcgttgtacgggcgtaaatgccggacaccgctattgtgggaccaagttggagaaagccaagtgttcgggactgatatcctgagagaagctgaagctaaagtcagaatcattcgggataatctaaaggtggcacagtcccggcagaaaagttatgcagataaccgtcgccgtgacctggaattcgcagtgggtgattttgtatatcttcgggtcacgccattgcgaggtgtgcacaggtttcaggcgaaagggaagcttgcacctcggtatgtgggtcctttccgtatccttgctcgtcgcggagaagtcgcttaccagctggagctgcccgcctccttgggcaacgtgcatgatgtgttccatgtgtcgcaactcaagaaatgtcttcgagtgccatccgagcaggccgactcagagcaaattgaagttcgcgaagatttgacctacgtggagaggccagtgaaaatcctggacaccatggagcgcaggaccaggaaccgggtaatccgtttttgcaaggtccagtggagcaaccacgccgaagaagaagctacttgggagcgtgaagacgagctgaaggcagcccatcccgatctcttcgccagttcttccgaatctcggggtcgagattccgtttaaggggggtaggtttgtcgcgtcccaaaacgactctaaaattcatcctcgaaattgtgcaaagaataattaaaattcatgtgaaagcctccaacaattaaaatgtgcaaagataaaagtcaaatgaggcttggaggatttttgtatatttcctaaaagcctaaaatgtgtaaataaattttagtgg

SEQ ID NO: 22162 - DNA, 4138 bp, Oryza sativa
ctgcagcccacagaaaaaagaccatgggatagacattatcactatctctttcccactgaccatacgagtgacctctgctttagggctatgtgcatcaaatgatgcaaacattaagtaatttgattctagcatcttaaaaataacataatcgtgtggtcttcttttctgcaggctacccaatcaatttcgaatttgactttggccctgtaatagaattcctaaacatgcgcctaaataatgctggtgacccttttatggagtgcaactatggtatccattcaaaaaagtttgaaattgcagtgttagattggttcgctcggttgtgggaactccccaaagaccaatactggggctatgtcactagcggtggaacggaagggaacatgcacggacttcttgttgggttagttcttaattatttcatgtacatatattttaatatattttaatgcttgtaattttatgaatgttttacgaacaaatccctttggacttgaattttttggataattatctccaaaagatttcaacgaaaacaaaaacaggtcattgttttgtaaaatttcaggcataacattttatttgattcccaacttatgatggtgtgtactctaaaagaaatgcatgactttttttgttttgtggggaaaaagaaatgcatgacttcaatacaaagttaacaatgcagtccaaaactcaaaagttacgatttaatttatagtattacaatgaaactgattggagcaatgcatgctatatcatatatacttgcagccacaaaaaaaaagtattacacagggctggcttggaacctaccaccagatcgacatagttccatcaccctcaacttcctttttgaaagaggaaacataaattaacactgaaaagtttggtaacttctgatagctgtaaaataaccgtaaactcttctagcaattatagaagggtaagattgcaatataaatgtttgacctactgtaccttttgtaattattggctctccagtgttgaggaacggaaaggacaaaaaaaaaaataaacgaaaatgctgccgctcggtcgctcgggggagggggagaaaatcgggcgctcccccctccacaacgtgtcgacgtgcttctactggggccccaccatgtgtccctactacttgccacatatcttcaccatatactctattacaacaaaaaaaaatcacatattttagaaaccccctattaagggaattcggtttattttttgtttcacaaaaaatgtttcacccagtgtactcacgatatttcactatgtataaatctaatgttgccgtgaactgaaatactccattgcaaccaaaaaacccacatattttggaaaccccctattaagggaattcgttttattttttgttccaccgaaaaatgtttcacctagtgtacttataatgtttcactatgtatggatcaaatgttgcagtgaactgaaacattgtttcgctatttgctgaaacattgtttttatataaggtgaaacaacacccgatttaaacgagtgaaacattttcgatctacttagtgaaacaattccgatatacccggtggaacattgtgcaacattttaaaataattcaataataagctaaaaaaaattttcgtcggaatatatccatgtgtggtcttgttttgaagatttaattgcaacgaatttaatggtgcaatcggatcatgatttggataagtaatttaagtaaaaaatcagtttaaagtagtttctgcccgtaaatcaggcgctgacgtccctatgccgccagcgcccgatttttcctccaaagcatcgggcgcccgacgcatagggccttccaaaaataaatactagaaagtatgcacctcgtcgaggagtggaaaatcatttcctatcatatttctagatgggtagcctgtaaattacataattaactagattatttgttgccctctttataattacattggctacacttgtacaggagagaactttttccggaggggattatctatacatcatgtgattcacattattctattttcaaggctgctaaaatgtatagagtccagtgcatcaaaattgacactttgttttctggtgagatggattatgctgatttcagacgaaaactactacagaacactaggagccctgccattgtgaatgtcaatattggtacttactccatctccagatgtaaccatttcatcaattgtactccactatttttctctgtttgcatgtgacagatcatgtttgctgtgttgttttaggtactactatgaaaggcgcagttgatgatcttgatgaggttgtaatgattcttgaaaactgtggttttgcaaacagattttatatccattgtgacagtgctctagtaggccttatgatgccatttatcaaacaagtaagttttatttttcaaatagtgaggtaatgcatatggaatatttagcaccagctgattggtttgaaacatttgcatttggaaattctcctaaacagtctagcatttgaacaatagtagattgtatttcttttgcactgtcgaaagcaaacgatctgaatataggttgaagaaatagcacaggcaattcatatatatggattgaacttgcttgatctttttctttaatttccatacataaataatttgtagtaaaaaagaaaatagaccagcataaataaatatgtcatgtcatatagaatgattttggttactttttggatggacaagattgcattaagagtcgtgcgtgaacagtaaccttgttgtttcctctttcttcttctcctcgtctttcccacgtgaatgtgaccgcatagagaagaccgagcttgttcggcgagcgtcctcctgtaacaccatataggtatatatatccgcatattagagtgccacacacaaaagcactaactcctaaaattattaaaaatttgacatattctaactaataaatacaaacattcatgatagacagttacaagacaattcaataatgataacgtccacaaattcgaaaccaccagtagctttaaaaaaaccataaaactacacataaccaaacctttaaaacaacatttacaagttctatacaaaatttattctaagcagaactaagaactaaagctaaagttgagtagtgtgcagtaaagtgtgtatactagggccatgtagatccattgttattttgtacctaaaaactaagtagaacacaatagtaagtacaaatactcaggaggtgcaatatggaactaggaaaaatgtatatatatgaatttgcattaagtagtcaacaagtagttgttctcctccagggcaaatgtgaatatctttaagcattacctgtacggtgagtaagcagggcaaacgcttaattactactagcatcgtcaattaagaaccatatgatacattcggtatgtatgcatggtattttaatggaacagcataataagttgatacatgaattatagcataaaaagatcaaagaattaatgaatcacatgaataataatggcacaatgaaagtaaggcaaattatgcctatatcattcccaaatactgaaaatgaattgctatctagttttggacccggtcaggaatattgtttccatttttgtgtaacaccccagccactaatttcgccttagtctactctacacactaaatgagcccacattcatatagcaacttacttacacttttgtcctccttcatgtaaaaggttaacccaaaggtaatttggttagagtaacctgggtatataagctggctcaaatctatcaagattctcgtaaattgagcacttgggcctaacagggctaaactggaacaacaaaacacatgccaaaacaaacgaaacgagctggggtattataatttcttctaacctatttattgaaattgagtgaattaaccctattaattagaaagataacaacgatgactacaacctttaatttatttaggacacctaaccttaatactacctccgtccgataatataagggatattcactaatttctttgtgattttgttctctctggtcgctcaagtagcaacagcagcagaacatgcattagccgcagcaaaggcaagcaggtctgcactctggagcagatcttaattat

SEQ ID NO: 22163 - DNA, 2018 bp, Oryza sativa
agtgtctggaggtgttctcaagtcatggtacgtttatgcgatgttttcacaccccgaagttctcctccgaagccaaaaatttaatttataagcgactcctaagaaaaaaaaaccggtgcaaagcaagagtaaacccttttaaatcaatgcaaataataatcggaagtggcatgtggaatttttcttgagttctacatgtcgaaatccactaacaggattttttagtggaattttcagagccctagaaataattttaaccaattaaaattgagcaagcaatattttaattccaggaaaatccttttctctttttctttttctttttcccttcccttccgaatgggccgccggcccattctctcctttttctccccctcctccctgctgggccggccgcaggccgaggcccagccaggccgccccgcctccctcctctcccggggtcgccgacaggtggggcccacttgtcgggtccttccccaacctcccgccatccgtgccggtcaccacccccgaaaccgcccgccgcgcccacgcctccgcctcctccgggccacgtcgcccacgctcgcgtgtgcgccgcgttccccgcgcccactcccctctctctcccgctcgtgcccgcgcccgagatggccgggattcgattttcgaatcccgcctctctctcctcccccacttccccacgttggccggcgattcccgcctctcccggccacgtccggccctctctctccctatttaagcttccccgtcgctccctctcgctttttccccatttcgccgaactctcccgagctccccatcgctcccgcgccgtgcaaccacccgccgccgccgtttccgctactccggccgccgctagccgccgctagggtcgccgccgcaccgcgctgtcgccgccgtcgggttcgcgaggctaagctccaccccggccgccccttgcccgtcgagtttcgtcgccgggattcgcatcccctcgcgctccggtgagttcaacccctaccgcggccttcggccatgaacgccggtcgctgtggttcatctccctccctctaatctctctcttctccttccttagggcaccccgaatcccgtccgccggtggccgtcgtcctcccgtggctcgcagtcgccgttcgccatgtcttcctccgcgtcggccaccctcggtgaggcatcctctcccttctattcccctccctctccctcttagccgccgctttagcgccgccgcccgttagccgtagctttagcaccaccgcccgtcggcgccgcctttgcgccgccgtctccgccgccggttgccattcccggcaacgtgtgtgcgcgcgccgtcgccgtcgccatggccgcttggccggtcttgagccgagccgggtcgccagcgcccgtccgatcggccccgagggcgatctgggccgtcgatcccgtggaccggcggtggaccacccgcgtggtcccggtccacggtgaaccgcccccccctgagccgctgctgagtgggcccgcttgccggcgccccttcctccctctcccgagccactgactggtggggcccgcttgccggcgccgcgccccgccttgatgacgtcagccctgggatttattgcgcaataaatgatttaaggtttttcttttatagtaataaacacagtgaatcttctaaaattcataactaattcatccgagctccgtttaagcccattcaagtctcaataaatcaagaaaaatgtgtagaatccattaaaaatggttttgttccctgtttcagtagtcttatagcctgtttgcaatgtttgctttgtatgtcgctagattccggttcctccgacgctccggtgtacttcgaaatagtcaccgaggttcctccagcagcagagcaaggcaagtcatgcttgtcacttgaacatgttgatcctatattgcaaatgctctattgtttttcttcaaatattgcattgttttataatgttactatggggtgtttacctattgtcatagccatgctattattg

SEQ ID NO: 22164 - DNA, 1545 bp, Oryza sativa
tccctactttacaattcagcaagtcaacaacccccatcacataagctgataagaacattactaggtcggatatgaccatggataccttatgtattcaacaatcaaaggtgcatactttctacaaacgatttacatgttatatatttaaagaaaggatattgtaccatgagttttgtgtgctttcatttgcagaggtacttacttgggtgaaggaaaagagaccgagcgcaaggaatcttggggcctatgagtacttgttagaagcttatggaatctattacagatggatttggtctcacatcaaaattcatcttagggtatcaggaatctgtaaaacaagccatgtgcctcatctagtccgagtctgatttggcccttgggccttggtacttgtgggctaagcccaagtgggtggtgccctagcgcaaccctaggacgtcccaaatcatatttattcagtagctatcatagtttagggtctgcgttgcagtttcgccacttgttcgatttgtggaacccaaattcaagtacttaatcattcatatgtaattgagttgcaatctaacttgttcttgctagtgtttttcgattcatatgcagagattagccttctcggcaagatcaaccaggtttcagcacggttgataaccaaaggagacgtggtgttgcgattgcagggttcggatcgtgctgattggaagcccaatcgtgtgtgtcaagtttccactaaatctagagttatcaatgcatattggaagatcaggacctagttcctcatgataaacttcactcttctggtagttaattttcatgcctgacatttcttagaaataaaataagaggaatttcaccaccaacacattatcccttgttgccctagtgaatacgatggtatcatcagcatgttgaagatgagtcaagcctcgttccactaaattaggaactatcccttccaacactccatttttacaagcttcctctagtatagcttaaagtgcatcccctactagatcgaaaagaataggtgacagtgggtctccctgcctaagcccactataggttttaaagaaaggtcctgcctctccattgatgttcatccctacgttacccccctcattgatgttcttaggctgagttcggatgggggagatgggaacctaactctgtgcacggaaaacggagcggtccattaacacgtgattaattaagtattagctaatttttttttcaaaaatggattaatttgatttttttaagcaactttcgtatagaaactttttgcaaaaaacacaccgtttagtagtttgaaaagcgtgcgcgcggaaaacgaaggagaggggatgggaaaaggtgcatgcgaacacagccttaatccacttgacaaaagtgtcattaaagttcttcctctgcaacacctcatacaggtaatgtcagattactctgtcataggtcttctcaaaatctattttaaaatttacaccagtcttgtggtctctctaattgatgcataacttcatgcaggatcacaaacgcatccggaatata

SEQ ID NO: 22165 - DNA, 616 bp, Oryza sativa
gaatgccgcccccaatcgccgggaacggccgcgccaagtccggccgccttccattgccgccggccggcttttccgccgccgttccgacctcccccgtggccggctccctcttctctcatataaaatgggatccccgcactccgttctaccgttttaaccccatcccgagcctccccgtggtctctagccccatccccgccgtcgccctctctctcccacaccgccggcgacctccagccgcctgtgccgcctcgcccgtgcgccggccggccgcgccatcgcctcctccagcgtcgccgccacctcctccacgccggcctgccctccgtttcgcgaggagacccccggaactacgttcccgccgtcgccctcctccttccttcgcgccggccacctccagccgccttcctctcctcgcccgagcgccgcccggccgcgccgtcttctccctcggcctcgcagctgccccctctccctcggtcagccctccgtttcgcggggaaagcaccggagacgcgtcctcgccggcgtccagtggcgtcgccaccacttctccgcctccggccgcctctgccacgtccccggagcgccggccgacgtcgtcaccaccttcctc

SEQ ID NO: 22166 - DNA, 2945 bp, Oryza sativa
gtcggagagaaaggaaggaaaagcccggctggggaggcaaagtagacttcggggaggagagaaccgagcggcgagctgggccgagggagagagagagcccgagagggggagggggaggaatttgggccgagcccgaaagcaaggaaggggaaaattattttcttttctttttattctaattggttaaatgaactttgtgctattaaatttacttcttgagctccgaaaattcacgggaaaatccggagagtattttagggcacaaagaatattgcaaaatattcccggccaatgatttttaagggaaaattttaattctcccattatttcacttgattaaattgattaactttttattcaatttctaggaaatgcatcattaaatgatttttattcccgaacgaaaatcggggcgttacaaatctaccccccttacaggaatctcgtcccgagattctgggatggctagaaagaaagccggtgctgatgggcggtctgactgatctgcaccttgaactgccacattctgcttcgaactgattgattgactggttgatcaaccccgcacgatttgcactggctggattcgacctttctgttcctttgctttgccgaaactggaccgactggttctgcttgaactgacctaggccagaactgcggatactcctgaaacttacgtatcttggactgaactgttgatgctagcagcttgataacctaacaattcaccaagctggctagagaagggtgaagattgaatctggcatttgtaactcattgatcctacgtctgcttgaacgggtcctgactcgaatgtcaagtaattccaggaaacctgcttgacctgtccttcgtctgaactgcaactgtcctcgttgttgcttctctaagctgaactgttgacatgcttcacaggtgtaccttagaattgaacctgtcgacctgagattggggtgactctgctaatggttcgcaactgactcctttaactactaaccactttgtttcacctcgtcgatccttcgactgaaacaacgacgaggtaagccaaaactcatctcagagacctaccacccttacagtgagtagtcttactttcgcgtggctgggatcagttgaactgttgtccttcaaatatagccaacacttctctgatttacaaagagccctgactttgaaaactgaaaacttcatcgatccatctagttgaagcaatgacgatgcactttcatcccgacaagatttggaacttaagccttagttgatgataggaaattccacataaagaaattctcatttagctcctgatcttactaactcttgactattttcccatcagtaataactgctggcatgactgtccttcttctgacctgactccggtgtcgtgtcatccacctgaatgggttgtgtagttgatatctcaaaactaaactgaccgactcgcattggaactgacacaacttgaggagttgaggtgtcgctaacaaagctcttgatgtgatgacactgatgccttactgtggaacaaccctctgagaggtgccctgccgtacatcttccatggatggttggacactttgcaaaaactgctcttgaaaaccataaccactgtaggtagcatttgttactcctgggattggtggttggttagctgtgctgatatgctgaggacttggtggcgtactatctgaggttgtaggtgcttgctcttggaaaacaaactgactttcgctctgatcccgattccggcttgcatctgagcttgtacttgttgttggagacattgtcgttgcatctgctgctttggactctgcggttgcggtatcaacatctgacacatccatcatctgacattggctaaccaaaatctgaccagagcgaggtgctctgatttagcttgtagcttgctgccttgaactgatccaatggctctgaccgcaacatattactgctggagttacttccgcttcatttgacctcgtgtcgagctttgcatctcctgcttcaatacacccatcttctgatcttggacaccaaaagctgatcacgagctggggttcttctggtattgggataccttgaagctttcaactgaaccattgatcggtgactttaatacaccgtcgttgctcttctctctaacactgaccatcttctgccagggcggaagagaggtggaagagaggggttgctaaagataaggtactaaaccacttacctactgatctgttgtgagtagacttttattgttcaagttgcttaagcaaacaacctagtatggtcgcatccccaccagtgatgcaaaccatacccctacacacaagcaaacaacacacgatctagaagctaacgaaactactcttctgggacagattgggtttaggtcatctccggggaaactcttctttaatcttcgcagaacgacgactctgaactgatctcctcgctccttgcacgaagcttgaggctcgacctgacttgacttccgaacagacatgacgctggcggtttgtcctccaggtttgacaactaaaggaattggaggggcagggaggagaattttgaaaaaccgtttcgcaaagaaaagccgaagggcgaggggagacatttttcaaatagggttttcagaaagcttgtccttagggtttgaccatttggctcaacctacagtcaagttggctctgataccactttgtcacgcccagaaatttagcccaaatttccagactattttgtgtattaaatccctgtccaggaccagccagggtacacaaaacgacaagtaatatacagttccaaacgtaaataaagcgtaaaatacttacaaaagaggcacttagtcctcgcaccgaaacgaaaacagcagcagcggaaaaaggcgatcctagcggggcttcagctccactccacaggcaaaactcaactggggtctgagcctt

SEQ ID NO: 22167 - DNA, 517 bp, Oryza sativa
ccgccagcacttttttaatcatcctattgctgacattgcctcatttacggatgactttttagaaacaaaactatccgatgcaggcttaattcgtcacttaggcaaactcaaagccattcgtgataatgcaattgcttggcaagcccttaaagcccaagttggtgatgtttctaaatggctttggcagtttgtagatgccactcctcaacacaatgatgttgtagattatcgcaacgcccccgctcagactgagctcagcctaaaactttccaaaacgcttaaaaaaaatggtttcaaatttgttggtccaaccacctgctatgcgtttatgcaggcagtgggtatggtcaatgaccatgaaaatgattgtcaatttaaagcttcctaacccaccagaacggttcaaatccgcttaaggagtttccgatgagcaataatacgattcaggcttatgctgcaatgcaggcaggtgaaaaactggtcccataccaatttgatgcaggtgaattacaaccgc

SEQ ID NO: 22168 - DNA, 1206 bp, Oryza sativa
aaatgcaagaagacatgccaaaaaaacctgttatggcaagagcagtgatagctgatgtcaacacacttgaggagtttacattatcccagtaggagcaattagaggctgagggggaaagagttcagctaataggcagtgaagaaatggaatctcaggagttagggggagataacatcaaaggtaaagaagatcataagagtgaagaggaagctgaatttgaagaaggaaagaagaacaagaggctcagagataaagaagataagaagatattggaaatggcgatggaaaggaaggaagcaaaaaatgcatttatcaacaaaggtaacattcacattccttcttttatttctgagtccaatatttcgctagttcaaatggcacaagtgataggagttgatttgggttgttctattgatgctatagatgctaacacacaggttcttagagacctagaggtagccagaataaatttgtataagaaaacgatgagggaaaaggaaaataatggagagctcttgcaaaaaacagggcaacttgaccctgaagtaactctagatgtagaagagactgatgaggagaatgatttggactttgatttagcagaaattttgatgaatcatcttaagactccaagatcagggaagaaaaaggggagaaaaggaaatcttaaaatttgcaagggaacccccaagattaatagagacttgggaaggaggaaaacaagaaaataaatgaaaggtttaatctggaacattaaggagatgtgggatgatgagaaactgcaacatctaaaagaggttttacagaaagaaaaaattgatttcctgggcttgcaggaaacatgtaagaaagattttactgcttcctttttgaacaaaattaattcctcttatatcactaaatggatgtggtctccttccaatggaaggtctggagggatcttggtaggtataaatgaaacaatctttgaaattatggaagaggagtatgagaatttttttgtgagagtgttgttaagaaataaggaagataattttcttggatcttgttgtagtttatggtgctgctcagttggatcagaaaagggcattcttagcaagtttagcacatgtttgtcagaagaacaagggccctatcttgttaggaggggactttaacataattaggaaagagagtgaaaagaataagaaaggtggatataatagg

SEQ ID NO: 22169 - DNA, 566 bp, Oryza sativa
cattgcccataattggcttcccagacacaaacttctttggtataaagatcgatcatccacaggaaggagagagcaagcttacagctcacagcaatcagctaagccagtagccaatcctcactcactactcatcttctcttcccatctttgttgcttgcattcagagatcatccaatcggccatggctgatgaaatccagcatctgaccagggccttctcaggttagtaaacttacaaccattcaattcttggacacattcgtgtggcatttatgctgctgtttcatattgttttgtcttgcaaatgcttatggattttgtggatcgatcgattgatcaatgaagggctcggtggcctcggcgtggacgagccggcgatggtgtcggcgctggccaagtggcgcaggcagccggagaagctgtccgggttcaggaagagcttcaatggcttcttcaaggatcatggcggcgtcatcgagaagtgcgaggaggagtacatgctccacctcgcccccgagttctcgcggttcaaggcaagcgatttacctcttctctttgaatcttgaa

SEQ ID NO: 22170 - DNA, 589 bp, Oryza sativa
aaggaaaaataagagagcaaatatttatgcacctgtaactcatgagctcgaactgcccgtcagggggaacaaacgaaaggatctgattggactcccaaggtctgaatcggacacaagggtgaaacctcacatcgttgataattgtaggattagagaatgacaaggtcagttctggtacacctggaaggctagaatttacttgaattttaccatatgcttcacatttcactagagctccttctctgtaaataaaatttactgggatgtcagacatcaaaaacattctttcactatggtgcatgtcctaaggtaacaagatcagatggtgtcatgtgcgcacatgacagatggttggatctctccagaaacgagctacattgtgtttattcacagacatggtttcgttgggatccttactgctatgacaattaatgggcatgaactagatcacagtagtgaaaagtttgaatatgctatatagatttcagtaatagcttcctgcagatattaatagatgaaaaaactgttcaggcatgaatctagggtctaaaactcaaatttacagatttagtgaaatatatttggaata

SEQ ID NO: 22171 - DNA, 721 bp, Oryza sativa
ttcctgcagccctgctcggcgagcggcaggatgagatacggcagcttgggaggcgggtgcaggggcgggagccgctcgagggactcgcgccatggtcggcagacgccggcgaggtgcacgcggtcgtacacgcaggggaggcggttggcgatctcgcgcacgacggcgtcggcgaggtccgcccatggcgggaaatcggccatgagagacggtgggggaggggagaggaggggaggttgagaagaagacccttgtgctggtttgattcctcttggcttctggaagcttcggaaggagggagctgcgtcttacggagtggagtactttttatactgcaaggaaatgggacggggaaggtagggccgtctgggcccacccactagggctcgtgtgggcccatattgccgataattcaaaaaacaaagaccatttttcatctcaaatcaaattacaacgattatacatttgctcgattcctataactaatccaataataattcaagaaacatatggctcatccgaagttaagaacatcctacgtttatgcgagtgattatgacaacttatggcattgactacagggctccacaacggtcaacttaactctagcgggaactttatcctcgatgtatcttccgatagccacaagcgctgtacgggctttcctcaaaatactatgcgcatggttctgcaccgttcaaatctttcgtcagaacaccta

SEQ ID NO: 22172 - DNA, 653 bp, Oryza sativa
attcctgcagccctgacgtgtcagcccagtcacaaaaatacaggtgaagcccacatgtaagtgactaggaaaaatatatagaaagtgggacccacttttcatccctcttctccttctctatcttttccccaacaagcagcagagcaagaagcggtggcagtggtggtgtgggcagaggcaacagaaacagtagtgacgttcctgtgggtgctatgcgtgtcgacactgcgggcctcaatagcggtagtcacctcctacctcaacatctaggaagggatccactacgctctctttgtcaccgtttgccacctcttcgtgctcctcttcgcctttaacttcctttgtgacgtcctcaacggcgccagcttcaaccttaccgccatcgccaccttccacgccaccaacctcgattggcacttgggcagggtgcaagggcagtgggtggagcgctggcaatctcagagctgatgccaacgcagtacaagcacatactcgagggccatcctcaaggtggatctccacactggtggtgccgttgagttggtgctcaccgcaatcgagctcgtccatggcgtcgccgcgacggtggggagaggaagggccgccgctggatcgaactgcaagagccaccaaaagcagccccaccgtattct

SEQ ID NO: 22173 - DNA, 1627 bp, Oryza sativa
acattggtcgatcagcaggtcaagttagtttatgatcttagctaacgtgtgcttcctctgcattgtgtttgtttccccctctttgctgttttggtgagtgtgatggtattgtagtgctgagatattagctgttaattagcagaaggcagaactcctgttctagtacaaatctcttgctgatatgatcaatgtgtacctcgatccaagtgcatcgtttgctacatttctgtttccattttggatgattcaagacttggaaatagttgatacttgataacccgtcatatctatccttgtgttgccactgatattcagtgtggagatgtgcttatgactgtgtgcttacattttgcttagacgggagcacacctttactgatagacagatggcggtgtatttctttctttgcgttaagtggattatattttcatggaattcgatgtttggttatgcaattctatcagtatataaaggggtttctgagaagttcctgaagaaagtctgaacattgaggttctgtgctgaatgcagccttcaaattgtctgaatgttgatttattttatattctttgccattaattgcccacattttttttaccaagttttggttataccattctaaacttcctatgcagaactcaattctgcagaaattgcagattgttttctctatttggtgcctgcagattcttctgattttttactgttagcaggttacctgctaatatcctgatcatgttcattttgctggcagtaccatatttttttctgaattagtgcaagcaacatgcatcacccccacacagttaatatcctgaatagaccattgtaagttggaactgaacattgtcttagcacttcttcttttattttttttaaagaatcagcacgagattgtgctatttcattggatatagaggtaaaaaaaatacagcccctatggataaaagggaaactgtacacaaaaacaaagaggctattgctacgaagggaggaattctccaagccgccttgcacctgccatgatccaggttcttgtctcttcctttattttcgccataagattgggagccgttgtttccttgtgcttgaagatccgttgattcatttccttccaaatttcccacacaatgagtagggtcaaggatcacagttctttcttgggcacttcctttttgttgtttagcatgtcccaccactcttgaacgctttggcatgggtcccaatggttcagatccaattgctgataggcaactcagctggccgttagcctccaaatactcatggtgtatctacaagaggcgaccaggtgacataccgtctcgttcgtctcccgacataaggggcacaatccattgttttgccattctcttgcagttagccggtcggatgtccaaactctatttgtatcataagccacgcataaaatttgcatttcgcaggtgaccaagatttccaaatcaaggaattgtagttggtgccgacatttcctagcaattgtgtgtcttagcacttcttgctctgttgttatatgttataactgaacaacgccttagcatatctttatttctttcagtattgcaactgagcattgagctagcattaatttgttgcaatcctatgatgg

SEQ ID NO: 22174 - DNA, 2731 bp, Oryza sativa
atactttcaccagaactctaaatgtgcaacttagtctcttccacataaacatgccatgctaccccatacactgctcacctattaaggttgcctcctcgaattatcagatggatatgcatttcattccatgacattgctcttcctaccgtctagagcttgagtgcatatttttttttcgccaggcagcttgagtgtgtattcactaataatgaagcatatgactgttgagtaatacggtttcccctaaatgtgtaataaagatatataattttactgttaagcaaactcttaatataagatttcccaccttgtgagctgtccatctcacaaattctggagatatgcgactggtattaccaacctttgcagagaacagttacagtagcagcttcactggaatctttaatcctccggattaaaaacagtaatatactccagtgtttattcttaagcatattgagatctcaatcacccttaccccatagatacatattaagcatgtctttacaccaagagtttgttaaatcatcatcagccccctatgtactggtgcacttttataacattgaacattgtctttagcttcccaagaaggtaaacttatgagatggttgtgttttagattggccaatggccagaaggcctggcaagcatcattaagtcctatttcccctcaaaagtctagcaactgtaacttgtgatctccaaatacaagcaggtatgccaagtattagcacacctaaccatgtcaggtatgtgtgttcattccagaagaatcggaaaaaaaaagtccactgttggtagattaacataagcgggatgcttttgtcataccctggtgaaaatgttgtgctgtcaccaatttcctggggacattgattgacattttcattttctataaaaaaaatggaaaggagaactgatcaatattgtcactggcttcacaattcactatggggcattgattttaccatattgctatgatgctatctgatgggttgaatagcgaatttcatgatgtgtatggtcctttctgatctattatctctttcatgtatttaatgaggtttatgtctatcttactctgtaactgtcaaaactcaaaactgctagtttctatttattgggctccagtttggttaggctctcaggtgtactaccctatgcagaaattgcattttttttctgttgcacaataaaacatcatctccgtgcatttttgtttgacacaattgcacagcaactaatatagttgtctactcagtgctctaatgccaattgagtatatttcatagtagttaatcactgctacccaccagtaactgtcttttctttcagagaatcactgataagtgataacactgttagtgataaacttttctatgcaaggctcaatttacctacgaaggttacattccactgcactatgtacctaagcaaggcagcgcaccttgcatgcatcatgtggagagctagtactccatgtcgtcgcactgttcttctttatctggtttaagtaaccatttggctttacaatcccaaatttgaacctctcttcctatgtttgtccatgcaggatatctggcgtcatatacattccctaatgccaatgcgtgatgctgctcgcactgcttgcctgtctcattcctttctatgttcctggagtgctatcccaacctcaccttcaataagtatgtgtttagacccaaagcatttacgtatggaggggatatcagccacagaattgactctattctgggaaaccactcaggcattggtgtgaagacattgaagcttgaattatctggtaccgcatatcacaatcttgacaattggcttcaagttgctgttacaccaggcattgaagaactcacccttatggtatgtagactggagataacgtacaactttccctgcgcacttttatctgatggggttcggaactcaatccggtatcttgaacttggcttttgtatcttccgtcccgcaactgaacttggccccttcagaagactaacaaagttgcatctgcaatacgtgcgtattacaggggatgagttagagtgccttctttcaaactctcttgctttagagcagttggcactcattcactgcgatcatataatttgcctaaggataccttgtgtgctgcagcggttcagctgcctgagggttcatggatgcgtgaggctgaaattgatagagagcaaagttccaaatctctccactttagaccttagcggaaaggcggaactgttgcttggggaaacattgcaaatgaagaacttaagcatgcgccatccaaatgttgtctgttatgctcgttctgagcttccatccagtatgccaaatattgatactcttgccttaagctcctatgatgaggtatactctaaaactttgtgttgtcgattagcaatgtatgtgtatcacatggcttttgaataattgatctgagacgtggcatattggttgcgcaggtggttaatacaccaatgctgcctaccaaattcctctacctcaagcacctgaccatttgtttgagctccggaaccttttcgccgtcctatgactatttttctctggtttctttccttgatgcgtctccttccttggagactttgaacttggatgtaaagctctgttcatcctatcctgcaaagttatctggtcactgtgtcaggtcaattgactatactttggtttcatcttcaggtaacaaatgatccta

SEQ ID NO: 22175 - DNA, 1666 bp, Oryza sativa
ccaccctctcgtcggacccatttatggatggatgcgtggtcgccggactcatcaacgatcaagctcccatacccggctaccgccgccagaagattgcgttctggcaaattgaagatagggtggtcgtcggctacttctacatgggtgaagcgtgctgggatgcggtggacgtcgtgcgccacaatggagccttccatttcctcaccaagggggaggacatcatcgtgggcaatccggtcttcgctgaagcgggtgcgccgccccaagtgcaatgggagtatcgctgcttctcgtcgcaggggcgcggctacgacgggcagcacgtcgtggcgcgctacctcgtggagtccagcggagaactgctcatggtcgtgaggtgctctcctcgtcctggagagttcacgtcagcgttcaaggtgttccgaatggcacaacccgaggaagacgacgacgcaccctcactggatggccggacgatgctgttcgtcgggcgtccctgctccagatctgacggcgatgtggttcggtacatctggagggagctgccctcgctggaaggccggatgctgttcgtcgggcgcggctgctccagatcctacgacgcggatcagtaccctggcttcgagggcggcatctacttcttcgatcatcggatcgccgggccgctcggcgacgcgccggcgcagtacccctgcagcgactgcgggaaatggacgggaaaacctgcactccaggtggaccgcttcttcccggagcaagacccatcgaactacacctctcaagtttggttgctcaacgggtaagctagtttttgatctgtctaacaggtgcttcgtctgcattgtctttgtttctttttgctgagtttggaagtttggatggtattgtagtgctgagattgtagtttctgatcagtctccaactgttagaagaagcagaacacctttttctagtagaaatctctttgctattgcagctatgatcaatacaccgtttgataatttctgcttcccacttaattgcatgattcaatcattagtatattcctgttgcaactgattttcagtgcggacatgtgcgtatggttgtgcttatattttctttgtgaagtgcacatcgttttgactgatagatggtgttgtacctttgccttgcacgaattggatttctatggattctgatatttggttatgtagctctgtcagggcttttcttgaaaagccactgaatgaagtatgaatatcgaggttataaactgaatgaagaacccagaatggttggatcttgatttattttgtattctttaccatgatggatttatcaaatttcagtcaagctttgttatgcctctctggtgcctgcagattctgctggcttagtcaaatttcctattgacaaatcaattctgcagaattgcaggctatatttttcctctttggaacctgctgattctttatggttagcaggttacctgatatgtaatacacaagacacctctcaaaaagttgtcatacacagacgcaatgcttgctaattaagttggcatggtatcttaccctcatctgttttagggctcatgttcaacccgttcattttgttggtatcgtattttagtccgaggtaagtagtagctaaacattctcataaaccatggggctgcaggaat

SEQ ID NO: 22176 - DNA, 558 bp, Oryza sativa
atatcaactttgttgaagcagggtaatgggagaatcgctacacccctggtcgaggaccgggtagtagccgtaacccgaccacttgaagtggaaatagtgggagaaacgctacatcgctggtcgaggaccaggcagtagtcgtaactcgaccacttgaagtggaaatagtgggagaaacgctacatcgttggtcgaggaccaggcagtagtcgtagctcgaccacttaaagtggaagtagtgggagaaacactatatcgttggtcgaggaccaggcagtagtcgtagctcgaccacttaaagtggaagtagtgggagaaacgctacatcgctggtcgaggaccaggcagtaatcgtaactcgaccacttaaagtgaggcgagagagatcactacgttttactggttcgagaaccaggagtaggagtctcttaatcacctataggggcgctaaagttggtttattacatgtgcatatcatgtggccagcatgactcacacacccaacttatagcatatccggatgtccgttcgcaatcatgtcgggtgatcaagccgacg

SEQ ID NO: 22177 - DNA, 584 bp, Oryza sativa
tcctgcagccctgagagaatcgcggtcgtatcgcgtccagtcggtgacggtgttgcgcgaacgggaaaaacgggtgggcgtgccatcggtggtgacgatgggtacacccgccatattggcatcgtcggcgctgcgattgagataatcgacgcccgcgcggagtagctggtctcggtcaggtcggcttccaccgtgccgtagaagatgctgcgatgcgatgtcgccctatcgatgttgagaccgccatcctgataggcggcaacgacgcgcgcgcgtacccgcccgtccttgtcgagggggccgcctacatcgacctgaccgcggacatgatcccagcttccgccctgcgcttccagctgtacctgccagtcgcccggcgcacgcttgcggaccagattgacggttgcggagggattgcccgatccgttgagcagtccggaggcaccacggatcacctcgacacggtcatagatggccatgtctgcataagcgtccccgaatccgtaggccgtgggccgggcgatgccatccacctgccagttgttgatttcgaaaccgcgcgaataaagcccgctctgatcgga

SEQ ID NO: 22178 - DNA, 6534 bp, Oryza sativa
caactaccaaaatctctccaaaacatacccttagagcttttataaaaccgtgggctctcttatctatcgtagagctagagcttcaagatgccaatatttgatgtatggaagatgttaatagggatgggaagaacaccggtggctcgagaaagacatagttagtagaattttttttcagagataatgaatattttgtaaataaatgaaagcatttggcttctgcacagagttcactcagttgaaacaccatgaagcatgcaaaaggaaaaaaaaaaagcaatacggggaaacttccctactgacttgccccggtgaaggctttcacctctatgggcctgttatgtttagagaaaaaagagagtaaaggattcgaatcggtaaagattaattcctctagtgtcatttgctttggaggaatgaaatatactagaactagagataaattttctttcctacaagtcatagagaaaaaattataggaaattttctattcaaaaattcttttaaatttattttgtatgcatttctgttcctatagattgaaattcgtacaaaccaaataagccctaaatctctagttgagaacatggaatcaaaggatggtggtggcctctctcttttagcctccccatcccgctcaccaccatcaccttctttgccgccagagccaagcccttccatccgccgttccggccatctccttagctctctgcaccggccaacacctttctcgagtgagccaagctcaggaacacattcaaccgccggcgtcaccacctcccaaccaccggagcactggtgccccgctcctcttttccctctgctctatatgcgaagaaagaaggaaaaaagagaaaatgggaggatggacgaataaaatgaatctgacgggtgggtcccatgtgtaaacgtgaggaagatggaaaatatgatgacgatgacatggttctaattttgtaaaatttgagtggcacgcttacgaatagacgaattgtaatgacatttttctgaatagccacatttgcaatggcatggatcgaattaaccctaagaattattccaaaggagacttttttatttatacaatgtaaatcctccaaaaagaaattctctattttcccttagggcatcaccaatatttactacttctacctaatttgtgaataagggcaaaccttgcgccagtgcatattagttgttgtagtagctaaaatggtgaaataacaaaagtaggttctaaggtgatcccacagccactagctatgagagagggtgaatttttatttatttatttgttcattatgacaaggtaataagcatattatctatggccgagtttagttccaaaatttttctttaaacttttaacttttctatcagatcaaaacttttctacacacacaaactttcaactttcaaccaaacttctaattttaacatgaactaaacacactctatataaccgggctgtaataggtattttattgttactcccgattgtggatgcgcgcttggttctctctagtcaagtctcccaccatcagatgatcagacgcgccaaaacgacgcagcacgggcagcaacccccgccacaagccacattttgttccaccactcgccagcaacgtcccgccgctgcgatggcgacaccgctccagtccagtctccccctctccagctggtggtggccgcattcaccgacggacgacgggagtaccccaccggcgccgcaccacggccacgtgacctcgctcgccgacgacgcatacagtagtactcctactcccgtcgtaggaggagagtagccgtagccgtagatacctcgacggtctactacaccctagagcccctacgactactactagaggctactagccgtagaagagaaaggcgacgcgtgacgcccaatcggaagcctcccccaccccatctataggcggccaggccagtagatatagggtgcagcttttatcgcgcttctgctgctgcagtctgcagacggcggccgcagcagaagctgccctccgcccccacaagaagtctcgatcccccccacactgctcccaacgccaacgcacagaggaatttcgagccacttcaattccacgcagaccacctctttcactcttctcttccctctcgctttctttcctcttgaaaaagatagcgagagagagagagagagaacaagcagcggctatagctaggggggagagagacgaaaggaggagaggctagggggtagaggctagtaagcctagtatagaggggtttctttcttttttgcttgggagagagattcttttatagtgggaggagaaagggagggaggaggagtactaggctctactagcgccgtagctctactggtgatcgaagtggtgcgcagcagcagcagcatcttcgcggtattctcgcgcttttctcggaagctggtttttacccggtcggaggagagaggtgagcaagcgtggcgtcgtcggcggggcggcgcttccagtccgactccggcgcgttcgcgggctgggtcgcggcggccggcgggggtggcggccgaggggacgacctgtcgctcgggttcaatgctgcagccgcggcggctgcggcgccggcggccgcgtcggcggcatcgctctggggacctgtcgccgccgcgtcgtcgcgccaggcggcggcgctcaactacgggttagccgccgcgggcggtggtgacgtcgggatggtgctcgtcgcccccgccgcgtcgtatcatcaccacagagccgccgccgccgcggcggcggcggcggctgcggcggccgcggcagagcccgtgttcccgctgctcgggacggggcagtgcgcgctcgacgctgacactgccaagtcgtcgggcgctgccgcggcggcgggggtgccgcccgggagcgccagcgccatccacttctggcagtcgcagccgacgacggccgccggagctggtggtggctccgccgacaagaagccgctccccatgctggactacggcggcatcggcggcccgggaggctccggcgcggccacgtgccacgactgcggcaaccaggcgaagaaggactgcgtccaccaccggtgccggacgtgctgcaagagccgcggcttcgactgccccacccacgtcaggagcacctgggtccccgccgcgcgccgccgcgagcgccagcagctcgccggcgccgcctcctcccctcccacttcctccgccttccccgccgcgaccaccgcctcggccaagaagccacgcctcctcggctcccagaccaccaccaccacctcccgcacctccacctccaacgccaccactcctcgcagcttcgacacctcctccagccaccaaggtaagtgagcacacgcccgcggcgcatggcggcgatggcgcgccgccacacgaacagaattccaggaagcctaaccatttttgcctcgtcgctcgtgaattcctcgcagtcgcgtcgttcagggacgccctgccgcgccacgtgcgcgcgccggcggtgttccggtgcgtgcgggtgacgtccgtggacgacggcgacgacgagttcgcgtaccaggcggcggtgaccatcaacggccacatgttcagggggttcctgtacgaccagggcgccgacgacggccgcggcggcatggcatccaccagcaacgacgagtccagccacggcgccggcgccgccgtgcccagcatctccgacctgcacctcggcagcgcctcggcggcggtgccaccgcacctgtacagcggcggcagcggcgggccgctgatcctcggcgggttgggctacggcaacaccatgaactgaaaaactaatcgtgcaacaagatcgagtaagcatgaggtacccattgattactataaaatctcctgcttttcttttcattgagtagcttagtttatggagtagtactgtcattgctactgatagtggcagaattctcgtttcttgttaatgttgctgttgctgcaatggagcaagctatgtagtcttgttattagaagctgggaaattaaaaaaggttcaagcatttacaggttaatttgtgcgctcatttgcataagatattgccttgccgtgaatatgtgattactggaatatttatcttttgttacattgggaattgcttatgaggttatggaagggttttttttaattaaccataatggagtagaatcatttcgagttcatgtgtttataaagttgttttggagcaatcattccgagtacattttgggatggccgatacaatggagaatggagcggaaaagtttgactctttgatgctctcttatctatcgtttccatgccatcactagactgtcttgcgtgttttagctgccaaatgcaggcctcgtttaccatattgagttgcttgccccttttccagttttatgtccaagaggttggtaggaacagggatggaaggcatggattctttacttggccgtggtgtgtgctgttaagcatcttatccatgcattggaacttgtagccaagagacgaatgtgcaatgcatgtgcttgataagacctcttctcttctctttgcactaaaataatcttgattagaattggctaattttggtcatggcatggaagccaataatccactagccatgcctggttgctgcatgttctatatagggcaatgcttaaaagagaccatggaacttgtactagccaagagatcaatgtgaaatgcatccgctgataagacccatccgtctctttgtattttaataatctgattagaaaattaccaacatgatcatggagttgaaggcaataatccatctattagtaggagtaccatatttggttgcttatgctacgtgaacttctcctaatcttttgtttccaacccggaatattattattccccttccggatcccatcaaagatgaaaagatgtgaaaagaaagaaaggaggtgttgatgaacagccttccactggtcgcagaaagatagccatgtgtatttaatcatttgttttgggttggagtaattttagttgctgttttctacacctactcatgtcttgtccaatgagtgagtttggtcggttttgcttgagctactgtggcatcaaatctttgtgtcaattatcagtgcacctacatgatgatcagtctatatatatcttgtcatcatcaaagctgttgttatcttatgtgactaatcaaagcgtttggtccatgccgtcgttctgaatactgcctaactttcgggagcacggacactgttcagggtgcttctttatttgatgcagtgtactgtagatttggtgtacctcttcaactacgcaacggttgcgttaagttctactcctagcttgactaacggcaaaactgtttacttgttcagttaggacaccatgctcatcttggttactactacgggataatttgattatttccactcttgtgatctcatagttcagcactaatatatacaattgctatttattacggagtatatagcctgattagcctatattccagttattctcgtattatttgaaatgataggacaatcaataatcataagtgacaatcatgttaattttcttgttgaatgctatatattgcgtagcaccactgaaatatgcccatatttgcttgctgtgaagacagttgcacgtaccgttcaacaacccagtgatttatgtttcttgcatatggtagaaggatctcttcgaaaaatcaacagatgcaagaaactgcatgctttggcttgtttgtgaggtttatttttgttcaatagttatttctccaatattcaaagaccgcctgatgctttggctgtttaagtgaattctttattgaaaatcccttaataatggttggatatacattattgatagatattattgctgctttgttattctttgtgttttctgaatttccagtgcagtatgaatggtggtaattatgggagtcttatcactgcctcaaagggaatgttctaaaattgaaacttatgtttctgtgctgcttaccagtgatatgctgttcaggattttgttttctttctgacagttgaaacggtttacatatgctatcctaggtaattagcccttttgtttaccatgatagcatggtttaatttgatgtatgccagtatgattactcagattagttgcctaatatgccttcctcatgctgttgtgtttgatgagagaagctgctgttagttggttaatgctttatatcatttccctgaatcatatgcaagaaccaatcaagtgaatttcgttcttttttgctctaacctgatgagtaagctaagcttctggtagatcacattctttattttttacactgatagtactccctctgtcccctaatataagggattttgacattttgtttgcactgtttgaccatttgtcttattgaaaaaattttggagttattttttttttgactttattatccaaattactttaagcacaactttttgttttttatatttgcacaaatttgttgaataagacgagtgatcaaacagtgcaagca

SEQ ID NO: 22179 - DNA, 5596 bp, Oryza sativa
  unsure (1)..(5596): unsure at all n locations
caaatgtcaatgcaaatgtttcatcatcattactttaattcttcaataatatttaattaaaaattattaaaatactatatgtgaaaggaattttaattacaaatccacatagagagtattatttttttaagtactttctaactatcggttgagtaatttatttttcatattcaaacaaattttacatcatttttaattgcttagaccctgtttgtttctcatactaggagaggataaaattttggattatcgtggcacgcttttcaaactgttaaacgatgcgtttcgtgcaaaaactttctatatgaaagttgttctaaaatatcagattaatccatttttgaagttcgtaataattaaaaatttatttaatcacatattattaccacctcgttttgcgtgaaatacttaatctttatttatctttagaagattcaaacaccacctatctatgcgtagacgccttttacacacatttgggtagaaaatgcggctataggcattagtcttctattggttagactaatattgattacgaaaaagtaataattataggtaaaactttatgcatgtgtagtcttagccgatctaaaagtactctgaataaaaatattaaaactaaatttaaaactaagtatcaaaatttaaattctgactacggtttaagtagaagatgatagcaagtacgaagccaatactatttgaagactgcataccggggtgaggacttgcgtcgcgagtcgagacaagccactcaatcgcacaacagcgagcgtaccaaacaagttgggtcaagaaacatgacgtggagcgagttgagacttcttctccaggactactaatttgcgcatacacactagcagatgaattcacgcacgtgctcccaactacgttataacaagtgtcgggttagggttaggttttcgggactggggtggaggagggtggctatggaaaggggaagtgggggatcaagcttagagggatggcctaggaggcaacaatttgacgatgtgtggcggacaagggcggttggtgaggtggcggtgacgccattagagccgcgaggtcagcagcgggttgtgggctgatgatatcgatgagggcaaagtaaggcgaataggagggaaaggaggccgctctggaacattgacaccttttggcgctggtgaggctggagatgatggtggagatagagctaacttggttgctggaggaagaaagaggaggcttgccaaatagaggctttcgtcgctggaagaaggttgctcaattccgtccctcttctccatcggaggaagcttgctgtaaagagaagggggtttgtcagagggcctccaccatcgctagagggaggcgacagcgtcatcgcttcctcattcgcttgcacacgtgcacgggtgaagacggagagaaagaaatggataagatatatatagagagaggagatacgatggagtggttggtggccatgggccgtgggagcgtgcgtgacatgcgtggccctcttcttctcttccctttactgtgaataaacaggtcaataggttgagaaggggaaaaatggttaattagatccatgccactttaagtatgctgattcagaaaaataccaccattattcgtgatatctgttgcgtgccactggaattttgtaagattgaaacatgccattgccgtcacgttttctttcattgcctcgttagatccgtcaacctacttggcttctccgtctccgacatcgacaccaatcaccaccagtagcagcaacaaccgtctctggcaccgccgccaactaccaccaggagtagcagcaacaacaacaccaacgcgcgcaatccgcctaagtgagaagctgtcggtgacctcccgacggagaggatgagatgttcatgcgttgcagcctgagtgaggaaatagagaggggagatctattttctcaccattgcctcttcctcccccatccaccgaacctcgccgccacgccacccctctatgtcgactgtgcgccgttgctgccttaaccaccccgccgatggctctggtacaccggacagaccaccacaccatgcatgtaggcaacatgttgtctccctcatctgtcagcttccatgtgtgatgccattggtgagctcgcgtgagggctcccgtcctgacgatgcagcttccacaacctctaattccatcgtcgatgaggtcaccgctaccttgccctttagccacttgcattgcgcacccatgggccgcctgccaccgcatcctctatccaccgggggagatgtagagcgagatgttgaaaagagaagaggcgagggtggaggaggaagatggagctaacatgtaagtctcatatgtaggggtattttaatttatattataacagaaaatgtgatggcgatggcatggtcaatggtacgcaatagatatcacaaatagtagttgtatttttctgaatcagcacatttgcagtggcatggatttaatttttaaaaatacgtcctggctgggctgggttgggctggtctggtccccgcggatccggccgcaatccagcctcaacccggcccaaccaaacaagggcctaatcaatttccccggcgcggcaactactactatatagcccaagtctgttggtttcccatccgcgcgaaaattgcaagcgcaccgcctcccccttctcctcttccctagtctactttagggtttcctccctcaccgtcgccggcggcgacggccaccagacgcgcgcatccggcgcggccggcgtcaccgcctcccagccccctcgtgttgctcgcgtctccggcgaccgtcgctttgccttgtactccggcgcctgcgtcggctactaacttgggtgactaggcagcaataaggtgacctataatgcgcgcttctttttccaaattgtgttcttagttgagcaaaaattacaaattgtgttcttgcttgccctgtctgtgatctgtgtaaggcaagctagcagtagcatttgccggtggcgtgtctacgttatgcttactacgttaccgggtcccaaggcccccgagtaaattattcaatactagctaaattataccatgttaacttatactatattagtcaataattagataattagtatgtatcttatctttcataatttttgttctaggctcgtcatgtactagctacttgacctattagtttttgtcattgggcgggaaagatatatagttgaaccccgagcaattggggcttcttctgtgaattgattcatctctcacacatggttctccactattccctgtctattggttcttcatggttatagagctggttggatattactggtgttacttgcttttctttttttaaaaaaattatctactgcaaatttgtaaattaccatgacaagccgacgttatttatcttagataaataattgatttgaactttgctttcatcgttgctcagttaacctttggtagcttcttctattgtgaatcaggtatcatgcagctccagttaaaatggcattatattagtctatagattcatttgcagtaaggatttttttcctcttttgcttgcgaagatcatttatatgacaccttaattatgttcaaagcttactgggtattactagctggtctggccctactcagttttacgtgtacctagctatatacgtaatgtgccagaaaatcagtttgtgatttgactagctagttgcttctgccaaaagaaaaaaaaccaaaaccaaattaaagatcgaactttcatggtaatgtttactcagtatttgggtcttgtcctttctgatccaaggttggaaagatgtctaaacgaaggggcaattgctcgagctcaaatgaagagaagaaaacttgcacaaatagtagaaagaaaggtgagtccgttcttgaatgttgattcacttccgccatttcttacatgtatttacacagctctaaatgtgttgcttttgaagaggaatctggtagcttaattgattatagtgaaggtgcctagagtggactcagtcaagaagtcatttcaaacttatctgaaactgttgtctcagtggcttcattcaatggtgagtgcctatacaaattagttttccatatatgtatctgatcatcagttctaaacattgaagatattatcttgtgcaggagatcagacgcatttttcaggcacaggcatagttgtcagaaccaaagatgaagtaactacaagtattctaacttcagcaaatgtgattagatgttttgatgatgacagcaagatcaatccgtttttggatgttggtacccctaattttctctgcactctgtaacttacctgtttaagatatgataataatctgcaggtgtgcnttgcataatcactgcaagattcgagtttctgcttcanaaatnaacaaacgtgtcatcgggtgnaatggnacactttgactttaacttacaatatgctgtttgtggtgatcaaatatttacttggtntgcgagctgcgtcttttgatcacgaagtgcgatttgggtccaaagtaaggtagtagctgtagggcgttccttcacntcaggcaaattgatggcgttatctgggatagtgactgatgggccaacagattatcctgaacaccttatgatctccacatgtanaatcactaaggtgcactgctgatatctcttctttcttctcggtattgtggaaattaataattgtctcatgatatgagtagcagaatttatcactagttcactacatacactgtactatatcgtttggggccttaaacatttcattctcttcatgtagttttttcattcaatatggttttatttttgtgcttatcttagctcagtgtgacagtatattttcttccaggatatggctggaggaccactcattgatttggatgggaactttgttggcatgaactttttttcggaggagaggactccattcctaccaaggaacaaaatttaccgaagcttggtgcgatcttgcacactttggtatgcctcgtactttcattcagatcctccaaacagtcaaacacttgccaagccagattgagctagaaatagtttagggggttaagtgctcccgcaaaatagtagttcgagggattaaagtggacctttttcatttttatttgacagcctatcacataatagcgatttggttttgcacatagtactatgttattataactctgctagataaagcaatatattactatgttttgcacgccctatagctgatttccataatatgcttcttatggatggaagtgttaatcttgatagtatttttgattagctatatgcaatccattctttttggggatcagcagctctgtgtatttgcactataagagtatactacattctgctgcagggttgaaatcgacgatgaatgcacaagcataattgaaagatgcagatctaagatgatacacaacaattttgttggtgagttcatcagttgaagcacaatcactctttgaaactgctaaattgtttattgtcagaaatctatcttcattaatgtatattattaatccttggttgtagtttcctctcctgtgggtaaagcttaactt

SEQ ID NO: 22180 - DNA, 3555 bp, Oryza sativa
  unsure (1)..(3555): unsure at all n locations
gcttcgtcttcgtgcatgtcgaagagcatgtcaaggaggtccttctcgtcgtcctcgccgtcggtcgccgcttgccggcgtagcttcctcttggcttccctcgccgtcagtatccgctccatcatggcgtcgaacttgcggtgcaccgcatcgatgcgcttgccgagcccctgcacgtcccagtacttgaagacgccgatgtagtcctgcaggttgaacgtgccggtgagctccgccgtctcggcgaccacgctccgcatctcctccgcgtcgttgtcgtcgccggtccaccgccggcccatcaccatgcgggagacgatgtcgccggtgaggcccatgagcgcggcgtcgacgtcgacgcgctcgccgccgtcggcgctcgcgcggagcgagccgacgaggcgcgccacctcctcgcggcggacgtggcggagccggtcgagcgttcgtccggcgaggagctcgtgcacgcacgcgcgcttcatgaagcgccagtagggcccgtacgccgagaaggagaagtcctggccgccgtaggtgaggcggtggacggcggcgggcttggggcggtcgaggaacgcggcctcgtgggtcttgagcacctcgcgggcggcgtccggcgagcaggcggcgacgcaggggacggagccgaggcggaggaagaggagcgggccgtggcgcgcggcgaggcggtggagcgcctggtgcggcagcggcgcgagcaggtggaggtggcccaggatgggcagcccgaacgggctcggcgggaggcgcaggccgctgctccgcggtggcggcggcggcggcggagcgcgtaaagaacaatcaggcccgcgacgaagaggaggagaggcttgaagagacctcgagctaccagctgatgatccatggcgacgaagagcttggttaatttgactactcactgtgtcactcagcttagctagctatgcctatgctacctctgttggttctcacttggttatatgcttaagcagttaagcttaatgcttgtgggttatgcacatgctgatgttaaatggatgtcatctgtgtagggatgaaaatggagcggatacggacggatattgatcataccatattcgttttcatattttttgccgaatacggaaacgaatatgaatagctcgaacacggactatctcgaatacgaataagaatcgaatatgatcggacacgaatacggaaacaattttttctcggaacacgaaaactaattcaacttctaatagaaacaaatatcaagatatataattagctcattttatataaaatgtagtataatttataaatatttttgaaattttcaataatattaataatatggactagtgttaagagatgaactactattaaaatctaaaaaggtatattgaaggtcatagagttataaagaaatgtggtgtgtcttgtggcttatgcggatatccgaatagcactgttcaccggatatccgaattattatccgtatccgacgaaaaccctgataccatattcgtatctgtatccgagaaaaaatatcagtattcgtatccgaactatctgagaattatccgatccgaaaggtatccgtattcgtttttatccggagcggacggaaactatccgtccgttttcatccctacattggtaagcaatttgtctaaactacttattccttgcttgtttttttttcatttcaataaatagcaaacatttgaggacttaacattgcccactagtatgtacaaaaccatatatatatataagtattttgattttgtcacataaaaatggcagtgatagatccatcgtaacaaaaaaaatccgatattgtagtgactatacaaaatgaaaatgtgttctaaggctgtgttcgcatgtcatggatgggaacttttttcctccgcacggaaaacagagtggtctattagtgcgtgattaattaagtattagctatttttttctaaaaatagattaatttaagttttttaagcaactttcatatataaacacaggggttgggaacaaggggttgcanacacagcctaagaccatatatataaatntggtggtgacctgaaaaattgttttaaactcttgaggaaatatcccctcgtttgtctaaaaacaatccgaatagttatgaaaattctaaaaaaaatttaacgacaatcatgcagcaatatatatacaactatacaaatttttatgtccaaactcaactcacatattgagatattaaaagggacaaattcaacagacgaatagtaatggtattatttatacctaatttttctctctctcaatgtgtaggtcaaatttaaacttgatttttggtggaatattatgtgtatgaacaagagataatttgacaataaaccattacataatcgatatgctgtcttgctaaaaataagattcccttttatatatcaagcgttggatatagaattctagtgaaaatttcacctctttaacgtttcacgccataaacctgatgctaaaactgaacacatgaatattgatcacgagagcgccaaaacaatatttttttcttttgtaatttcatatagccaagggatcaaaatggattgaattttcctgggtttctaaatctcgctggtggttggaattcgtttttgaatttcttgaaaacaattcgaaaacatccctaaaactctaatttcaagctgccctgaaaaaaagatattccctccattttatattataattaagttgtttgactattttcttagtcaaacttctttaaattttaacaagtttgtagaaaattatagtgatattttccatacaaaataaatatattatcaaaatatattcaattttaaatttaatgaaactaatttagtattatagttgttgttttctttataaacttatcaaacctaaagagttttgaaaaaaaaaagatcgaaagaattataatataaaatggagggagtatatcataaagagctctgctataaatacgataaatatcttactattagtgtcggtgcccttctaatctctaatacatgcaacaaatatagggtccacaatgtttccatggccaatcaattatcatgcatgacactagatcgtaccaaaatcgtaacaagtttatcttacgtacatcaatttcctatcataaaaccgaccggcgtcggaaccataaacccttggcctttaacgacaaacgcctccaaacaataaccggtacagtaacttattagtccattcccatgatgttcattttttctttcgttgaatcaatcggcaggagaactaccaggacactttactttttttttattattattgttattatcgggatctgccctgtgatctgcgagaatcaatccagaaatcaagacaaatagacaatggaagctcagtacgatcccctccactgtgtttgatcaggttaatagtatggaccgggcaacattggataatggcgacatcttcttctgttcagagtatctagccatgcccggccggcatggccggcaggtgtgaaatagtcgttgattgagctagctacatatggaa

SEQ ID NO: 22181 - DNA, 954 bp, Oryza sativa
attgaaaagtacaaggctcggcttgttgctaagggctatactcagaaagaaggcgaagatttctttgacacttactcacctgttgccagattgaccacaattcgtgtgctactttccctagcagcctcacatggtcttctcgttcatcaaatggacgttaagacagcttttcttaatagagagctggatgaggagatctatatggatcaacctgatgggtttgtagttgaaggtcaagaagacaaggtgtgcaaattgttgaagtatttgtatggtctgaaacaagctcctaagcaatggcatgagaaatttgatagaacattgacatctgcaggcttcgcagtcaatgaggcagataaatgtgtgtactatcgccatggtgggggtgagggagttattttgtgcttgtatgttgacgacatactgatatttgggacaaaccttgaggtgataaatgtggttaaatcattcttgtctcaaaattttgatatgaaagatttgggagtagctgatgttatcttaaacattaagctaattagaggtgagaatgggattactctcttgcagtcccattatgtggagaagatcttgaatcgctttggctacattgatagtaagccttctccaacaccttatgatcctagcttgttgcttcgcaagaacaagagaattgctaggaatcaactggaatactcccaaatcattggctcgttgatgtacctggctagtgcaactaggcctgatatctcctttgctgtgagcaagttgagccgatttacttctaatccgggagatgatcactggcgtgcgcttgagcgagtaatgcgctatctgaaaggtactatggaattgggacttcactatactgggtatcctgcggtactggagggttatagtgattctaactggatctctgatgtggatgagatcaaagccactagtggatatgttttc

SEQ ID NO: 22182 - DNA, 1514 bp, Oryza sativa
acctcttcttgacactggcggcggtgcccacggcgagtgtgagctccagctccgccgccgccgcctcctcgtaatcgttggtctcctcggcgtcctcctcctcggggctctgcgtgtactcgaccgccagctcgaccgccagcacgggccacgagccacgggccgaccgtgagccacgggccgccgttccttcggcgacgccgcttcgcctcgcgcctacgacccgtccggccccgtgcaccactgcccaccggccccgggcaccgccgccctccgcccatccgccgccgtgcccgccgctgccgctcgcggtgccgcccacatcctcccctgcaccacccagtgaccgtgagagagagagagagtgaagagagagaggaagaggggaagggcatgtaggtcccacattttttaaaaaatagaaaatgctgactgggttgccacgtgtacgtcacgtaggacaaaaccgctctgaattggatcgaggggggtaattcgtctggtattaaaagttcagggtgaacaatatctgcttttcgagttcagaggtgtaattcggtcgaccgcgatagtttaagggggtaattcgtaatttttcctttaattttagtcctatgaagtttctactacacatagaatcggatgtagtataatagaatcagattcactagatttaaagaaatgaatggctcacaaacattttaagggtaccttaaaaacctaccattactacatactagtactttatgcatttaaaaaatattcttttcttaaaaaaattaaatactactccaatccctctatccctatttgacaatcaaatctgcaaaagatgctgagaccaagacaacaaaaacccctttgttcccacagtaaacctcatatatagatcaagagatgtgatgctgtttaagtgttgcgtgcatgcaaaggtgaaggtgaaggtgaaggagtaaaatgcaaaacgcgcgcggatgcatatatacgcgtacacaaataaacgaggagacaggcagcgatgccatttgctcgtgcataaatgaacaaatagatgtcaatcagacattgatcaacggggagggatagagaaagcattatatagtaaggctgtgtttagatctaaacttccaactttttccatcacatcaacctattatacaaatacaacttttcagtcacatcgtactaattttaacccaaatttttaactttgaaaggaactaaacacagctaactggttgctcggcgaatgatttattcagctaaggcttatatataaactgaaaacgtacttaaacaatgattttttaaacaaagtggcataagacttttatttttttagtcgtaaagaaaccaagattaaaaaaaaactccgtataacacaaatataaacctaagttaatttgaaaattttaaattcaaatttggcctcaaaataccgtcccaagcaacttcgcactctgcagaagctatcatgaagcagggatagcagcagcacgaatattaaatactgt

SEQ ID NO: 22183 - DNA, 1472 bp, Oryza sativa
ggcattgccaattttttgttctggttggtttggtcaataaaccaaacatgccatcagaaaatcacaatcaaacatacaattaactgccactggagatagtctacacttacatttgcagaaataaagactggtgatatttacatttctggttcacagtaacagttgcagttttccaattgatggtgttagttgaatttattcttcctccagactcctttctccatataatcaggttgatgctcaagatttaaaatccatcttttttatgaattcaaaatcagctcaggttagagtctgcaagcaaagtatgtgaagttataaatgcatccttatttaggtaagctacttacaacttactaactaatatgggagtcttaaaatagattgaagaaaaaaatattttagtagccaaaggctcaaaggtacagagcatcaactgttaagaatatcatattgtcattccttgcacgaaatctttgatgcttacctctagtgggatgaccgtgattaagaatatcatactttccaaggtcccccttttctacaaaaaagataaaccccctgttcaatggttcattgattatcccatcactcacaatatcatcataacatatcttcaccaataatctccacaggtgcagtttccgtgtgtaagtagatgaaatcgatttttgtccctaagggatatctccctttcataaacttttgaaacaaatttggcaaaattatggcaatcaacacatatgcgaagattcttcataacccggatagtcaatcctggaggagtgttcatcaatccaaaagttattgccagcttctcactgtgaccaagaagcatgcgttctttttgctcatcatcaacatcatgcagcacacaactcaagtctggaacaaagcccgctgctttgatatcgacaaatatctcttttatcttggcatttatgtctttcttactgggatggaaccgctcacttgaatggaaggggtgaataaccctgtcaagaattatccagctctgccctggttccttggtcactgtcttctccaacattagcttcctcactttgaaaacatctttccacatcccagcagcagcataaatgttagaaagtattacataattgccagcattttctggctccatttccagaagcttctgagcaacaagctcaccaacatgaacgttagcatggactctgcaagcaccgagcagtgaaccccaaattgatggagttgactcaaatggcatattttctatcaaatttaaagctttctctagtcgtccagaacgtccaagaagatcaataatgcatccatagtgtccagtgtggagaagtgcactttgctctttgaccacagtatcaaatatatcaaggccctcatcaaccagcccaccatggctacaaccagataaaacagccaacaaagtcacactgtcaggcttcacctctttatgcaaatctttgaagaga

SEQ ID NO: 22184 - DNA, 8772 bp, Oryza sativa
  unsure (1)..(8772): unsure at all n locations
caaggcttcctcatcaagacccttttgagcatagcaagatataattgcagtacacgaaacgacgtccctttttttaagcgtgtcaaatactcttcgagcttcttggatgttttctgacttggcatacatgtcaagcagggaactcccaacaaacatgtgtgactcaaaatttgtcttgactaagagagaatggacttgcttgccctggtatatactttgaggaccagaacaggatgtaagaacagttgctaaagtgtattcattagggatgcatcctgccagatagaagtaaaatgtattacacatttgacagaaattaatacagcatatgttgatataatctgatccttgaagacaatggcatgcattcccaaatggttaagaatatttataacagtaattgcaaaacaaacctccaaactggagagattgaatatcaacttgagaggacattaagacggtcagggagatatgaaaagtaattgttgtggcaatattctaaatatggccatgacataactccatccatattctttacagtaccaaaaattttataaactttactttataataatcatgccccgcatgaaaggtaaaccccgcattatggatgccaaataatgtatctaacaaaggtagattatagagtaccagacaacatgctatgaaaactctgtttttgtttttctgtcaatctaaatcattcagccaaaatgcattgcagaaaataaattgccatctctaatctgatgctactttctgatctgtgtgatctccttatgtcaaatgactcacgagaaacgatccaaacaatttaccagctctaagcatcttgatgaacagatccaaggcctcgacatgtcgttctgtttgagaatagcctgaaatcatcgtcgtccacgagaccacactccgctccggcattctatcgagcacgttgcgcgcgtcgtccagcgcgccgcaccgcacgtacatggtaaccagccgggtccccaggaacaccgcaggccggtacctcgccgtgatcatgcgcgcgtgcacctgccgccccctcccagagcgccctcctctcgatgcacgccgtgatggcggcttcgtactcgtggaacctcgcgctggcccccggaagcgccatccccgatgcggcgcggagcggcgcgacgaagcagcgctggagcgcgaggccgcgcgccgccgcctccggtctcaggagcccgcgcgcggcaagcatgagaggcgttgggctcacgcgagcatttctccgaacacctcgcgcgcgccgccgtcaagacgccgagcgctcgacgaggtggtggtgcgcgtgttggttgctcttctcctacgctaacgggcaatcctggccgtccgatcgacgaatctagcggcctagatgacgcttcgatccaaagactgtctcgtaagaaatcccaaaactaaggggcgtattagaagatatcaaaatattcactcaagggcccgggaactagctgggccaaattcaattaagggctgaatttacaaacggtacaaatgtagccccaatttgttcgtgggctcaatttgtagacgagaattaagtaggccaaattaaattatgggctgaattcctcggcaggaaatggatgggccagatttagaattgtaccgaatttgttggtctcaaattaaattatgggctgaattcctcgacaggaaatggatgggccagatttaaaattgtaccaaattcgttggtctcaaattaaattaggaataagttcactttaggtccctctatttgttggtccctgaaccgcaaaaccgggtatgacccgtcccccaacttacgaaaaccggacaaacgaggtcccttagcggttttgagggtggttttggctgacgtggcgcctacgtggccattttgactcgatattcatctgatgtggcactgacgtggcgcttacgtggcaatccgatccagaaaaataataaaacccgtggcccccacatgtcagtcacacagaaaataataataataaggtgggacccacgtgggccccatatgtcagtccaactcatccctctcttcttcctgctccctccccatctccactctcttcatctctctctctctccaggcaacgacggccgctcctctccctcccacctgcgggtcgccgcacgccgctccctcccactggtccccgtgcgccgccgctcctctcccgccctcccaccggctgccaacgctcgcgcaccactgctcctctccctccctcccgtcagccggcgtgcgctgcctcatctcccgccggccgccccgacgagctcgcctcctccctcgcgacgacggacagcgcatggccggcggcgggcgatggtgggcgacggcgcgtgaggcgcctggggtggcggcggccatatctctcttgcgcacgctcgccgagccgtccgtcgcccttctcctcgatggccaccagtgggagaagagggatcgaagccgtgcgcctctccccgtccctcggtcgccgcagccctcctcccgtcgtcctccccctccgccgcgccctctcgctcccgctcccccgcgccgccgcctctacttcctcgccgccgcggccgggacagccgcgccgacaccctcccctcatcggagctccgcaagcgccatggcggctccgctgcttctggtggtggtggtggtggtgaggacgagaagctccacttgctccaccgcctcctcgcgcggcccgacgtcgccatcgaccccacgtgcctcgcgcgccgccgcgcgtgccgtcgcccgccgccggccatgcactgtccgtcgctgctccgcccaccccgtggcctgccgccaccgccgctccgtcgcaaggacgagggagagccaagaggaagaagaggaagagccaagagtggagaaggagaggggaggggagccggcgagctcagcttgggggcggcgggagcggcgtcgtcagcgtcgctccgcccaccgcccgccgccgctccatttcgccccactaccgctccgcttcctctcgtcgcccaccgcccgccgtcgctccgttcaccactagccgccgcgccgcccatcgtcgctccgcttcctcccaccgaccgccgcgccgcttcgctccgtcgccactttgctcagtcgccgctccgcccgtcgccccctcggcgccgccgctcgcccttctctcctagcagtgtaggagggagagagaggaggatagagagaaggaggctgacatgtgggaccacatggccccacctctttttaattattttttgtgtagctgatatatgggtcccactatttttattagtttttcgagataaaattaccacgtaatcgccacgtcaatgccacgtgggacgaagacctagtcaaaggagccacgtaggcgccacatagacgccacgtcggacaaaaccgtcctccatactgtggagggactttgtttgcccggtttcgtaagttgggggacgggtcgtacccggttttgtggtcaagggacaaaaatcagactgaccgacaaatagagggacctaaagtgaacttatcccgttaaattatgggctgaattcctcgacaggaaatggatgggccagatttagaattgtaccgaattcgttgttctcaaacaagaaggcctaattcgtgggtgaaacaaattacatgacgtgaatctagcggactaaatttgctagtgggctgaatatgtgaacgagaactgagtaggccaaattctgtggtcggcctaattcattcaaggaagtgagtgggccacaatttaattatgggtcgttttgttgcaaggaagtaaatgggccaaattcaaacgtggcccgaactcgtaatttgttatgtgggccaaattcgttggatagtgttaactgggccaaattcatcgcaggctgacttgacgggacatagatgggctgaattcatttaggccttggtgggctgaatttgttgataaaaaaactggtaggcctaattcgttgacaggaactaggtgggctgaattcgttcacgggttgaatttgttcaattaagggctgaattcacaaacagttcaaatgtggaccaaatttattcgtgggctgaatttgttgacgagaattaagtaggccaaattacataatgggctgaattccttgacaggaaatgggtgggccagatttagatttggaccgaactcaatggttacaaacaagaaggcctaattcgtgtctgaaacaaattacacgatgtgactctagcgtgctaaatttcctagtgggctgaatttgtgaacgaaaaatagtgggccaaattctgtggtcggcctaattcattcaaggctgtgagtgggccacaatttgattatgggtcgtttttgttgcaaggaagtaagtgggccaaattcagacgtgggccgaactcgcaagttgttgtgtgggccaaattcatcacaggctgaactcgttgacgggaatagggccgaattcatttatggccttggtgggctgaatttgttgataagaaattggtaggcctaattcattgacgggaactaagtgggctgaattcgtttacgggttgaatttgttcatgagaattaagtggttgaccgaattttctctaggtggggcaaatttgcttgcggacttaatttatactgggctaaactcagtgggacaattagtactgggccaaattcgtggatggatctaaagtgggcaatattgttttttgggccaaattcgttagtgggatttttataggccaaattcgttgattgttattaagtgggccaactttttacatgaatcaatccaggccgaatctgctcgttgccttgggtgggccgaattcgctaactgggtataggtgggccaagtttactcttgggcctaaaactacttggcccgaatgtaggtgggcctaattatttttgggaacttagtgggcctaattcacttgtggaccaaattcgcggacataaattaagcaggccgaattcgtttgttgatgtcgatgggccgaattcgttcatttatattctctaaaaataaaaaaataacaggggggctcgatgcaaaatcccctcaccggctgaaaaatttgagattgtttcgcgagggaaacatacgaaaagctttctcccccatttcaagcggcgcgacggcgcnnngcggccggcgagannggncnacgctagggtttttnctctctctccgccgccgaaatcgaatccccgaggtgagctccatctcatacccaccgagtctcaccgtcccganccatctccttcacccgccgccgccgcttgcgctgccccgccgatcaccgtgagctgctgcagcttccgcctccggtgagcacccgttgccgacggacatcgtcttccttcctcatccatctcgttctacccgctccattcctcgaattcgcattagccttcatcttctcttctggatctggaagcttttctgttcgtcttaaccctagtactaattacagttttttttacccaaaattttttttggtgccctggctgtagagatgaatgcgaatgtgttgggcggcgatgtggtggcggacgatttcaactacttctccggtgtgagcaccatctttgtggccaacatccaggaggtgaaggaccgggtttcccagatcgagctcctcttctgcagccagctcttccctcatgtccaggccatgtggaaggcggccaaggatgcgtggatggagagggaggccgccctattgagccaattggaggagctgagcagcgggaagcggcacgcggaggagaaggcgctgcagctggggtgctcccttgatgagatgaaggggaagcttgcggatgccgagcgatcggtcgcggggcatgaggttgagaagaagcggcttctggggagattggaggaggaaattgggaacaaagatgaggttattcgccggctagagagggagattgcggagaaggctgctgatttttccagggagagagatgcccatcagaggcttttgcagctggttgagttgaaggacaagaatttgcttctcgagcagaataaacggagggatgcggaggagatggcactgcagctggggaactctcttgaggatatgaaggggaactttgagcgattgatcgcgaggcatgaggttgagaaggagcgaattccggggaggttggaggaggaaatggggaaaaaggatgaggttattgggcggctagagagcgagattgcggagaaggctgctgatgtctctagggaaagagatgcccatcagaggatgctgcagcaggttgagttgaaggataaggatctgcttctcgagcagaataagcggaaggacctgatcgaggattacactaagctgaagacactctacaaggatttgaagtctcagtacaactttcttgttggaaagattggccagaatgaaggctccaagtctcctgtagtcaatgtggtggatcggaaaacctccggaagccctccaagcaagagaaagctcaaaggtactcctgccctttgatttcctttcattcagtagagctatttaaaccttgttaatcaatcaccatttttattctctaattactgttacctggaagtttcatttgaagaataccaagttttaattgcaattgtgtactataatccatggtgctctgatcaatgccgcggttgaaagtattattaagcacctttgtaatctgcaagtaatgtcctgccaatgctatcatattagcactaagatctatgcctcctaaatcgatactgattgatgtctgccttagcattttcttttacttgcttgattttcagatctggtggacactaaaaaggagaacaatcaggcagtatctaagactgtagatgagaaaaatggtcctgcttcaagtgcaaaggcacaaggtacccaccatgctagctcagtcaggagtccattcagtaactcgcgcctttgtctaccgtctcgtacaaccaatcctccaccaaagaatgctactagcaattcaaaaacagaggcagcatctagtttcaccgcccaagtctacactggagggagactcgcgcgcgtaaagaaccaggcgttgtagatccacatgatgatttccttgacacacctctggaggctgtcaaaaatatgatcaggaatcctaaaacgccagaagaagcacaagcccttgctgcctctcctcctaaagatatggacttcaataactctgatgatgagactcaagatgtcaatattgccacccagggccagaaaaacatgccagttcccaagcagcaaagtacaatttcaatccaaccaccaaataaaggtttcaaatacacagaacctgtaagaaaaaaagctgaccgggagaatctgaaaggcgttgagtgcaagcagtgcaagaaattctatgatgctgttcttccagatggccgcacaaatggtgacggtgtggactctacaagcatgaggtgtgagcatcatgatggcgtatccagacatcgctacaggtacgcgcgcgccgctgacacctgaagggttttggaacattgggtttgaatcagaaatgtagcacatgaagtatgatgcgctcttcattgattagtgcagtgtcgtgccctaacataggttctcagtcaccccccagatactgttaataatgtcagtagtaaatctcatgctggggaaatgatcatttctttttttaagattatatgtttggatagaatgccaatttgttgaagatagaatgtacttactgtcacatcgattctatgtaaatgacatctgacattgaaaagcagtcgaataatcttgaataacaagcgttataacgttacttgacatttttcttcgatatttactaattacaatcacatccatgatctcttctttttgctgttaccactttacttcagcatatgcaattgttggcagcagactggtgaggtctgtcgaatggtgagccatctcttcttcccatgaaaagcctttctcctttccattgtccatttgatcacgagattcaggtcaagatcgatcaggacgatttcacgtcagatctgctaagaaacaggatgcataacaacaaagcaggtaattcttttagaggaaacaaaataataatatatgccccaagaaagagtcccaactcccaaggaagagtcattcaacttagggtgcaggtggggtgggtcgacctatatagggccaaaatcacattggcccggcccacaaattgtgtagtccaacatgtgccggcgttgccgtgggcctgtggccctacacttcctagcaccgtcacccacagtcgtcaccgcagccgcagtagcgtcgccgccggcgtgcgtgtctccccaaccggagacagcgtggtgcggcctcagtctccctacagtcccctgctacattctgccggatcgacgtaaaaactcacagtttaccacctaggcctcgttcgatttagagaggattgatccaatccctccctcgtagagattaaccgaacaaggccttaggctgtgttaattcttttggaggggttgggatttgggaacccctcacctccgcacttaaaacagagctatagattaacacgtgattaattaagtattatagctatcaaaattttaaaaatggattaatatgatctttaaatcaacttttctatataaactctttacacagcgtacaccgtttagtagcttgaaaaccatgcacgtgaaaaacgagggaggtggatgaggaacccatgagaaataacacaaccttat

SEQ ID NO: 22185 - DNA, 1394 bp, Oryza sativa
tagactgttggctgtcaaggcaaagtcaaaagcacgaacaataagtttcacagaaatgcacactctccttactagtacaaaatagtgcaaataaatgatgggaagagataaatttcagttttcagcagaggccaaactactcagttacaaaataatttaaaggagagttctgggccaaagaaatcagctatggtctatgaatcactgatacttccctaaactgccatctcagtatccaataggcaactgatacggatatatgcgtattggcgaatatcaaagcattttccagtattaaaaaaaaaggtcgatatgtgggcaagaagggagcaatacatatacacaggaaattgttgttgtaaatccacgcaagctaaacttgcagaaatcttcaagaaacagtatttgtcataatggtacctccgtagtcaagaagttgtctagcccaccaaagtcgaccctcggatttacagctgcgagcctcattgacaagtactgaaacaatcaaaattaccaaacaacaatgacatgagtgaacatcttaaggtaaatgggttatttgggacttaaggtatcataagcaaaaaaaaaaaaaaagaacagttacctcaacttgcctttgaagagattggacatgattgatgatctcatccagtaccagtgctgttcctgatacctgctacaaaaaacagatcaaacaactgttgtcgataaagtaattacttttcctgagttactacaataaaacaatgaatctcatgatggaaaaaaaaaacaattcaaaactatgacaaaaccacataaagtttaacctcagttttggatataaagaatggagctaccactataaaacaagaacatgaaacaaaatagcagcagcagtttggttgcagaatccaagtgcagaagttggtgcatagtactactcttcatttttttcaaagtttgaaatgtgatcttaaaataggcctgtttacgactgttaagttaattagttagagaagctctaagcatatacaacaaaaccaccagcttatattggcagtaatgtactggtttgtttaagacaatggccctcataaatcccacagcggattgaccaatacaatcattcacagtgatggacacctccagcccaaaggctgctgtcctttcagtaaaaataatagtcaaactaccgcaccatacaacaggctaatcacttccacatgaattcatagttaatgaagaccaaccaatactccccaatggtaaactaccctcacagccttacttccacaatccaacacccagagatgccaacccataagcacacattattgcgtgtgcaatagggatagcaacattccaaagtgagagagagagagatggagatatggagatggactcattgc

SEQ ID NO: 22186 - DNA, 2556 bp, Oryza sativa
taaacttttggattaaaatggcatgctttttaaactgctaaatggtacatttcgtacgaaaactttttatatgaaagttgttctaaaatatcagattaatccattttttaagtttgtaataattaaaacttaattaatcacacgttattaccacatcgtttttgcgtgaaacacttaatcttgatcttgatcttcatcttatctttagtcataagaaagtacctccgaatataaatccaaaaatatattttgttatggcagaacctaattaaatattattggattaatcgtttataaaaactcaaaatcaaatagtcgaaatatgtcttatatttttcaatgaaggggggggggggggtataatgttaatctttgttgtaatgttacatttttagaagtaaaagcatgcactaggtcatcctgtaagagttagaaattcagaatccatttccactagctagcagcaacagaacgatacacagattgcacatagatgttcttagccgccaattcacgagatagtggctgaaaaattctggaagctagagagaaccagaatgccaatacagtagacatgagacacatgacatgcgttgcagaataagcttaagaaagaagcagacggaagttgcctttattccgagcagaggaggcatgcatgcatccactggctaagctgcaaatgtgtcaaaaaggcagcagcgaatatattctctcgcctcaccaccaccggcaatatcagtgtgtatcttgcatcgttctcaggctcagcatgaaactaatatgtttacgtgtttctagtctacagattgatagccactggtttctgtgttttatgatgaggaagtcttcttaggtccagttttttggctgtgtacattctatacagagaccgggggtgaactcagttagaatgtatcattttggtgtatgtaactgagtcttaataaagcttctattatctaaaatgaaactaatatggattccgaggtctaatcaagcccatcggtcatagctaatcggtgtatgcagatgatttcatggttgcatcattgttctgtagtcttaagcatacagtaagtagcttggtttggtcagaggcaagatcctctacatcaggaacacactgcatctagccgttctggattctttttcttcttaatttctttcttgagagcatgtggcctggaagaaagttggtatagctttcagcccaaattaattaacatctgcaactccagcccattgaaattataatttacaggccaagcccaggatgctgttaatttgggcttttactcgaggcggcatcagtggcctaaagctaatgatacttgcaatttcctcgatacatttgcaaaccatctccttttagattaagaaaggggcttgttccactgaggttaatttttgccgtactaaatttttgacaacttcaataatgccacatggatgtttggtggattttctatgaatcttttacccatacgtacaaattctacgctaccaaatttggtaaggtcaagagttgctagtgtaaagattagttccaatccaaataagtcctaagatcaatgatgtttgtaactttttaaacctttttaaacattagtaaaaattatttcaagatatgatctttttgaaatttattattttcaagatctatcaccacgatctgacaagtgtgacaatattatttagtcacgccatcctcactagggtggcaagataaaactgtcacgcccactacgagtgacatgtcagtattgttttgtcatgccaagcacattagctcgattaaaaaaagtttagattctggaagtaagttttgaaaaggttcattttaaaattaaacattcaaaaagtaaaaaaaagaatcaagatcaacacgtcgagtctatttttaaaactattttcccgatcgaatacacatacaaccttattttgatcgttaagatggtgcatatgctctctctagctatatatctactcctcgtctccctcttacatgtcgctatatagccttagctactctttgcatgtgtgcgtgtgtggctaataacctaagctaagccgattcaattgatttctagccggcggccgggtgcggccgggtggtggtccagaacaaggcgagcgcgcggaggcggccgaagtagtcgtcgacggcgacgaagcagcgcgccgcctgcctcaccgtcagcatccgccgcagcgcgtgcagcgtccgcatcctctcctcatccgcctacacatacacgcacaacgtcgtcaccgatgcgaaaacttgcaacccaaatcgaggtggatttgaaactctcgaatggatgttatcttattgtttgcatgtcacttaaataactataaaagattttaattttttttaagaagatatgtagtatgctatcactctacgaacatacaacttaaaattgtatgtttgtggagtaatatatcacatattaatttatcttcttaattttcttgtaaacaaattatctttttaatttttttcataactacgtgagaccatgcaaaaaaaacgagaggacatcc

SEQ ID NO: 22187 - DNA, 5678 bp, Oryza sativa
  unsure (1)..(5678): unsure at all n locations
ttcaatcttcatttcttcaaaggtaacttaattctaaatcacctcttcagccatgacgtaattaaaggtgacatatttttccttcttaaagaatgcttgatactttgttttttcttcaattttctcatatatgcagggagatgcccgaccggcaaatgtgaatgtgaggataccgtcatggacatccgtggatggagcaatagcaactctaaatggccaaaaactcaacttgacatctgcaggtaacttctgttgttgatttgatgtgctatttcttctgctcccatgggtgtgattcctgcctcaatgtttgtttcatgttcaggcgatttcctctcggtgacgaaactttggggcgatgacaccttatctctcaaattccccatcaccttaagaaccgagccgatcaaaggtatgaaatttacacgatcaacatcttttttggcccaagttaatgaaatttatatgatcatcagaactctttttcacggcaagttaaaagtctctgaaatatagtctgaaatggttgatgaaatttttcagatgatcggccggagtattcgtccatccaagcggtgctgttcgggcctcaccttctcgccggcctgacgcacggcaaccagaccgtgaaaaccagcaacgactccaacagcggcctcacccccggcgtctgggaggtgaacgccacccacgccgccgccgctgtcgccgtttgggtcaccccggtgtcgcagtcgctcaattcgcagctcgtcaccctcacgcagcgcgacggcgacgcgcaggcggcggcggcgttcgtcctgtcggtgtcgatcgccgacggcgcgctaacgatgcaggagtcccccgtcgccgggagcgacgcgtgcgtgcacgccactttccgggcctaccactccccctccggcgccagcgccatcgacgccgccaccggcaggcttcagggccgcgacgtggcgctcgagccgttcgaccggccgggcatggccgtcaccgacgcgctcagcgtcggccggccggggccggccacgcggttcaacgccgtcgccgggctggacggcctccccggcacggtgtccctggagctcgccaccaggccgggatgcttcgtgcagcccccaccacggcctacctcgccggcgccaaggtcaggtcagctgccggaaacccaccgccgccggcggcggcgaagacgacgacgacacggcgttccgccgcgccgcaagcttcacccaggcggcacctttccgtctctaccacccggtgagcttctcggcgacgggcaccgacaggaacttcctcctggagccattgcagagcctccagnacgagttctacaccgtctacttcacgntcctcaccaagtgatccaccgccatgtgacagcgagcccagccttgccatggacagaatgacagatcaccaagcttgtccatggcttacagtacctgtaatggatatgaaattaaacatagttagtacctaagacctgattacctaattaacaatcttcaccatggccgtgatgattcaatcaatgcgtgcatgtgtgctcgtgatccagaaagaaagggaaaggcgatccataaatattgtgccgttcaattaggccccaattgattgctgtcgtggaatcttggagaatttttgttgcttctattctatcaacttagtagtataacagtactactaccgtccaatattattgcagagccgtcacgagatcggtagtaggagtatttttttttcgcttcacgaatctttaggaactactatcactgattgcattgccctgacaccaatctgagttcttggctttctgctgagctgatgctccgacgagaagaaatgagaatcagatgtggcaaaaagataaaaagaggtttttgatgctgggatgctggctgcctctccctttccatctctgttcgatctcacgggcgcaagcaagagcaaacgcaacgtgacaaaggggacgcaacgtgacaaacgggacgcagttgtcgtgtgcgacatgtgagtttgcgaccgaggtgaaaaagggacgtagttatctgttgtgtcttaataaggaactaaggaagggcccctcctaacatgccttctccttcctactgtaccgtaatttttttttaaaaaaagttagaaaaaaaataacataataaaaaaatctaatacccttaagaaaatattcatatgcatagactttacacccataaatatatatagtaaacttcgtatgtataaactatatgtaaggaaatattgtatataaaaaatatttaatctgaattcgaatttgaatcaggtatataaaattttaagctataaatttttaggtgggtaaactttagatatataaacttataaaaagaaaaattatatggtgcaaaaataatggagaaaaagaaaacgatcccccaagcgatcgatcgctaattagcgatcttgtcttaataacaactggattaattactgtttctttttttttttatcagaaccactgccgaaaacgatatcaaaaaccaaatgcggaagatcgatgtaaaagatcctaacttgataatgacattaaggcacaatattagttaacgagatttagccgaaacctagcttctcatgtattgattatggtcaattggtcactcctcccgtatctaacataattatagcgtagagttagtacgaccctcaatcagcacgtcctcaatctatcgtccactctcacagtctcacacgcgctaaattatcatgcggtcacaataaatatgtttatctatgtattaaaagagagcttataataaagtccaacacctaaactataatcaattttgtatccatattcaatacaaaactcttgacacttttctaattgtgtgacgatcggctcggctctgcatgcatgagtgcttgtactttgtgcaacccattacgccacatgatgctgcctataaatttcgtttgatacataaaaacgggtgtccttttcgctgtgggcgcaagcgatagaaagtctttggattcttggtagtttttttctcaccatatccacacctgtgctgctggtttgtgtgtgtgtgcctgtgtagtacacgctattcttcttaccttgtgagcgagagagctcgctctcggcgtcggcgtgcgtcgcggtgcgccttatccagcaaatggcgcggcggcgcgcggcggcggcggtggtgatggtggtggcggtggtggcggtggcggtggcgaaggagtgcacgaacattcccacgcagctgtcgtcgcacacggtgcgggcgcggctgcagtcgtcgtcggcggcggagtggcggtggcgcgaggagtactttcacggcgaccacctcaaccccaccgacgaggcggcgtggatggacctcatgccgctcgcggcggcgtcggcgtcggagttcgactgggcgatgctgtacaggtcgctcaagggcgccgccgtcgccggagacgaagccggcggcggcggcggcggagggtttgggttcttggagaaggtgtcgctgcacgacgtgcggctggacatggacggcggcggcgacggcgtgtacgggcgagcgcagcagacgaacctggagtacctgctgctgctggaggtggacaggctggtgtggagcttcaggacgcaggccgggctgccggcgccggggaagccgtacggcggatgggagggccccgacgtcgagctccgcggccacttcgtcggtgagaaaaaccacaacgcccccacgccttcagcttccaactaacccatggccatgtcccacatgttagattagtgtttccatagagactaaatttcagaaaaaccaggtcagttttatggttaaagttatagaaaatccacatactccctagaaaaaaaaaggttttatggttaaagctacagaaaaattacatactccctccgttttcatatgataaatcgctttgaccttttttgtttaatcaactttctttaagtttgattaaatttatataaagatttaacaacatctacaaaaaccaaattagtttcaattaaaactaacatttaatatattataataatatgtttgtttgtattgaaaatgtttatatatttttctagaaatttagtcatacttataaatgtttgattaggaaaaagtgtcaaaataacttataatatgattttcaaatttcacaaagcttcacgcttatacattttaaacatgaatatattgaaatttttgaaatatacagtgtatataaatttttaactaataaattcttgagtaaggttgatagtttaattctttactattttcaaaattttgtttaagatattctaaatttgttaagatttcaattaagatgggttttatgaagtattgagatcataaaacctgtgataatatgccataccttataacttgtggtttttcacaactttgatcgtaaaaacatacagtacggatggaccgtaatttactctttcccaaactagattagagcccaacttaggcccatttatcagttgggcctagtacggatggaccgtaattccggcccattcaagttcgagggcttggatttgatttaaatttctggcccaattacatagatgtaaaaatagctctgctacaatgtagtactaacttttttgtttaaattttcatcaagtgggtcaaaactcaagcaattttattcggcagtagaaatttaaaatttggttcatgaaaaatgcagccagatttttgtgcatataaattgtttaggaaccatttaaacaaatttaaacgggacaaaagttactagtaaaacacaaaatttggcgcgcagggcactacctgagcgcggcggcgaagatgtgggcgagcacgcacaacggcacgctcgccggcaagatggcggcggtggtggacgcgctgcacgactgccaggcggcggccggcaccggctacctctccgccttccccgccgagttcttcgaccgcttcgaggccatccgccccgtctgggcgccctactacaccatccacaaggcacgcaacgcaacccaaagcatctgcatctccaccatggccatgaatctcatctgttcgtgcaaatgtctgaatgaagtcatgaagatctcctgtgcctttcttcttcctctgcatcgcgtgtgcagatcatgcagggcctgctggatcagcacacggtggccgggaacggcaaggcgctcggcatggtggtcgccatggccgactacttcgccggccgcgtgaggagcgtcatccagaggtacaccatcgagaggcactggacgtcgctcaacgaggagaccggcgggatgaacgacgtcctctaccagctgtacaccattactgtaatcgttcttgtcaatcttgatttgtgctgattggaagcacgttttatttcagcgagttaattgtgttgctattatgaatgatctccaattttgggcagaaagaccagaggcatttggtgctggctcatcttttcgacaagccttgctttctaggattgcttgcagttcaggtctgaagatcttaattcccctatggcactctatgttctcctacatgctattcactttgtaattagtaatttattgtacaactaatccagctagaactcgtaatctgacagaatataactcgtaatctttgatgttcaggctgacagtcttt

SEQ ID NO: 22188 - DNA, 2530 bp, Oryza sativa
ccactgcggcggtatcatgcgatcagcttcttcgccagcggcgtgaggaggagcttcctcctcgagccattgttcaccttgagggacgagttctacaccatctacttcaaccttgcagcctgacaagtgagtgacaacgacatggcaatctctctaattttttaaggtggtggaagataattaatttgggctaatttaattctttgatccttcaatgctcaatttagtaattagtacaaattagcatggcaagtagcagttgaatgggaaaatgagtttggtttacatgtacactctgcctctcagtgtttactggagtagcagtgatgttactctgcaatttcagctctttatcttgccattcttttcttagaaagagtatatacctcttgatgcagttgagtatacacaaaaagttctgcaaatgaaagagtacttaaggatcaaggatattcttgacctgattcctaaagcgtaacttctatgtgggttaaaataaaaatctgagcagattcagatattactttgtttgcacttcattcaaagctatctgatgttaagtggactatatgaaatctgagcaggttctgaatttactttgtttgtactctattcaagctatctgaattaaagtggacaatatgatatagtcaagtttgacttaaggtttatatgattccatgcatcgaggtgggtgaacaagtagagcaggttcttttcattatctgatgcctcattccaaatgcattatattaccatcttggtgtataaaacattatctggaggccatgattacaacatactcctctctttctcagataactatggatcatattgcactaatctgattggtgcaaattgctgcaagtctgcaattgtgatgcacccttttgtgtctagagaaaacttttgatgtgtcagccagtgaagaattgatcatcaagactgaaaatcaatcatacagttgcgacagatgagaatacgagatccaagatctggtgacagcgaggagacaatcgagacattcaatggcagatccacaatcaaaataaagaaaaagaacaaacatagaacataaatgaaaatttgtgtagctgtagcaagcgaagatattgatcacggaacctaacatttatgatattcaccttttgtttgatcttttttaccatctatttcatttagttgcatattcaaacctaacagacaaccaaaaatagatcacatagagaagctccacatgcaaaagtatatattccagtgtataatatccaggtaaagccaaagcctacacaaaccaaccacagaaccacattctcaccaggtcacctaaacttctaaacaagtctttgtgggagatatccaggtagtatatatattgtgaatcctcacccagagtttaccatgtagaagattgagatgtactgcacacaggaatggtcatcagtaccatataacggacgattgctgattactattactggttgcaatgtaacacttcggatacaatagtacattacagagctagctaaatgcgaagccacaataccgtcagcgcaagacgatcataaataaagcttacacaacatagccaacatgcaaaccattcggactgaccagagatgagggttcttgaagctgccgtggtgtgccatgcatcacaaatgccgaacaactagattgtagcagccaacatgaaaggaaaaggcatggataatgcagcaaagatggatgatgaagaccgcagattgtgacgcttcgttcaccaaccatatgaaacccctaaattttgtcaagtttctccgccttcaccaccggattagccttggcaatagcatccctagcagcggtccgatagtcaaactggcagtcatgcttatcggaatagcggtgcattgcgcagtacaagttgccacatcggcagttgaatccggtaagaccaaccctcttccgacaagtggagcaccgatttggtccttccctccccttggggttcaccgtgaccccctcactaggaccagcaatctcagcaggctgcgcaacaagcgtcttcacctcgacttgagcaacagctacttcagcgtgaccagcaataattggttccttcccggaatcaccaccattgacaatgctgtcgatagaggaggctgccagcttggcctgctcctgcttcattatcatctccttgtggcactttgagcacatgttcatggtagccgcactgccaaagaagccgcagttattgatgcaaaggatcgggccttctggctgctggcatccagtctccttgtgctccatggcttccttttaactataaatcagaagaagaaaaaatgcgtaaatacaagactaaagaagaaaaacaggttccatttttccactctctaaaagcaaatgcattacaatcaaatgttccacttcagggtagcaaaactgagcagacaatatctgccaatgatggcatatgttcttgattgcgcaaaatacaccgcgacaaaaacaagaagcatagcatacatgtcaaatttcactc

SEQ ID NO: 22189 - DNA, 1784 bp, Oryza sativa
ggattcaatgatgttatgtatcagctttatgccataacggtaattgcaattctgttgcatctagtatttggtaatttgtgtggaagatgtgtttcttacaaattaaagtcgttcctgtcttttgtgcagaaaaaccagaagcatttgacgatggcacatcttttcgacaaaccgtgcttccttggaccacttgggctgcatgtgagaacttgagtttcatttatggtattttgttttcttttgcgaatcgagtcttttgcagcaaagacaggtgatatcttttgtttgcttttcaggatgacgacatatcgggattgcatgttaacacacatgttcctgttattgttggtgcacaaaagagatatgaagtagttggggatcaactttacaaggtaaactgatagtagtgagtaaattcactgtgtacccctgaaaactcactcaatccctttcatacccctaaaatttacccgatcccttctgtacccctgaaatttcaatttgatcccttccatgcccctaccgttacatattccatcattttactgttacgtttggttgcaaatgtcttttttgcccttgatgctttaggtttaaatataagcttcaaaaataattgaaaattttgtttgagtgcacatcgtgtgcattttataaaactaatgagactaaataattagtgcagaaaattttgacataaattttgaaaataaaataaatgtaaaaaaaataaaatttttatttgaaattttaataggacaatggatttttttatcaggagcattcataaaaaaaatgttgtgaacattggtatacctatctttatatgaatgctcctcatttttatgaccttttttttaaaaaataaatacgtattttttttatttcattatctaaaaatatttttttgggataaataatgcatcgcacaacaaactcataactataatagtctcatgcgagaagcttttatatttttaataatgtaattcatgaatttctttgttcatccaagggtaaaatggtcatttttatagaaaatacacggtcaactaacgtcaactgacgggaggggtatgcaagggatcaaaatcaaatttgggggtatataaggaagtaagcaaaattcaggggtatagaagggattaggaaaaatttcaggggtatataagggattttctcggtagttaatttgggatttgcaccaaaagtcctcaccttgatgggcttataattgtgccctaccatatcggcttactcgtcaggcaataaaaaaatgatgcagcatttaaaacttttttcaacttgagttagctgactttgaaacaaaatatatggcacaggaaattgcaacattcttctttgatgttgtaaactcctctcatacatttgcaacaggaggcacatctaccatggaacactggtgagtgataatccatagccatatcaccattttactttcttaggctctcttaccattgtccctacttaagttcatcctacacgtcaggcacgatccgaagcggctagtagatgagatcaaaatcagctcaaatgaggagacttcgccacatacaacctgcttaaggtgagccatcccttccatcaacgcgataattctacagaaggaagctctgaatttgcccccgtctacaattgcaggtctcacgaaacctgttcagatggacgaaggaaggtaaatacaccgatcactacgagaggctacttatcaatgggatcatgggcaaccagaggggaaaagagcctggtgtgatgatctattt

SEQ ID NO: 22190 - DNA, 3200 bp, Oryza sativa
tggggtgttatcagtatagaccattgtaaaagatgtcatgtacggtactttgtaagggatttggaccgtctgtttgatccaacaaaactttcatactattttaaaaagaaagcatgaatctgatataaaactataaaaaattcaaacattcacagaagagaagtagcctaccttgataagctccgaggggcggaagccgcctatccagaggaagcattgctctacggcgcccttccacaggccggagaggaggtggagggggtcagcaccaaccagcctagccttgtgagccatcagcaccccatagtgtgacatggcttcatcgacatggggctgcagctcgccatccggtcggtgctcctccacagcggcccggagccggctgatcacttggtggtgtgcctcctgccaccgctcatactccaagttgaacaatgcagcgtctgaaacgccctcacataatgtatatataaatgcatttttgttagatgatatgacatatataaatacttatggtctttgcaccaagacatgcaaataactattgttgctaggcgtgttaagtttaacgtgagatggagcagtgtaaatctctttattatgattaaatgctagttcgaaagtgttaacctgggcttagaattccagcaccgcagaatgcaccctgcagggagatacagaaacacatcatataacttataaattgttttttttacaaacacaaattgttcgttcgagataatttgttcttaattttagatattgattatttgcctagtagtagaaacttcgattctcctacaaatattggtggtttataaattgcgagtagtaattaatatttcccaaaccaaatccgtcctctgtgagatgattcagttctttgctgcttattaattttcacctgagctcttgtgaattgtatctcctgttcaagatgcgccagcctgatcctgcctgtctctagctgctgaatgtaagcctgtcacacagacaaaaataaaaagagaacaaattaaggattaattacacatgataatatgaagcgaaggtatcagattctgcaaagaaaaaacaaatgcaaagcccatgcatgtgtctaacacacaactcccattaggtggtaggttaacttcactagctacttccaccatctctttgcttttcttgctagctccaaagatttttgtttatttaggcttctgagggctgactacttgttcatttgttgactgatattagtacaagagtactagtactaattaactagcttagcttgctattgagctggttaatcaatggggtatatagtaatagtagtaactatagtaagtaatcaccttcttccttagcctgctctttcttgcggcctctctattctgcgccagccttctcagcgttttggggtccggcgtcttgggccccttgagctctgaacttgctgacgctgccatggcgccgccgctgccactgccaccttctttctagttgccatatggatacaaaattatagtaacatctaagataatggaaactttatttaactcacccagttataccaatgtgatacaactatccttttttaattagataatggaaggtttattgaactcaaaagtctgagtatactcatagcctctgtaccacgaaagtgcacacagccaaaacacccaacatacacaactaaaagggaacacaagattgatcaaaagccatctatccaaagactagaacgccacccatatgatggggtaaaaaaatgatacaactgtctaaccgagaaaaattccggacaactacagaggcgtacgtgtgtaaaaaagttaaaaccttgaatgctgccttggaggtcttgcctagggtgagtggcctgccatctgccgccgctggcgccggcgatctcctggaaaagccggcgatgggcggcgctgacatcgaagccttaagaggagaactggcaccttgtgaacaacacgcttaaattgtgatagctagctagagatacatatgtgcacatattaacatatatacctttggtgttggagttggctctccatccattggctgggaggggaagatgttgagagtctctgcatgcacacatgaacaagttcagtaattatgcattatgacttagtaatttacatagtttgtaggcaggtgcttgcatgctttcatgcacacatgcaactgatgtgtctcccagatatatatctgtgctaatttttcaaatgcgtgtggccaagatcttcaaaaaagtggggcaaaaaatatgttctttttggttgcaatcttctagcaagatcctgcgaccatatcagctatgtttgttacgtgtcactcttctccaattagctaataaaatcatgtatgactataatgaccaaaaggaaaagaaagggaatgagaagattggtagccattcaaaatcttacacatctagctataagctaaagcaagtcaaatcacagaaatcaatgtatgcatgacattctttgtattttcttcgagccatgtgtgtaatatactatgacaaaatactcttaacagtagatcgaccttttacaaaattaagtggtttgtggggttcatcttaagtagatggcttatcttgttcctggccatcaaagtagaggaggatagcttgatccaaatcagatggcatgtcatatccttcagggttccttcttctgcatttacacattatgacaatataccattagtctctgttttgcatttagtacgtagctctactgcgactgatttagagcttgatttttcttaatggtatattgtccgaatgtggtccatggaattagaaaggccaatattgatgttggaaaagggtgcaaaaagttaaacatactcattgctttacaaaaaagagggggggggatggaattagaaagccgctcccgccgcccccaagctgagctcgccggctcccctcccctctccttctccactcttggctcttcctcttcttcctcttggctctccctcgtccttgcgacggagcgcggtggcggcaggccacggggtgggcggagcagcgacggacagtgcatggccggcggcgggcgacggcacgcgcggcggcgcgcgaggcacgtggggtcgatggcgacgtcgcgccgcgcgaggaggcggtggagcaagcggagcttctcgtcctcaccaccaccaccaccaccatgatg

SEQ ID NO: 22191 - DNA, 1506 bp, Oryza sativa
aggaaataagccaaacgatgggacctttctatctttgtgttaacaatggcttgacctgaccagaccttactctgactcaaatctaggaattaggatgcggcaaattttaggctttggcagtaagaaaatgacaaggaattaggatgcggcaatttcacctcgcaattctgtcgtttcagatacgacacatccaccttggataactcacctctatccacgtcacctgtttgttggtttgtttgttattatatattttgcttctcttcccgcgaatctcccctctataaaaccccgcgccccacctcacctcgccaccaccaccacgacgacgtacttttgctgatcgatcaatgacgcggaggaggagcctcgccgggggtgcggcggcggctgtggtggtgctcgcggcggcggcggcggcggcgttcctgtccctgctcgacggcgcggcggcgctgcacctgtgcacggacaggctgttcaacgacacgcaggggaggcactctgacgggctgccgcacctgaaccaggcggaggaggcgacgtggatgggcctcctgccccgccgcgccgggccccgggacgagctcgactggctcgcgctctaccggagcatcacccgcggcggcggcgacgtcggcggcgagccggcggggttcctctcgccggcgtcgctccacgacgtccgtgtcgacccgtacggcgccaacatgtactggcaggggcagcagaccaacctcgagtacctcctctacctcgaccccgaccgcctgacatggacgttccggcagcaggccaagctccccaccgtcggcgagccctacggcggctgggaggcgccggacggccagctccgcggccatttcacaggtctgtatcaccgtatgccattcttgatctcatcttgcggcgatcaattttgttcaccgtttttgtggtcacttcacttcgatcgatctctactccatctgaggtgtttgtgttgatttgcaggtcactacttgagcgcggcggcgcacatgtgggcgagcacgcacaacgacgcgctgagggagaagatgaccaaagtggtggacatcctctactcttgccagaagaagatgaacacgggttacctctcagcctaccctgaatccatgttcgacgcgtatgatgagctggccgaggcatggtcgccctattacaccatccacaaggtacattgtgatgaaaacttagatctgttcctgtaattactctgcatgatctgattctgattacataaacagagtggtgaacttagatcagctctttactctgcatgatctgattctgattacattacatagggatgaagttagatcagttctttactctgcatgctctgattctgattacactacatagtgatgaacttagatcagttatttaattgctctgtatgctctgattctgattacataacttgtccatctggtggtctgtcatctggtgttgtgtgttgctgtgggttgtgactcttgtgat

SEQ ID NO: 22192 - DNA, 4187 bp, Oryza sativa
gctccaccccctcccggcgctggatccgccgcgtgcacccgaccaccgcttcgagccgctgctaccgctctctttgcagcgatcctctctgcagcgaagggataaagaagtatgaggtgaggagtgaagggataaggatagggtggggagatatattttttttatagctcgagtaattttttcgctggggctacgtggtgaaaccttttcagaagcggttgcatgagtggaccgcttgtaaaaaagacgaacgcaagtgaagatctgccatttttgctagcggtgtattaagtgtgccgccaacaaaaaccataatatctttgatggcggccctcttaaatcaaccgctaacgaagatcagtttttgctggcggttcgaaacttcctaccccttgttatattttctgttgtggttttcataaatattcgccataaaaaatgatagggtgacgctgtgaaaaattatttttttaagtaatgtgggttgaagtttctagaattaccaaatattcttttaataattgataaaattaccgaatgttagtagggattggtaatgttgcgaagataaagtttgtttagctcgttaccctatccaacttaatgttgttggtgattttgtcaacagaactattctgagctggagggagtgagacggagaataaaaaaccaagctagaatctgaccgaggatttaaactgttattattttttttaaaaaaaaactatagccgatgttcttcaaaattttcgatccagaccttggcacgaccataccgcagtccaccccccaacttgctcattttgacgaagggctcggagacacgatcgacggcgacccagcatcgatcgatttcgccgccaccgccgcctggcgcgacactgcagtaactgtgggcggccgccggcggcgcgagcacatgaaagccggcccgtgccgtgcgacgtgcgttgcgggcgtgatccgcacgcgacgcgggccgtgacagcgcccagtgggcccccctggtcggcgaccttttcttcctggtctggcgccgtgggcgggtgaaagctgatcttgggctttggctgacttctcgtccagtagccacttttttgggcctaacgcggcctgaagaacactttcaaactggacggattcaaaggagcacgagcacgagaactcacgtttgtgtatttttgttgttggcaataatgtgaaggaataagttcactctaggtccctctatttgtcacctagtccgattttcgtcacttggtcgcaaaaccggttacaacgcatccctcaacttacaaaaccgtgcaaaaaaggtccctcgacagtattgtgcctggttttggatgacgtggcgcctacgtggctccctttaactaggttctcgtcccacgtgacattgacgtggcaattggatcccggggaaatataaaaaaccgtgggacccacatgtcagctacacaaaaatatttttaaaaaggagggacccacgtggtctcacatgtcagcctccctcttctctctatcccctctctctctctccctacaaggcaggagaagtgcgagcggcagcgagcggtgggcatagcgatggcggcggcgggcggagggtagactagaggggcggcgggtggaagcagagcggcgacgggcggtgggctgagcaacaacgggcggcgggcggcgtggcgagagcgctgcgagggaggaggcaagctcgtcggggcggctggcgggagaggaggcaacgcgtgccgtccgacaggagggagggagaggagcatcggtgcgtgggggacgccggtcgacgggagggcggaagagtagcggcggctcgccggcctctccgcgctggtcggcatccccgtctcctccctttgcaatccagtgtagagctcgatggcggggcgccgtgggtgcggctcaacggtcacgggcagaggaagagttgcaccgggcggcggccagcgacagtctccgcccccttgccggtgatgcgtcgcgtcggccagccgcgccacgcacgcgccttcacccctctgctatggtgtcattctctcaccactgtcgcgctttgcttcggccgtcgccgctctgactggtgccaatcctccgccacagtccccaatccaccacgataccaccagtctgcttcgggaccgctgttgcctccgccttcgccaccggtaggcggcaacggaagcccggacgtcgagggcgtggcgctggccgacttcttcttcggccccaagttggatgacttgatgcagtggctaggagatggtgacgccgggcagaagggcacgctgccagcctcctcgtcatcgtcatcctacgcgcagcggggcggggcggagcgggcgggcggacggcggccctagaagaacggaacggagcggggcaccggtgggcggaaaggggagatgggaagaggggagaaagaagaggtagcggtgagaatgacatgtggggcccacgtgggccccaccatttttattaatttgtgtgtgaaactaacatgtgggtcccacatgatttaatatttttccgggatccaattgacacataagcgtcacgtcaatgccacgtgggatgatgacctagtcaaaggagccatgtaggcgccacgtcggtcaaaaccgccctccatactaccgagggaccttgtttgtctggttttcgtaaattgggggattggtagtatctggttttgcgatcaagggacgaaaattggattgggcgacaaatagaggaaactaaagtgaccttattcctaatgtgaaatgtctgactgttttctgaatcacagctcgaataaaggtgtaaacgatgatgcgattgctgaatgtacacggttgtttcttttcgtattttggatgctcatcctgacgccgttcgtctgtctgtgtccccctgctttcgctctgttttctctccctgacatcgtgttatctatcataccatttggtgacaaagcccaatgtatgctcagtccatcaatactaaagtttctaaaaaaaaagaggaaagtgtgcggtggaaacttccatgcgttaaatagtaatccccgataaaatcaatacaaatacaaaatattaattactgaactacttaagtacacccttcgcgttaaaatataaaaagttttggttacatgagatacatcaaaatataaaaaatattaattgctgaactacgaatctggacatgatatattctatccaaccaaaacatgtcaagatttgtatagtactagattgtgtctcatccaatcaaaactcatttttcggatggagggagtatatggttaacggaattactaatctcccgtcgacaaaaaaatgcattaccaaattttgcagattttggatcattagagtgcttcacggttcatgttccaagtgcttcttctccaactccaacaaccggcgacaacccaaactccgacagagggctggcaaattaagatcccagtgtgaggaggaggaggggtaagaaaagggagtcgtcgggcttagaggaatggtcatgggagttggcagcctggcggtgggcggcgggacaggtggacagtgccaaagctatggggatggaggagggcggtgagctgacgttggtggcaggagcatcctgctgtcgacggctcgaggagaaatgagagaggggggcgggggagggaaaggaggccggtggggagaggtgtctcactggtgctgatgacgtcttccggcgagaggccgagcggtggcacggttgggcggtagcggcgatgtaggaggggttaggttcactgcacgaattttaaagtgatataatggttcaaaattcacaagattttaagagatgtttttttagtatataccgtcccattaattaaaggaaaaagtacgaattacccccctgaactatcgaggtcgaccgaattacacccccaaacttgaaaaccagacattctacaccctcaactattgaaactggataaataacccccctgactcaatccggagtggttttgagtctacgtggcagtccagtcagcaatttttttttaaaaaaatcaatgggccccacctgtcagttcccctcccctctctacccctcactactctatcccaatctctcctctctctcctcaccagcacggtggcgaccgctcgagggcgggatcaggcggcgctgccggcggcgga

SEQ ID NO: 22193 - DNA, 2898 bp, Oryza sativa
tgaggttaaatcattcttgtctcaaaaatttgatatgaaggatttgggagtagctgatgttatcctcaacatcaatctaattagaggtgagaatgagattacactcttgcagtcccattatgtggagaagatcttgaatcgctttggctacattgatagtaagccttctccaacgccttatgttcctagcttgttgcttcgcaagaacaagagaattgctaggaatcaactggaatactcccaaatcattggctcgctgatgtacctggctagtgcaactaggcctgatatctcctttgctgtgagcaagttgagctggtttacctctaatccaggagatgatcactggcgtgcgcttgagcgagtaatgcgctatctgaaaggtactatggaattggggcttcactattctgggtaccctgcggtactggaaggatatagtgattctaactggatctctgatgtggatgagatcaaagccactagtggatatgtcttcacactagttggtggtgctgtttcatggaggtcttgcaaacagacattttgacgaggtcaaccatggaagcagaattgacggcactggatactgctactgttgaggcagaatggctgcgtgatctattaatggatctgcctattgttgaaaaaccagtgccggctatccttatgaactatgacaatcaaacggtaattgtcaaagtgaatagttctaaggataatatgaaatcgtctagacatgtgaaaagacgattgaagtctgtcaggaagttgagaaactccggagttataacgttggattacatccaaacaactagaaacctagcagatcccttcacgaagggactatcatgaaatgtgatagacaatgcatcgaaggagatgggtttgagacccatgtgagtaatactatggtggtaacccagtctatgtgatcggagatcccgtgaattagatcctgggaagaacaaaccattagtaaactagaggagagtacaaatatatataccctatccaagtgaagatgcatatactcttgtgagctgcaaggcaggttggctatgccttaatgagttctgttggctttaattagcaaagatgttgtcctgcagagcattcttgaaggaactcacctttgtgagcttgactgttggtcgcagtctatgaagattttgggtgaatcttctaggaagcttactaaagacctaggagtatgacttatacgctccacccgaggggtagtctacagacggtctagtaccagataagactttgagtgaaacttgcttgcacaagacttgcaattcaaggcgtagtccattgttcaagttgtgagtaagtgtagcttggagttctaggtggatgttcaaccttaattggtctctatcgaaccgctggtatataaacagtacattggaaaaggcaaatctcagtgggattttgagatttggtgggggattgttggaattaatggatgggccttagcccactcgaagattaattctttggaaaatcacaacagcccacctcatgggatggtatgcatgtggagtttagtaccaccttgcttattctaggagagggggacctccttaaaaaggaggatgccctcctagccacttgaagcatgtgtggtggagagaagagggggaacacgtgcgcgctcgctcgcctgtcctagtcgggcacggcaggcggcgcgcgtgcacgacgtacgcgtcgaatggtccgccaaaaattggttcctcaccttgcgcagatgcagcctccttttgcagttttgttttgctgcaaattcggattcgtttttgttttggaaacgttccgaaaaatccggtgcgtgaaaacgacgtggagtccggataagttacgcgcgacttatccggttcggttacacgcagtggagatcgtgcgggcgacctgatcaagcgacccttctctatacaaaccgacctgccgtcttcacgcaacacacgaaaaaatcaatctagggtttgcctcctactctgtgctacgccgtcgctcgtagattactccatctcgctcgccggcgtgcaccggcgatcgggagagcaggtctccggaacctctaccttcgacgtcctgcaccgggagaaggcggcaataatgtttttgggaagcgcttagcgcgactgctccctgttcgtccgcgacggctcgtcttcctcttcgctcgcgtgctgcgcgccttcgtagacgcctgcaatcgcgaaaagttcctgccgagcagccggtctttctaccacctcggtacgtgttcaatatgttgcgcatatttgatctgttcatattttactgcttattttacatgtgtagatctaatgatgcgttaatgctaatatacatctgcaataccatgacttatttatggaatatattaaatcattatatgcctataatatcaatagatccggcgttcctgcctgtgccgaatattagctatatactgtagctgttcttctcccgagaccgcagtcaccgtacgcgtgcgtgatgatatatatgagcaaatctatccaactgtcgtattagggacctagggtgcacttctgatatctaaattaatgacattaataaggatactatttaaattaaatatatacttaaatatagtgtatatatgtatgtctgttattattaaatcaatgcagtatgtccaataaccataaggtggctgccatttggattgggaagattgttcaacgacagatgaagtcgattcagtgaatggatcgcctaattgttatcgatgagctcttcagaaccaaatggtggcatgactttcatagggatcaggtgtatgcttgcgtgtttatagaggtgagggtgtacgtgttatgagcacctatctttgtacgtgtttctcaaataaaatgg

SEQ ID NO: 22194 - DNA, 1564 bp, Oryza sativa
gtcgctcgtagactactccatcccgctcgccggcgtgcaccagcgatcggagagcaggtctccggaacctctgcctttgacgtcttgcaccggagaaacgcggcaataaggtttttgggaagcgcttcgcgcgactgctccctgttcgttcgcgacggctcgccttcctcttcgctcgcgtgtttcgtgccttcgtagacacctgcgaaaagtttcgaccaagcagccggtcttttcgtcacctcggtacgtgttcaatatgttgcgcatatttgatctgttcatgttattctgcgtagtttacatgtgtagatctaatgatgcgttcatgctagttttcatctgtaatgtcatgatttatttatggaataaattaaatccttatatgcccataatctcaacaatctttacttctccatatttgtctgttttctctattccatcacctgactataattgcaatcactgatctttgtaggagaagaaaggttttttgcttgcacaggtgtatttatagacttcaatggatccacatcaagagttgtgacttcagcaagtttggttagaatatctgctgatgaaaacaagattgctgataacctgaaggttggcatcacaaacactccttttgcttgtgcatttgagatactctttaattctcacattgtgtttcttagcagattaaagtgtaccttccaaataaacgaatcgccgtaggcgaattgcagcattgcaatttgagctacaatattgctgtggtcagtgtcaagggtttctgttgtcttcggacagcagaactcgacaaacagatgcaaatcgaacctcatagggaggtagtagctataggacgtatctttgaatcaggcaaattaatggctacaagtgggatattgtctgacgaggaaagcaagcttgactgcagagagcttatgatctccacttgtaaaatcactaaggtacattgggttgatttctttcatggtgtaaacaattaattgtatcagaatatgagtaatttaattcatcgcttcatatgcgtgtcattgaaaatttcatctattcatgtgctttttttttttttgccaggccggtattggaggaccactgattgattttgatgggaatttcgttggcataaacttctatggaacaaaagaaacacattatctaccacgattaatgatacagagactattgaaggattttgacgggtacgtttttcatattttttgtagttttttttggtatatgatcatatcagcaagtgttattcatctggattttattttttttaggtaattgcacttgcttctcaatgacttgtgtgattctttccatcttttctaatatatgtttggtttgaggatgatgtgagatgggttaggtccattcatatatttttaggatgagatggatctgatttttgtttggttggagggatggaacggaccatgtttaattggagagatggattggaccaagccaaccggcaactggatatacgcagaatattccttttagacaacccaacctacggttcaaaccccaaggataatgagatact

SEQ ID NO: 22195 - DNA, 4988 bp, Oryza sativa
tcaactattcttcagttagcctctaccatgtgcgagtagagtttcttctacgctggtttgcatggttacgagttgaaatttattttaaaaatacttttgagaatttgttgtggccatgtaatattattggattaattagctgtagtgtttcttttaggcgtagtagctagccacctcaagtaaattcggataaagcagaccttacttaggtccgtcatagggtagggttcacgtttttttctttttgacgaaaatcgactgaagaaccgtgaaatttcgaggtttcgatgtgggaagaaagtatatcccgagtgaaagtttgaatgggttttgagaattcaaatttcataatccaccaatccctatgcatcatctggcaagtgataggttttgaaatctcctgtgatataccaagcgaacttgcgggtggcgcagctgagtccccgtctcggacgctgcgagttcgcatatttcctttccatatggcgacagtcagtggggcaatgactgtctagttaaaaataaaaaaaaattacaatgagaccgcacaccagcgcagttggcacgacaacggtgaagccagtgacggccccacgatgtcttgcgaatgaccagcggccaccaagaggatggtcgaggatgtacagcaacctctatgatggcgccctcgccgatgcgtgtccccttcttttgccccttgccggtggatgacggtggccgggccgctttggttgttttctgccatggactccccgatttcctccttcgacatggcccctgacgcgtcctatataaaatacgcttccttggtttcctccttcgacatgatcggagcgttccccttttccattccagtcaacacagcacccaccatgttcttgatcactgatggcagcgccgccttcgttttgacgatgactggctcgatcacgaattctctcagcggaggagatgggcatattggggaggagacatgagttccaccgtatttttttatttttaaccggacagtcactgtctcattcatatgtgggttccacggcaattaggggatttcaactaatcctttccggagaattagacggcctacccgaacaagttttttatttggtgggtaacatcaatgaagctagcacgaaagctataaacttagaagaggaaaacaaattgaagaaatgaaattaatctttatgtactgactcctaagcgaattatttgggattgtgaagtgaaagaaatcattttttctactaatagtggccaaattggcgtattaccaaaccacgcccccattaacacagctgtagatatgggtcccttgagaatacgcctcctcaacgatcaatggttaacggcggttctgtggagcggttgtcagctgaaaccaccatcgaaatcgtcttaggacattatttgtattggttttggaagttgagggatacatcatatcagtctggtattgcagttcagggaggaattcagacttagcgacaaattgaaggacctaaagtgaacttattctttcttcatcacccactcagttttgttaggctatgtatggatcttggtgggggctaaaatagcctaattccaattcaggcccagattacagatcacgcagaatggcattccctaaactttcttataaagagttgcgtattattagaatccaggcatgcacttattagaatcctcgagacaaacatagttacatgggagggaaattctcatatctcaagtgtccaaattcatcagcaaaatgtaaacaaaaacaaaaacaaaacgaaatctcatctttttggactgaaaatttcaaacattttgaagccgtacgtcgtcttgctcagagcatgctgtccgcccgcgacggcaggcggcggaagaagttgctgggcaccgccggcaggcggctgcggaaccgcgggtggcggagcaggtagaggccggcgacgagcgccaccaccctgaacggcgtcacgtagagcacgacggcggcgacgaggcagaagacgacgaagaggcacgtcgccctcgggtcccgccaccccagcagcgactgcagcctctccccctgcgtcgccatgtcgccgaccaccgtctgtatcctcccggcgacgctcctcagccggtcgtacctcatgtacaccacgtcctgctgcctcgacgtcgggaacgtgtcgaactcctcgtccagctcgtcggggtgcaccgcctccgcccacgacatcttcgtgtccatgtgcggcgggtggcgcgcccgcccccggtagttccacagcccgatcatgaacatgtagaggaacaccgtggggaggatcagctccgggtaccacacgaggatgaggaggaggacgtgcaccagcgccgtcgtcgcaacgttcttccagtggcacacgtcggcgaaccaccgcgccgccgcggcggcccccgagaagagcgagacggcgcggaagaagttggccttgctccgccgcatgctccacatgtgggactccacgtcgagcatgtactccaccacctcgcgccgcagcggcggctccgcgcgccccagcctcgccgccacgatccccatcgcctggtaccggagcgcgtccagctgcgtcaccgtgaacgggtggaggtagtgcatccgcggcagcagtggctgcgtgtacaggtgcaccatgttcatcagcgacagacaggtgaaccgcacggcgaggcggagctcgcccatcttcttcacccccgacggctgcagcacgatcagcgggtacgcgtgcgtgtacacgcggtcggtctccagcgtcgagaggcggatgcggatcttgccgacgcgggcgtccctcgccggcgggcttcatcctccgccgccgcgggcgttgttgccgttgccgttgccgttgccgaggtggttgttgtcgaagacgccgatggtgatgacggtgcacgggtcgaacacctcccaggtgtactgctcgttccaggtcgggctgaaggtgccgagcatggtgcgcgtgcggacccacttctggccgtacttggcgacgcagtaggcgtcggtggtgccacggccgtcgcgattcttcatcggctggaggccggcggcgccgaggatgccgacctcgagcacgccgacgggcggcttccagagctgcctcgccgtggggcgggtgtcgctaatgtacatggtggactcgtccatgacgtggtaggcgccctccaggcacgccctgacgtgcacgcggctcgcgaaccggagctcccgccgcgtctccccctcgatggcgccgccgatcccgaacttctcgaggtcgaaccaccgcgactggacgaacggccggtggtccagccgcttctcgaacagcgcgagcggcagcgcggcgcggccgaggaggtcgtccttgcgcggcgtcacccggtcctccaccgtcagcaacagctgctcctcgaacggctcggcgacgacgaacaccaggtcctcgttccaccgcgggttcagcgtcggcgccgccaccaccgacgtcttaaggatctggttcccgacctgcgccttgacgaacacctccggcgcgcgcccgcgcgcctgcggatgcacgtcatgcgcctcgatcacgttgacgcggaggtaccacagcttgggcgacacgtacgccttggaccgcacgctcgccacgccctcgcagcgtacggtggcggcgtcgaagtgccacgcctccgggaacgcctcgtcggcctgggtaccaatccacacggcgagcatcagctcccccctcaccttcaacccgccgccgtcgccgccgccgcaacgcgccgctcctcgaggcggtaccactgcggcgcgagggggctgtcggggggcaccctggtgggcacctcggcgaggtcgaacaccacgcggccgacatagtcgtcgcggccgagcatctccttgtccttgaggtacacctcgaggacgttggactgcaccctcgacttggagaaggcgaacacctggtcccactccgggttggctcgccggtcgtagtgcttcgtcgtgcccttgtagttcccgagcttgacctcgacgtacggatccatgggggacccggtgatggggttgggcgggaggtccttcgccttgacgacgcgcacgtacaggaagaacatctgctcgacgaggtcgtaggtgctcgacggcttctccaaccccagccaaccggcgatgccgccgccgacggccggccgcgccggccccgccgcgcccttcggccattgctcccccagcagcgggttcgtgtccttcagctggaagtcctcgtggtgcgcgtcatggtggtgccctccggtcatcgtcatcgtcgccgtcgttgccggccgtcgtcttcaaccttgtacctgcaaccaaaccacaccatcgaattaaaacaccggaaaactccatgaaaattcgcagataactcggcatcaataatctcacctaaatgttccaagatcgagatttcactagacggtaacaatggcgcgagacatttatacctagaactctacaaggagaaagtgatgagcaggcatatgcgtggtcactgcacggccatggaggggcatccgggaggtggcctcgccggcaagcaaagcggcgacgccggtgtcggcgtcgacgtcgcctcgccgcggtgaacccggcgacaaggaaggtatacgtagctaattaagctagggctttttgctgtgcatccatgtacatggaggacggacaatgtcagtgtgtgacagtagtgtagacttggtgggagagcaagcagctatagctaagccaataaacactttctagggttctgaactttaagctgagcaagaagaggcagaagccatgtatggcaaggagaaaattacagagaagggatcgattcaaattcagagaaaaaaagggacagatggtgatcgatcatgtgttgatcaaaggggattaaaagatgtttgtgggtggtaaataaagagagctagctcatcgattgattgattgatca

SEQ ID NO: 22196 - DNA, 1444 bp, Oryza sativa
  unsure (1)..(1444): unsure at all n locations
atgcagtgacgatgcatatgcacacacactgtgattagtttaattaagcttagcttcgatcttgctctctagaacaagttgacagtgcatgcatgtgatgcatcgatctgcgcaggtactggcggacaggttattcccggcgatggcgacgccgacgacgcgtggccccgacgacgacgacgacgtgtggacgcacgtcacgccggcccaccggcacgggtcgtcggcagcgcccccgacgggtcgtcggtcaccgccgtcttgaacgccagcgccaccaccgcctccacccgcgcgcctcgagtcgtcgtgggcggcggcgcgtcgccgtcgacccacgccgcaccgcctccaaagcctacagacaacagatcgatcggccgtggtgcgccggcacaatgccgtcgccttttcggtacgatgatgacgagtaggagagtggcggcctggtccgggcatggacgtccgaggagaggaagttggcgtcgccgtcctacccgctgcggccgcgtcaccggtcgatgagnagnaggtcggagagcgcctttccccccccccgggggcccctcttnncccgccccttcccaccaaccggctgnccgggcgagctccgcctcccgctgccggccgcccgctccgcctccgtctcagccgcccgccgccctccgccttccgccgctggcagcgacgcctgctcctgctctcgcgcggtcgccaccgtgctggtgaggagagagaggagagattgggatagagtagcgagggacagagaggggaggggaactgacacaggtggggcacactaattttttttaaaaaaaaattgctgtctggaggatccaaaaccactccggattaagtcgggggttatttatccgatattaataattgagggtgtagaatgtctggtttttaagttcgggggtataattcggtcgagctcgatagttaggggtaattcgtacttttttttttccttaattaaatcaataaactgcgtttgtgctcacttaatttatctcaacttttatgagcgtgaagacacaagcaacagccatgcccatgcacgctcctaaccacccaccattaaccaaccgtaaattagctcctaaccacgctcctaacctctcgttctcgacaccctcctccccttataaactcccctcctcttcaccctcttctcctccaacaacgacgcgcagaagagattggccacccgcctctcgattcgctccccaataatccagagctaccactaataatccccctccgttccagcgcgcgcggcggcgggagctcgtcggagaagaagaagaagaccaaaccaggccggccggtcgtcgtcgtcgtcgtcgatcccctcccgccaccgcacccgccggctgtgatactatggagatgaagaagatcgccgtcgcattcgccgtcctcgccatcgccttcg

SEQ ID NO: 22197 - DNA, 672 bp, Oryza sativa
agccatggtttgtatctcatgagcctgttcgactacagaacgtttgtcagccattttgtagtcatgaaactgctccatgatatacagatcattgctagcatcagtagcaccgaatttagtattcagtgcatcccacaactccttagcgtcggtcatatgcatatacacctcgaccagacgatcgccaagaacgctaagaatgcatcccacaaagagagtagtggcttcctcgaattgcttctgctgttcagcagtaagaactccttcaggtttgccagtactcacccagaagcatttcatagctgtcagccacagagtgaccctgatctgccatctcttaaagtgcacaccggtgaatttatccggcctcagtgcatcgacaaaaccagccatagtaaaatcacagtgcctataataaggtttttggattgttgagattataggcatataatgatttaatatattctataaataaatcatgacattgcagatgtatactagcattaacgcatcattagatctacacatgtaaactaagcagtaaaacataaacagatcaaatatgcgcaacatattgaacacgtaccgaggtggtagaaagaacggctgctcggtaggaacttttcgcgattgcaggcatctacgaaggcgcgcagcacgcgagcgaagagg

SEQ ID NO: 22198 - DNA, 1408 bp, Oryza sativa
gcaccgccggtggccccatcctcatctaccccatgaacaggcacaagtaagcagctcgccacactcatgcccccatatactatatccagccaatctacctgtcgtaacagtaatccagtagcactcgcgcccgcagcgtcacatgaagcgcggccgtcctctcacatgcggcgcaacacgggagggcgcgggcaggtggccgatgggatgcggcgtgcgcgcccgcgcgcgcgcgagagagagcgtcccatgattggcgcgggataaacaaatatacctccagatgggcagcagattgcacaggatggatcgtgctgccgccatactttaattccgaaacgcagccgccgcatctccggtgactggaattggccgcggacataccgcgcactagggcgacagggccctattctaatcgctgcgtggtggcgccatgccaatgctaggaacagaacagaacagacggggggcgggcgcatcatcagtcaccttcaccgccttgcgccgaccggttattctaaccagggcgcgcgccgctcccgttcccaatcgcctttccacggcaccagttgttaagcttcgctagtggccagattgcacatatgtgttgtcgctttcacattagtacttaacctgaaaggacgtgtcgatcagaatcagcacagatcttgctgctaactgttgttgcttttcctactctgctccaatctttcctctctctttttttttctcggtggatttaaatactaaagagaacttgatttgcgtacgttgcaggtgggacccgaggagctcggtggtgacgccggaggaggacgtgttctacctggtggcgttcctgcggtcggcggtgccgggctcgaccgacccggcgcagagcctggaggcgctggagcggcagaaccgggagatcctcgagttctgcgacgaggccggcatcggggccaagcagtacctgcccaaccacaaggcgcagcgcgagtgggaggcccatttcggagcgaggtgggctcggttcgcgcggctcaaggccgagttcgacccgcgggccatgctcgccaccggccagggaatcttcgactcgccgccgctcttggcggagtcctgaaacgaagacgatcgacgaacaagatgatggctagctaggcgcatgtaattagtaagaatcataacaggtgattagttagtcttaatctgatgtgtagattcctcgccccataaaaaaaaatctgatgtgtagacaattctgtacagagggatgtatcagtttcatgcaaaatgtgtgcaatgtttttttgccggtaaaagtcggcgtctgcctccagttcctcttcgaagcgtcgtagttacccaaggacgagatatctcaatcactgatccatcaacaggttcaggccctgttccgcat

SEQ ID NO: 22199 - DNA, 1536 bp, Oryza sativa
gatggcgccgctaatctacccgttcgctccccgtgcgactttcccttttctcggcgtcatctcactctccctccagggcttggcacggagcacgacgtgacgacgaccccgttcttttgcgtcaccgccctcgctttccaactaatggcccaatagggaactgaggcatcagcgagcagccatgcaagtggcggccgggcgcgccacgccgcgcgagggaaagcgagcgattgatgcgcgctgctgggctggctgatggcctctcgggggatctttttgttaagtaccgcaatttcaccacatgtcgatcgaaaccccacaaaggggcacggggcacccaattgaaacgtgttgccaattgtggccgtcgcaaaggaaagtcaccgttgggagctgacacgtaggacaggatcgatcgaccagcgaccgagcagggggtagtgttaactttatgttgggtcgctgttgaggtctacggtctccgagaaaaagcgtctggagatgggatttttttttttgtgtgcgcgtcgggtcaggtagtggaccaggttggttgggaatttggggccgacccgatggatcgaccgaatagtttgtgctgaccaattggtggtctgcttataaatatactctatatagaagcgtttggttagctgatcgtgcgatcactcacaagattttgttgtcatatgcagctcaattagctaactaatccatgctaactaagcgtgtgtgatctaacgctgattaagctgtgtccatatgatcggtacggcccgtgggtaataataatttattaatttgtcgttctgacctgcattgccaggttcgctggatccgggcgctctactccaacttcaccgagttcaccgcggaccaggagcggctcatctccctgcagcacggcggccggcggttcgactacgtggagggcttcgtcgtcgccgccgagggcctaatcaacaactggaggtcgtccttcttctcgccgcagaacccggtcaagctcagctcgctcaagcaccactccggggttctctactgcctggaggtcaccaagaattacgacgactccaccgccgtaaccgtcgaccaggtgcgtgtccgtcgtgccggcgcgatcgcgcggccggcgccgtctttcctgattcaccaataattctctgcctccccccctgaccgcccatttgtttatgacgaaatttcttaattattcctactggagtagtttagtactctaatggcagggcacctagtcaatcattgggccatgtttttagttagttatgggcggtttagtcaagctctctagtgtaatccaagcccttgatgattgtatgattgcacccacatgctgagcacagtggatcggtggatcttgcaaacgtactagtagctgtctagatcttagtcccactgacaaaacatgcactattttatcgaccacttaattaatcaattattacgcagtactagctattaccactagtatagtactatacgcaagtgatgaaaaagaaagacgaagtagatcat

SEQ ID NO: 22200 - DNA, 1701 bp, Oryza sativa
cccattagcaaacggtgcactgcaattgtagtacacattgatcatagctgcaatagccaagagatttatactagaaaaaggtgttctgcttctgctaatggttggagactaatcagaaactacaagctcagcactacaatactatccaaacttccaaactcagcaaaaagaaacaaagacaatggagacgaagcacacgtcggggatcacaaacaagcttacccgttgagcaaccaaacttgagaggagtagttcgatgggtcttgctccgggaagcagagctccacctggagtgcaggttttcccgtccatttcccgcagtctctgcaggggtaaagcgccggtgcgccgccgccctgcccgggaatccgatgatcgaagaagtagacgccgccctcgaagccggggtactgatccgtgttgtacgatctggagcagccgcgcccgacgaacagcatcctgccctccagcgagggcagctccctccagatgtatcgaaccacgtcgccgtcggatctggagcagggatccccgacgaacagcatcgtccggccatccagtaagggcgcgtcgccgtcgccgtcgtcgtcttcctcgggctgtgccatccggaacaccttgaacgccgacgtggactctccgggacgaggagagcacctcacgaccatgagcagctctccgctggactccacgaggtagcgcgccacgacgtgctgcccgtcgtagccgcgcccctgcgacgagaagcagcgatactcccattgcacttgaggcggcgcgttcgcttcgtcatcgaagcccggattgcccacgacgatgtgctgcccgttggtgaggaaatggaaggctccattgtggcgcacgacgtccaccgcatcccagcacgcgtcctccatgaagaagcagccgatgaccaccttatcgtcaattcgccagaacgcaatcttctgccggtggtggcccggtacgggagcacaattgttgacgaatccggcgaccacgcatccatccataaatgggtccgacgagagggtggcggcgttgatgaacagcgggtcgcgcgggcgcagccgcttctgcctaggccgcaatacaggctcttcgcggtccaactggatccagacggggagaacgaaggtattcggggtttggtggagattggtgaggaaataatctcgataaccctgagctcgaggatgagcagtggagacgaaggcccagccgccgtcgtacgagccgaagtagcaagcgtggcgaatccactccgggacgaagaaggggtgggtggcgcagtcgctcaggacgcaggagaaggccagctgctcggcgagcggcaggatgagatacggcagcttggggggcgggagcaggggcgggagccgctcgaggtgctcgcgccatggtcggcagacgccggcgaggtgcacgcggttgtacacgcaggggaggcggttggcgatctcgcgcacgacggcgtcggtgaggtccgcccatggcgggaagtcggccatgagagacggagacggtgggggagggaagaggaggggaggttgcggactggggtggagaagaagaagaccagagggatgggaaggtttgattcctcttgtagcttcgggaggagggagctgtgtctgtcttcggagtggattaagggttggtttggtttgttgcctaaataggtcttactaaattttgtca

SEQ ID NO: 22201 - DNA, 578 bp, Oryza sativa
cggaacaccacagtgttttgaagtggcacagggtttgttggaaattcctctcctgtagctgctgaaaacttctgattaagtggaacagcagtagtttcatcaaacacctttactccattagtgagagttgacatccagttaaagaaagagctatcatttttgtggaataatcctgaacaagaactctcattatcttcccttctacatcttttatttccagacgtcatctcagctgcagaaaattgaccatgcttccgcttcggagcttttgtacttgggcagctctctatactctcattgctgtcatcaccttcatttgtgttgctaacacaattactcatatcatagataagcttttctttccccttctcgagctttctaggattacaaccggatgtcgactcatgtcttgctaaaggattaacaccagatgctaactcacatctagcaacaggattcacagcagacacggactcacatctagcaacaataagcccatccttatgcttttcctgcatagcctgatcttggctactgtcatttctattacctagcatacttgtcaatttgccaggcat

SEQ ID NO: 22202 - DNA, 679 bp, Oryza sativa
  unsure (1)..(679): unsure at all n locations
attcctgcagcccatatcatcaagacatacctcaagatgctccgatgagtcatccttatcctcaagtgccatgagacacgggttgatgaagtcctcgttgttggcgagatagcacatcctggagaagtccttgtcccccttttcttgatcatcgtcatcggagtcgatgtcgctaagctgcacctcctcaagagtcgccaagaccttgtggatcgccttcttcatcaaatcctttctcccctttcgcccttgtccctcgggcttcttggtcgtcttgtcactcttcttcttcaacttgggacaattcactcttatgtggttaggctctccacactcaaaacacacaaatggttcattggtttttctcctttctctctctctcacattcttgtaagctcttgagaattttctagcaaaaagagcaagatcatcttcagggatcttctctaattgctcctcagtgactgagtgtaaagcggcaagagagaagccaccacacacaaaagctgagtcattagaagaagtactaccagagggatcagctaccaaagccatcgagtgtttgaggcctttccgatggaaaacatccatctcatgggtttttagctttgagtaaagcttgtccatggtaaggtcactcagaggtgcactatctgtgatggaagtaactntcatttcc

SEQ ID NO: 22203 - DNA, 1506 bp, Oryza sativa
ttcctgcagccctggcatttgagctcactcgatcgcctacataaagagcgggatagcttcgagctacggcatgcaattcgtctccagcgccctggcgacctagctagctccctcctccgccattgccacagaacacaccttggtgtcgtgcaatccatcgctcatggcgctcaccaagctttcctgcctcctcgtcgtcgttttcctcgccggcgtgacgtcgacggccaccggagccaggtacttcccacagaacggcacggcgttccgcgagaacatcctcgtgctgcccaccgacctccccgcccaggccgctgcgacgaggttcgcctccacgcaggccggcgacggcgacgaccgcgcgctcgctctcagcgtctgcctcggcgactctgcgccggcgcagtaccgcgagagcctcgccgccgcagtcgcggacgtcgtcgcaggctgcggcgccgccagccgccgcgccggcgcctggctcgacgggtgctactgctacctcgccgccgacaccaacatgacgacgtcgcccagcggggggagttccaccggtggctcgtcaccggagacgtcctgccgttcagcgacaacctgtacgcgacgttcctcgacatgagcaacggcgtggcggcgcggatgctggcgacgacggcgacgcaggcgatcgacgtcggagcagccacgacgacggggctggcggggcgcgtggtggcgcagtgcgccgcgggcgtcgcgccggcggactgcgtgcagtgcctggagggcgcggcgcgagagatgccgagatgcttccgggaggcacgtcgggaggagcagggagagggcgtcggcatcgtggtgagcgacgactgcgtcctgcgtttcgacatgacttcttcgccggcgcctcggacgtcaaacacctgtgatgggacttgcaagctgttagccttcgccttcggagcagcactagaatgatcgtgtcagtgactttaatttgtgctccctccgtcccaaaataagtgcagttttagcactgttcatgttcaacgtttgatcgttcgtcttatttgaaaaacaattataattagtatttttattgttgttatatgataatacatgaatagtatttatgtgtgactaatatttttaatttttttcataaaattttcaaatacgaatggttaaaatactggacacgaatatctatggttacacttattttgggacggaggaggtagtagtaataaccatcgctagctagcttgatggaatcatggtgcttgagtggtagaaataatataatgtctgtctggggggtagaatggttgcctatatgttagcaacttagtagtactaccatgtttctagtgctttcggtgacactattctagccggttgtgtgtttctctttgtgatttgcaatgctatgctcagctagctgaatatatatgccaaattgtcaccttgggaactaaatagagctatgtgatccattgtattgctgggaaaaatatatgg

SEQ ID NO: 22204 - DNA, 659 bp, Oryza sativa
tacactttgtacggaaaaggtactaaagaataatatagctatacacaattctattacttcataacatgtgtaacttatgtagtaagtgttcaataaaacttgcatttgcaattatgtgcaacagagatcacatccaacaagttcagtaatgattgacaacaaacaagtaaacaaaaactgcatctatactgaactgaaatgactccatgtcccactagctaaattatgctgcaattccattgatgggttgattttacaaagattatttcagctaatgaacggtgtcgttagcacagcctttttgtccctaaaacaagtgagctgagagcacatcttttattagcatgaaacttgaaagggaagctgctaaggattgtgtagacaaacaaaaacatgagcattcataaaaagatacaaatgaactaacataacaatataaagtgcttatgcagcaattttacaagtgttgaacatccaaagaaagatacaagattcagtgttgatatgtgaataaatacctttacgcttatctacatctacagtgtaatcaacaggcagttccaaaccagtgctggataagaatgtctcagcagtctccttaaaacagttgtgcataagataagacaacactatgttgcggacatcgttatcactcacgg

SEQ ID NO: 22205 - DNA, 656 bp, Oryza sativa
tatcatacattgggcttgccgtattcttccagaggaaacttagtagactctgaagtgacttccataagtagttctggccggttcaacttggccgatcattactatgacgagggctacccgatggcttatgacaggctgaatgctctttataggttaagagaagggcaaaattccacattggatgcttattccaatggaaggatggactcgattacttcaaaaccttggctacataacttctcaaatccagcagtgaaccttggagttaacccaaatggattttcacagcaaatggggaactacaccaatttagggagtgggagggtgaatggagaacatctgtatcgccatgccaacgggcaatggtgatgcctgtacacaattgataataaatcctgctataagttgtcacagaccatggtggcagatgtaagcgtcgccatggccaccaggttgtaacttttaattttaaaggggcaaagaaataatacattgtgtaaagcattccagtgtccgttaaattttctgtcggctgctttcatagttttatggttcttctttatttcttttttggttggagtataaaacggaattttaacaagtcagtccagaagagttctatgactacttcatcgggttggaaagttccagatttt

SEQ ID NO: 22206 - DNA, 3040 bp, Oryza sativa
  unsure (1)..(3040): unsure at all n locations
caataaagttgcggtctccttctagcgtcttcaatcttttgttcaagtttgagatttcttcttgaagcgtgctaagatcagtcttccgactcactgttgaagaatgagcttctttagctaagaaaacgggctcctgggcctctcttgagctttcttggcattgcagtgagccatcatctacaacgtgcattttgttggaaaggtaatcctctatgacatctgaatttgacaagtgaatgttagtactgttgttggagtaggattgaagcttctgctccagcttcgtcaagcaatcaactatatatgccctctcctcttcaaagctcactaatgaatttataccacttggtgtggtaattgcaggagcttcaagaccagtttcatcaagcaaagtttcggcaatgttttcttcattaaaggagacctgattggattgtttctctgttggtccacctgcaaactgcatcctgtagttttcgagctcagcttccaattcctctatttgttgttccctctgagcaagtagctcgttagctttagcaagcgcatcactatcatactctgcttgttcttccatcatccgctggtaatgtaaagcttccatctgcatggcagccttgtcatcctgcaatctggtaatcatagccaaagcttgacttgcagcaatcgctgaagcgttcctttcttcttccagttccttgcagaggaggtgtatagattttcggtcaagatcaatctgtcgtctcaaccgttcagtggcactttcaccttccatctcacttacagtgctaccctccagtgactccaaaccagatgcatttctctcaattgaaattctgttcgtgatgttctgcactatcaaatcatcaccacgcccatacgcacgtgggctagggcctgggtcgacccatggagcctcgagtcctctggaagccgagagctgtgacagcagtaacctcaattcttcatttacactagaagaggaatcctttccaagaatcacatcagtcaaggtgggggatggcaagctactcttggcaccaatggcaagcttgtaggcttcattcatgctaatctgagtgcttagagatggtctcctttcaccaatagtcgcgcttgtttgcggatgttcctcgatgacattgagaccctgaaatacctcactgtttggtctaatagcctgtggtgatataggagcttcttccacaaaacctaaccaaaagggttaaatgtaaggaccagtttttgaaatactgttgcttgagggaaggtagaaatcaactaaccttttgctgtaggatctttggaatttgtattggaaggatctntgagtgccgcttcatgtgttaccatatcacaagtctgttcagcctccttagcataatcttcagcttcatcaacagcttcagaactagaattaacttgtgaaacatggtcatctctaaaattaactgaaagggaaaacaggtcggaataaagaaacctttcagacatatatcttgattcttgagaaatagtcagtcctgaggtacagccttacctggatcatcatcaaccaatgcacttttctggtgaaactctctacttgatgtaacagtaatttctgacctgtgaccttccagatcatctgacatttttttattgtgatggggggttagacgaacaggaagaaaataccattcagtttattgttaaactatgattaagatatacctattgtgctgttgtgctctgaaacagcaatgttttgttctagtgttgtggactgtgatgaacatggatcaatggtgctttcactcgctccatgacatgcctcgttgtacccaagattctgaggtgactcgacacttgatgcaactggaacttgggaaacattgacatctgcatgattatctatgctattaatctttcaaactgaaaaagaagttcagtaggagtcatcccagtttggggaactaacagttacctgtcaaacctgactcttctttgacagctaggggatcatgctggcatgtctgtttttctaatgaagcatcttctgcttccatttggccctcaccaatatactatcaggatgatcatctacaagaacatatggcaaggatatatcatatgagtcaccaacatcggtttccatcggaacattcatttctaatggcctgaccaactcagtggaagaagcagcaaatttctcggcagtggcatcttcattcaaatcttcctccatacaattggttttatgatggtgtgaaattttgccatcatcagcacagggagcctcatcctcggagccagatgtcatctgcagcacactgtatcgttcatggatggagtgatcactctggtgacaaatatctttatccaaagatttatccacttgatgaagtatggaataatctgtgcaaatctttggtgagcaaacagcctcagcaggttctagttctgtgatcattcgagaaaacattgtcggtctctgttgtgtataatgctgtgcacaacatgagcaaattcttgtatcatgggaatataatccttgattactatcaggtagagtggcagccattgttggctcatcggtgcggtcatcattgttttctacaagtgagtcactgcatctctcacacatactttgggcacctgcaagtttctgatgtagacggcagaaggccaaagatgagatctctgacttgtgagttttgcagatcaattccctgtagaagcatggtttctcattacccaggacatggtctagccttgagcagaaagggcacggtgccggtaatctgcagaggcgggcaaatctggtgaccaagaagcaataaaccgcatcgatgaacagcagcagcatcaagatccactcgagcaacaccgatgacagtgtggctgacaatctccgtaaggttggcatccttgtacccatctttgaacagtatgctcaattcttcacaattgctgtactcaagttctttagattggtgaaaggtggctggtgttgaaccagaatttctgaaggaatcaaaaacaaacttaatgagtgaag

SEQ ID NO: 22207 - DNA, 1384 bp, Oryza sativa
cgttccgcggccggggggctcgcatgcaagcctagctagcttcacattcccttcctttccccgcattgctgcgagcgacgctgcttctgcttgcttggttcgcttggccgccgccagatgcgatcttctccttcctctccgatcctctccttggcctccttcctcccgttgctagctcgtgcatggtggcttcttcttcttcttgcgccggtttggtgatccttgttgcgccggtttggtggtgatccgatcgaggacggaggaggagcgcgcgggggatccggtgatgggagaaaagctgtgaaatgagatggtggtgatgcgctactccccgaggtgggctgctgcatcacagattgatgattgagtagaaatctattatactacgtcgtcttttcttgtagatggtttctttgtgctgtttaatctgctttttctgtagagctttagtttttattttattttatttttacatatcacgtagaaagattacaggcttttttttagaaggtgaaaaattgcaaattttttgaaagaacgaaaaattgcaaattagcgtagatgcatttttttactctttatcttggtcgtctgatccatccacggattcgtttgggtctagctaagaccgaaaggtatcaagaagctgggaatatctgcttttttggacaaaaagacacaacaagattggagtttttgcatctactagttcatttattaggatagttcgattcttgcatatgagtggaaaagaacttataatagactagtcttgactcttgactatgactcttatcagttagatggatgcccaactgcgttgttattatacagcagtataagaaaaatatgtacttttgtcatttgtaggggaactctaatttataattactttctaccttgcatgtatgctatgatatgaacagaaaattttctttttgtttatctgttaatcttttcaaagggtcctatttgatatgctccagtgtaaaagaaaaacagactcatgccatatgtcctgcaaataatcctattatcttttagctaaaaaaaaaatcctcttatcttatagtctactgaaggcatatggtggcattcaggtgcaggtgtaaatgcagtcataatattcggcatgagatctgtctctgagctggtgtggtctccggatgagggtttgagcattaaaattgcagcgtccagcttaagtacaaggaaaacttctcttcattggaatgcagataccttgagcatagtaatatcttcacctcaacagagtggtgctggggagagtggtcatatcatagatgctacagtagaagacgcagaaaagatgccatcccagttacgaactcgcagtgacagttcagcgagagtattcatgtct

SEQ ID NO: 22208 - DNA, 3438 bp, Oryza sativa
tccgcgagaccgaacggtctcgctcttccattgcgcgaaaccgcgcgctctcttgccttcgcggcgcgataccgcccatgacgtcatacccacctcggtttcgcgcaacggttgtgcgagatcgacagtatatttacacaaaaaaatttgcatcccgaatattcatgaaaaaaaattgaatgcatagtatatttttagttttaattctaagatgtgggccctgtgattctatgaagaggaccgaacgtagcaaccaaagcagataaacagtactactccccggcggcccggcttaatgccccggatatggttgcagttgcgcaaggaaatcttatgcgtgcgtgcataaggatcgtgtgcccgtacgtgcgtctgttcatgtatgcgtgtgtgcgtagtatatatgcatgaatatgtcacagtacgtaatgcactcgtaagcgttcattctagctatatatacccacatcttacaccatgaaactatctcgtttcaaaatattcctctcagcaaaaaggtcgttgtcaaaccttaagtacttgtgtggtcgtattcctatatattccacacatcctccggtagttttctttatgtagatgtttaatttaaatttgtactaattgggattggacttttctttaagaacgaaatcatatgggcgtgggcacgtaccaccttgacagacaggcacacgctgacagtgaaacggaaatcctaatttggatcggtgtacgctagctcgcgattaacatgacagacacgtgcaaattagtatatatcaatttcccagaataaaaggtaaaaaatcacctacaaggctacaaacacgtatatagtcggatcaaaataatcatcgtgaggtgccaataattaaggtaacggtgtggagcaagaacccaacaaaaccaaaaaccagacacggccgtacggtgacatcagaagagatgttctcgctagctacgtgctgatcatgcaggacatcgttggttcgcttgcatgtgcaatgccgggtgacacgatcgagatgtgatgcgatgctatctcggcgcgagttaatgaggatgagccaaaattagtgctcgcctcatcatatccccggaatttgactgtttgaaacgcctgcgcgcaggatcgatcggctacgttgtctgtacgcgcgcggcgttctcgcgtgacgcactttggcagatccatcccgcaagagatcatctcgatcggcgcgtcctctcctccccgtgcgggccgggacaaaccgtgtcgcgtcacgtattttatctccgtatatctcacggcctgcagtccggctctcgctcgatcgcccgtccgtgcgtgcatgaaaccaccatcaacacatgctcgtgtcgatcgatctgtataccacgtaccactacgactacgcaacaacacatgagtaggtttttgctctcaacatgttccgttttttcccactagaacgtaggttgtgctagcttttaattctggcacaaggttgttgcagcgatgtgcatttatgtgccagtaccgaccatgtgtaccaaactaatcggattgatcgatcgatcggtccaacgcgcgaggtgccggcctgtgcacgcgcctatccattggccgcgccgcggaatcgtacgtaccgctagctgctgggctcgatcggtcgatggaccggccggttccctttcgttgtcccactccgccggcgacaactgtgcatgccggaccgagacacgccggatcctcggcctgagccagcggccggccggggcggttccaccaggtgcatctcctttgatcgatcgatcgatctcctagacatcatcgttgttagtgatcaaagatgtgatgggcggtacgtgcagcattgattgctcggcgtgacgatctctccaatcggagcgatggagcggcacttacgacgagcagagacgggacctcctccgtgtcattaggaaaggatcgcacagtggacagatgatgacaattgacagtctggtaacaatgatgatatccttatattaaaaaaaagaagaatgataggtgatatatatactactacgtagcatcacagtataattgaggagaaggattttaatcactcaacggccggtgagccgtccagaactacgcatcgatcaatcaacgtcttttaacatcgactaaaaatgtttgcgtgccacggttactagcgacacgaatatatcgagtatatagtggagtactacgtgaagggatcaaatcaaggtggatgaagacgtaccgacacgccatcgccttcacgttattacatcctaacgctgtgcacagtacgtgcccggtgcccctcgatcgccctcgtcttataaatgcagaagttgacgcctggcgtacgtgacgggctgaccggcatgcatgcatcgcgtgtacacaggtgagggccggccgggagctagcaacgcactcgggacggcgcgctttaacgcgcggccaaattaagcagcgccgcggaacacacaggactcgaccgatcggcacgggcgggcgcgcgagctaggtgccgaggtggcgacgtcgcatgggcgcatgcaacgcccagcaggcacgcacgcgagagacccgaccgatcgacaaacgtgcgagcaattcgatccgtgggcccgaatcgggcagggggatctctcgcgatatcgatcgatagcgatcgagcgccgccggccacgcgaaacatgcacggtcgttgattagctacgagagcctacgactctagcaaggcataggcacacggaccactggcgccgcgccgggcgcgcgcgcggtgccgggtggccgatcggctagctataggctgctgcatgctggatcggaagggaataatcttaggtcgactccagatcgacgacttaggtaagcatatgcatgggaatgtccgtttgctgctggatggtccagtagatggtcctatagctcgcaacgtacgtactgccattaccagaaggaatggaatgcgatcgatcggtcgatttgccggaacactgcaattaatgctgcatttgagcaagttcaatagtatagccaactgttggctctaaatcatatatagccaatttaatagcccattcatataatagttatctataaaaatatacacattattaatacctagtcttacctctcatacactcataatgtattagagttcgtgttgcagccgacttcaaatctgtagcccgatttcttctctctcttctcttttcttctcgatatgtgattatagctggcttatagcctgctattgtacctgctcttatgctcttgcgacttgcgaggccggtttttggttgctattgacttgatttttagtctttaatctattttttttccgtttgaagaaaaaaaataaaagcattatttatcctttttattacatagaagatgcacacacatctcaacacacgcgttcaaag

SEQ ID NO: 22209 - DNA, 1205 bp, Oryza sativa
ctgcaccccgttgctaatcatgacaaacttctcccaggtttgctgttattatgttggctaaactatcttatgtgttcctcacagtatttaatcacacccttaacacatttcaggatggagccatttcgccagtttactatagctgtgggtaatcttgatccaaagaaagttaaatattcaggtgaggcaatctgtgattcttattgtttgaattaaacactctgtttcagagtttaactaagtaagtttgcagacaccctgcacaaattctggaagaaagaacatgactggggatggaaaaaatttatggagttgtcaaaaatccaagatggtttccttgttgatgatgttcttgaaatcattgctcaagttcaagttatcaggtaggcagtttaccaattttcaggattagcacctaaaagagtaaaatttgtttgcagttctatatgattgaaataaattgcatatctatggccttatatgtaaagcattccacagatatgcttttagatatgtttttcctatgtccctgaaacacgaaagatcacttcatttaattgttcctacgatgcttttgtgctaagatgattttgttgggggcatttatgctctccataattcaagttttactcttcatgtgcagtttcgacttattgaaatcttaactgtaccctgttgtgagctgtataaacctttcttttgtttttattgcatgttgcaacatgttatactgcgatttattcaaagatctctctttgttaatgcctctattttctctaattatttaagtcctagcttctatgtttaatttgtcaatgctcaactatggtgtgctcagaaatttggttatatacttataaattgattgctggacattcagtaactgttctcttctgcttttcaatactggagggagaaagtggatcgcccatttcgttgcctcgatcgcccttatcgacgagaattactccgtgtctatatgaccaatatagagcaaatttaccgacgctttgttgaagagcgcagaagtaaactttgcaagctcattgaggacaaaatgagatggtccaggttatacaattaaagttatcaacatcctgttatcctttcataatgattaagtatctgtgcgcgctcgcgtgtgtgtgtttttaaaaaagttaatactaacacatgcatatctttgtttgtactggggtgcagga

SEQ ID NO: 22210 - DNA, 597 bp, Oryza sativa
tgcacccctgttcctccttcagtcatcttcgtcatcaccccgcatcgccatcaacctcaactcgtggttgcaagaggatggatcgtccatcgtcggcactccggttcctcaacggcggctaccgctcgcgacctgcaagacacacagaatgagagaagagagcagttagggaccggagagaagtagaaaaccaagagaggagagaagagcagagataggtgtgtacggtgtacctgcgcatccggagcaccggagttgccgttgatgatagagatcgacggatctacgagaagaagatagcagagactgggtttggggagtgatgtgacaaagagctcacggagaaacggtgagcgggcgatagtggcaaaaaaaatgaaaaagaaagaggaaatcgagagcacggccaacgatccaaagactggagaggcggagatgagacaaggtcacggatccggcgaggcagcgaccctcggtggtagatccggcaaggcgttcatcagagacggcgacggagagggatggagagatggaggcgtggtcgcgtggaggtggaggcgtggatcgacggaggcggaagcggaggcggagcggtca

SEQ ID NO: 22211 - DNA, 562 bp, Oryza sativa
ggcgacggcgggcatgtccctgagccagtggtcgagcggcttgccgatggagtagacgacgaagccgatgcggcggagcttgtccgggtcgacgacgttgcggccgtcgaagaggaaggccggcttgtgcatggcgtcgtacatccgctggtagtcgagccggcggaactcgtcccactcggtgaggatgcagacggcgtgcgcgccgcgcgccgcctcgtaggcgtcccacgacacggcgacgtgcttcgccgacgacgggctcatcggctgcaggtggcgcgggtggtcccagtcgaacttgttcatcactaggtcgcgctgcacctgctcctccgtcacctgcgggtcgtagatgctgaccaccatcttgtcgccgacgagccccttgcagacgtcgatcgccggcgtctccctcgtgtcgccggtgtccttcttgaacgcgaagcccagcacggacaccttcttgccggccaccgtgttgaacatggaggacaccacccggttcacgaagcggctctttttgtagtcgttgatccggatcacctggtgccagtagttg

SEQ ID NO: 22212 - DNA, 6330 bp, Oryza sativa
  unsure (1)..(6330): unsure at all n locations
ggtataggacatgccttacaactcagaagggcaaatatgtattttttattttagacttaacggtcaacacacagtcaactgacggtagtggcatgagagggtgcgcaatttanagctaatgacatataagggaagagccaattttcagtggcatataagggatcaaatcaattttcagtgacatataaggaattctctcttaaatcttaggagtaaaaattttacttaaagtgtcgtggataaatctcagacgctcaatctttttgtgctacggtagtttttaggtttgccgtgaagccgtggacgcaggtggggggagacggtagcggaagcatcaatctttttcctacctcaatgcaaattataactatgatgagtagtaatattttatatttatattttttttaaggcacataatgaaaaacctccgatttattatttaatcaacaccaactgcaagtctgcaacagccgtgaacgacagcaagacagggaaaacaagttattgtgtgatcactgaaccctgtgaaaatcattttattttagcatccatccatcataggagtgcaacaaattaacgctaagttccatgctcagttgcagtactgaaataatgaatgaaagaaagaaagaaagaaagaaggaagggatgccaagacatcgttcagttataagataagaacagagcaagaattactaagacactgttcagttacatttcaggccataagtttctcagaccaaactgctctttatttcatctgaacaataaaaatggactgtgtggagtgatgcatgtggcttgcactagttaagacaaatttgtggtgccatcaaccgaatcccaagatagaagaaagtaaagtatcatattagcaagtaacctgttaaccataaagaatcagaggaatctgcagtcaccaaagaaagaaaataacctgcaatttctgcaaaattgagagctctgcataggaaatttagagcggcataaccaaacttggtaagaaaaaaaaaacaagaagtgcaaattcatggaaaataatagaaataaatcaacattcagacaattcgtaggctgcattcagcacagaacctcaacgttcaaactttcttcgggaaattatcaggaagccccgacagaaattgaataaccaaacatcaagttccatgaagataatccacgaaacgcaaggcaaacatacggccccatcgatctatcaataaaggtatgcttccatcaaacaaaatgtaagcgcacagtcatgcacatcaatccccacattatatatcagttgcaacacagggatcaataaactacttcaagtctcgaatcatccaaagggaaacagaaaggtatcaaatggtgtaacttggattgatattatctcagcactacaataccacacacagcaagagggggaaacgaacacaatgcagaggaagcacatgttagctaagatcacaaaataacttcctcttttgatagagcaatgtttccgaaccttgccgtcttctccgtctcaactctcaagggagacgccaaccttggggggagtagttcgatgcgccttgtgccgggaagcagcgctccaccatggggccaggtgattccgtccatttcccgcagtcgctgcagctgtactgcggttgctgcagcatcaccgggtcctggatgaacccatcatcgaagaagtagatgccgcccgcgatgccggcggggtagtgatccgcctcgtaggatctagagcagccacgcccgacgaacagcatccggccacccagtgagggcaccctctgccaaatgtactgccgacaccgagcccgctggcttggcaccatccggaacaccttgaacgccgacgtcggctgtccaggatgaggggagcacctcacgaccatgagcaggtcttcgcgggacttcactaggtagcgcgccttgacgtgctgctggttgtagccgcgcctgttcgatgggaagcagcgaaactcccagtcgacttgaggcatagccgggaccggacaccaatagtggaactccggtttggccacaatgatgtgctccccttgggtgaggaaatggaaggctccatggtggtgcacgacgtccaccgcatcccattccctgcgcgggttcagtgggccgctgaacaagccagggaccaccggatcgaagatgcgccagaacgcaatcattggccggccttgtgggacgggaccgacgttgatgattccggcgaagacgcatcgtccgtcgacgtctggatagaatgagagggcggcggcgacgatggacaacggcaacagcgctccggtgtggtgctcgatgtgttggagttaatttatttctagaacataccagcctactctctaaccctctctactactcgtgaaactaaagtcaaggttgaagtccttgctctgtaaattttctagaacagtgtagtgtgtagacatgcatgatgtgattttacagtagtactagtaccagtgaagtttgacaatgtagtagtactacaagtctctagctaggtcctgaagcttcctacatgtcggtttatcaagcctataaatagaaagccagtgcatgtgtatagactgatgatggtgtgctgcccaacgtacaagcaagtgtactgttcagccctcaagcaagcaagtaaagaaaccagttaaaactagcacaagcttctctgctcctcttctctgatcccctgcttaggaaatatttagcaccaacacgatgaacgcgtcggggaggttgatgtgacgatcgaattggtaggtatcgaggaggaggtggtgttggggaccttgaggtggagcagtggagaggaagacccagccatcgtcgtacgcgccgatgtagcgagcgtaccgcacccaatccgggacgacggctgggtgggtggcgtagtcgctcaggatgcaggagacggcaggcccctcagcgagcggtaggatgagaaacggcagagcgggagaccggggcaggggagcgagctgctcgagggactcgcgccatgatcggcagacggcggcgaagtgcacgcgatcgaacttgcacgggaggcgggtggcgatctcgcgcacgagggcgccgatgaggttcgcccatggcggagaggcagccatgggagacgggaggggaggggaggggaagggaaggggaggttggcgactgggtggcgaatggcacgagatgctcacgcgacggtgtctgttacaagtttgattcccttttttttttgcttctggaagccacggaacggaaggggagggtgttaatactgcaaggaagagaggatggggaggagcactgctccctccgtcccataatattacaacctaagattgaatgagatgtttcatagtacaataaatctgaacatgcatctgtccaaattcacatctatctagattcgttgtaccatgaaacgtaccatccagtcctaggttttaatattattggacagagggagtatacttcaagcaagggaggatggcggatggctcgtttggcccacttgaacatattgttcatgatgggcttgtgccgcaagaaagataaggaaagttcgcttggcacttgagcccattgttcacttgttctcgatgggtttgtagcggcccattcggttgggcctattagattattggatctaagttcattttgactccctcaaatatagctccaatctgattcgtgtcccccaaccgtaatatcagatatctagacacccccccctcaaactattaaaacccatacaatttgactccctcaatagttttagagtgtatttttgctgacatggcatattgacttagtccactatgttgacgtgtcagcccagtcacaaaaatacaggtgaagcccacatgtaagtgactaggaaaaatatataaaaagtgggacccacttttcatccctcttctccttctctatcttttccccaacaagcagcagagcaagaagcggtggcagtggtggtgtgggcagaggcaacagaaacagtagtgacgttcctgtgggtgctatgcgtgtcgacactgcgggcctcaatagcggtagtcacctcctacctcaacatctaggaagggatccactacgctctctttgtcaccgtttgccacctcttcgtgctcctcttcgcctttaacttcctttgtgacgtcctcaacggcgccagcttcaaccttaccgccatcgccaccttccacgccaccaacctcgattggcacttgggcagggtgcaagggcagtgggtggagcgctggcaatctcagagctgatgccaacgcagtacaagcacatactcgagggccatcctcaaggtggatctccacactggtggtgccgttgagttggtgctcaccgcaatcgagctcgtccatggcgtcgccgcgacggtggggagaggaagggccgccgctggatcgaactgcaagagccaccaaaagcagccccaccgtattctccaccgccgctctgcatccccgctcgaccaaccactccgcgacaaacgctagggcgaaaggggccagggtggagagagaggagagccctacttgtcgtcccgccgctgccgcttcccatcgtcatcctggcgccctgctactatcgagcctagaagaagataggcagagagggaaggagagagagattagtacatagagggtgatttgatgataggtgggccccaccttttttaaaaaaatatttgatgactagggtgccacgtgaatgccacgtcagcacaaaggagtaaaattgcaacggttttgataatttgggggttgagatatccagtattgtggtttagggatacaaatcggattcggccaatagttaagagagttaagtggacttattcctagattgtacctagactaggcgtatgatgactgtacaagaagagctaaaacaactccaagtatgaagcccattctaaatttagaaagaactatctaaatcaaaacgaggtataatagcttttggttggaaaaaagacagacgagaaaatagcttttttttctctgtgtaattgtgtgttgctaaatagttatatagttacgtaaaagtattatattattctttataagtaatgaatttatttatttaataagaaattttaattatgttcttttaagtttagccatgtttacgatattcttttttaagataccgaaaggtgttcttcaaaaatttgattattatagatcacgtttcttttggcaagggaatgatcataagaaaaagtacaaactcattagatgggatatcatttgccaacccaaagaccagggaggattagggattcacaatctggaaattcaaaataaatgtgttttgagtaagtggttgtttataaattaataaatgaagaaggtgtttggcaagaattattgaagaggaagtatctttataataagtctataatgcaagttgataggaaataaggcgactctcatttttggtcaggtctcatgaaggtcaaaagtgatttcttaaatatggtttcctgaaatgtgaataatggggagcaagtaagattttgggaagataaatggctaggaaatttggcctttaaggataaatattcatctctatatgctattgtccgaaggaaaacctcttctattgctaatgtcatgggagctgttccgcttaatgtttcatttaggagagccttagttgggcagaaccttgcatatgggcatgaattgtgtgcttctaatgtgcatatccagttgaaccattcttctaactgttttagatggaattatcatcagaatggtcggttttctgttaggtcaatgtatctagctttaattaataatggttacatcgagaggaataagtgtatttggaagcttaagatgccacttaagattaagattaagatctttatgtggtacttgcttaaagatgttgtgttaactaaggacaatttggcaagacggaattggaatagtagtttaagatgtttgtatgaaaaatgagactattcaacatctttttatggactgtcattatgcaaagtttatatgaagagcagttcagttctcattttgttttaaccttcttactaacatatctcatatgtttgatgcttggctaatgggggttgacaagaaaatgagtaaactgatacttgtaggagcatctgtcatatgttgagctctgtggttgagtaggaatgatatggtttttgacaaatcaccatctatttcttataagcagataattttcagagcaacacattggctttggttttgggcacaattacaaaagtgtgaagcagatgaagagcatctgaaagttgcgtgtcgt

SEQ ID NO: 22213 - DNA, 3244 bp, Oryza sativa
tctctccctcttttcccctttttcctcccgccggcgtcatcctcctccctcctccctgtcgccgctttggccgcgaccgccgaacgctagccctctcctttgaccgccctaagtcggttcccaaaccgacattaccatcctataaacccaagcttccccctttcctttcctctcccattcgcctccacgccattgccgccgcctcccgtgctctgttcgccgtcgccgttcgtcgttgcgcgtgtcggaggagccggcacgagcaaggacgcggaaggggactccgagcgcgcccactccttcctcttccccggcccgaggccggagagattactcccgcgccgtcggcctctcgtcactgcgcccgcccgcacggtagtgcatctccccgttctccctcctcgctccatctcctccccttagactcgggtagtagcacgagtagcctccccgtagctagccggcgccgccccgaccgttgccgccgctcgccgtgtgctcgccgccgtcgccgcccgagctcggaagcgccgctcgtcgccggcctcgctcggcgcagctccgcccaatccaacgctagcatcggattcccgtagccgcgtagatgctctcgccgccgggaatcggcccctcgtgacctcgtcgccgtttcccccttctcccgccgccggttgccgccgccgcaattcgccgccgtcgggcatcctccggcgaatccgagcagttggctcgtctcccctcgtcctgtgcaaccacccggtgtgctcgctttcgcctgtatcgccgtggttcgctccgccgctcgccgctgtcgtccgccgtccgtttcggccggcgtcgtcgtctacctcccgccggcccgcgtggcagccacgtaggcgccacgtcggcgccagctcggccaaaaccgggtcgagtcgaccccggttagccgctccctccccatgcgcgcggtccaccgcgagccgtgaggctgcgcgtgggcccgccgcatccgcgtctccgcgaaccgcgcgcgtgcaccgcgtctctcccccatcctagcgccgcgccgcgtgctccctccgcacggtgagccgagccgctgacaagcgggtcccactcgggaccacgcgaggtgagcccggtccaccggctctctctctcctcccctcccgcgcgcgcgtgccttgggccgccttgggccggccggcccatttagctcggccgagccgccccttttctctcgggccgcgccctagccgtccgagggaagtgtaatttccctccctcttttcttttcttttcttttctttttcaaaaaggatttaattaaatccttttcctgtagaccaaaaatccaataatattagaaattcaatatcttcccaaccgtaaatccgtttgactccgttcaacttccaaaatccctcaaatcttaagatctatctaatggcatgcttagaggtcattaatagggctttattttcgccgtttgttgagttgtcccgttctgcgcgtagtttcggagcccgaagacccgcagtgcgaggatttcgaggatcaagctcaagatctcgagcaaggcaagccacctttgaacatttcgagcctatatttgaatttaatcatgttgcttgaaaaatattatgcattgataggatcgcacttaatctgtttgtcccgtctgcaaggcagattgtcggacctacctagtttgttgcatttgatccttcctttgttaattgttataccatgttcccttgtaaccacccagttgcgcctcgaaaatcgtgcactctgcacgagtatcgacgatcgccttcaaacttaaaatctgaaaaacttcttgggtaaaacttgggttttacaaaagacttggaaaacccgacacctgggtcggtgcttgcgaactaaatgaattttccaaaaccgcggaccggggaacgtaccgggtgtacggtttcccgctcttgcacttaaggaccgtttccttggaatttcatccaaacataagacaagtacgaccacatgggtggaatgggacacccctggctgagtaactagcttatcaggggagccttgatgccgagagacatgtggattcgccggggtggtgtcggggaggacccctgggtttcctggcacagtatggtctgggacctaatctgttgttggtctgggacccctctcgtcggcatatggtaaacctgtgtcggctttgaaaatgccttgtcatgaaagcttggaggtctcccgacgtggctgatccacacgggctgggtgatccgggttagtaatgtcgtgtgggtaaagtgtaccccctctgcagaggttaacaaactgttcgaacagccgtgcccacggtcatgggcggatgtgaggtgattcctagtgtagttttgtttgactactacttgtgaaattgctgttgtggaaaggggttcgatgtttaaaaaatctgcagctgatgggatcagctaggcccgggtggccatttgaaagttgttggcccgggtggccgtttgaaagttgttggccgggtgccaatcttgatcaattctaaagactgatacatttgcacatactccgaccggacgagacgcactgtctcatccatgttgtttgagaagcactcacttagttgctttcagaaaagagttcaaataaaatcaattgcaaaaacaacagcctttccttgaagcctgcattaaacacttatttcccatggcttgctgagtactcccgtactcacacttgctctatataaataatctcccccccagttgctgaagaagatgaagcggatcccgctgacgagaagttcttccaggagcaagccggctacgatgagttttagggtttcggcctagttcccaagtcgcgcctgtgttgtttggtccaagtcctggcttccgcttcccttttgtaatgcagttgtgagctcgggatctgtccacagcctgacttgattgtactcctactctataataaagagacctctgttgctgtgatattatgtcttcctgtgataccagcactgtttcctgggactggtatcgattaacaggttaatttggagcgtcacgggctagtttcggtcggtactagttcggggcgtgacaagttttcaactgtatgtgttcaggtgttcgattacatcagtgtttttgtcaaagctaattcaccttgctgttcatatctatccatccattataaaagatttgaaaatatttaacaagatataaatatgcgatatatcgct

SEQ ID NO: 22214 - DNA, 14570 bp, Oryza sativa
ctgcacgggtcgagtcgcacaacacctagtatccatcgtttacggctaggactactggggtcctgtccaagccaaagaacttacccccgaaaagtcctgacaaatgatgattgagacgagattccgcgtttttgaaccacgaaaggccaactttcataattaaacgctgtcactgtatggataactcttattgtgaaaagagctatttactctataatagataggtagagccaaagaatgtgaaccctttggaaggctgtgggcgatgagggattcgaacccccgacaccgtggttcgtagccacgtttcgactgtatataaattgcaattaaatttatagaattaaaagttaagagttgacaagatagattaaatataattatatttatggaatcaaaagttaaatagtgttgtacaataagtccaattagcatttccagcaacagcccctagccccctattgtaaagcctctaaaggtctaatgggggttgcccccatcttcagctacaaaccccatttcttaggctccatctctgtgtgtgtgtgttttagtacgcacattatatttatgtctagtttaacaccagaataattcaaacacgtagaattcaaccgtattcaaatttataattttgaataccataattcaaatttaaattcaaaattttcaacattgcaaaatgcataataaaattcaattttcacaatcacacacgtatgcaagttcacaagaattatatgatttttttaaaataacatatactacaaacatgaatggttcaatccggacaaccgactactagcgcgagacattgctagagttgctacgcatgaggtcaacgacctgcgacgtgtcagtgtggagatcacgtaggttgacgaacgacatcggacagggcaacgttggactatcctagcaagatggtgatcagataatagccggcggcacgacaaaagaaaagagggtagcaacacagtgagagcgcgagaacaacgggagaagcgcgcgctagggaattttcacacgcaccaaaaagaaaaagagatggggttgggtgtagagcctctaggattgagggctatggacagagatttcggtgcctttctattttaggggctttaatagcggtcctgccgtcctgctggatctcaatttttctcctttcaccccaaaaactatttaggggtttaattagtttaggggctctgctggagatgctgtctagtccgtgtaaatttgcacggcataatctgctagttgttcattatcctaaatatcaatcaaatgatatattttttttcagctaagcagatagggattgaggatgtgagcgagtgcccccacctttgtgcactagcttacggttatctgaagaagactgagggttatgaacaaaacctactcgcgttcttccataacaaaataaactcggacgctcttctcgtgctgttgattgaggagctagacaaatgtatactcggctacttctccttccattggaaatttgccactgaagtaatcacacaggtaggaaagatttactcatcccgtgttctgcattaccaatcaactgttagtccttgagatactctaaacactgaaatgttggagccacttaatttcttaggttctaacagcagagcagcctagaagaaagctcaaaaccatggtgttagaagccactaggtaaataatcatgctttattaatctggaatattttttgtaagaattaaccaggattgattctattgattttggtacaattatgatcaagaaagaatgaaatctggttcttaattgttttgtttcttccttttttggacaaaaagaaagatgaggtttgagagggtgtcaaggaagctgaaggtgacgaggctgttctccacgctggtggaggaactgaaggtcatcggggtcacctgcaacgacggccagctgcgcgacgccgacgccgacgtgatggtcccggcggctcaccgcgaccgcagcccggtcctgctcctgatgggcggtggcatgggcgccggcaagagcaccgtgctcaagcagatcatgaaggggtcagtccgttcgtccacttcgatcacggactcgagcaggcacgcgtgacgcggcgattgagctgaccaccaccgtggcgtacgtgcaaaatgcaggttgttctggtccggcgcggcggcgcacgccgtggtggtggaggcggacgcgttcaaggagtcggacgtcatctaccaggccatcagctcgcgcggccaccacaacgacatgctgcagacagccgagctggtatacgtaccacgcttgccctgaacctgctcaatcgtcagccggatcggtctgtgtgggtctggatgtgtctgacacgtacggtgtcgcgtgcgcaggtgcaccagtcgtcgatcgacgcggcggcgtcgctgctggtgacggcgctgaacgaggggcgggacgtgatcatggacggcacgctgtcgtgggagccgttcgtgctgcagacgatcgccatggcgcggtccgtgcaccggcagcggtaccggatgggcgtgggctacaaggtcgccgccgacggcaacgccaccgagcagtactgggagcccgtcgagggcgcccccgtgcccagcgggaggaggccctaccgaatcgagctcgtcggcatcatctgcgacgcctacctcgccgtcgtcagggggatcaggtaattaaccaaccaactacaattaacgtgttcacgcgcctgatcgagcctagctgacacgacacgatcgatcgatcgatctacccgtgcgttaggcgagccatcatatcggggcgagccgtgcgggtgagctcgcagctcaagtcgcacaagcggttcgccggctcgttccgcaagtactgcgacctcgtcgacagcgccagcctctacagcaccaacaccatcgccggcgcgaaggtattattcctaacccgttcaccgatcgattccccgtgtgatgataccgtgctgtgtgtttgagacgttgtacgcgtgcgtatatatgtgcgcgtgcagttgatcgggtggaaggacgtggggagcaggctgctggtggacgtggaggagatcgggctgctggacagggtgagcaggatcaacgaggaggccaacggcgtgcacgagctgtacccggacggccacccgacggacggcgccgggtcggtgtgggaggatctggtgtcgtcgccggccagggccgcgatacagcgggagctcagggaggccatcctcgatagcgaggcctgcttcccgtcgccgtaggctgcacagcagcaagaggctatgtaccgatgcagatttgttggttcgttcgttcacgttcgctcacgacacgatcgtactatacgtgtcgtggtgacgtagtaggtaggggtgatctctttgtttttccgtacaccaactctactgtttgatgatggtatcgacgttgactagtcgaccgatgccatccgtcggcgatggacttttcgggaatcgtgacatctgtcacgtgctgatgcgctgatggggccatcttacacaggcagccctcgacgcttagggccatcttccttgaagaggttagaaacgtattaggcctgaaaaggggcccgagtacagcgctgcaagagaaaagaaggtagcagcaacagcatttcggccctgtttcgctatttgaaatgcatgattttttttattttatttttgtgaggattgaaatgcaggattttttttactttggtcaaacattgacatcatactgtatctcacacgttttctttgagtaattgtctatatgattcacatattctagaactgcactatagtaaaaggggtattttttaagagaaacagtaaaggagtaataagaaggtcctttagaaatttatggattgtccactggaggttttcactgatcttttctggaactagccaggttcccttggcttgtaattctgcatccaatgtttttggagagcacgcaaagtagtgttgatctctgtgaaaaccagtttcttttgacatccttaagaggaatgcgacaaatgctaactcaatgttcggttgcaaaaccaaaagaaagcaagaaatggtaagaaaatgttcagttacaacggcctattcagaatgcgagtcttaagggcctcaaacaaaattgctctctatttcacctgaaatacaaaaatggactgtgacctgatgcatgttgcaagcacagttcagaatgtttacatacttacttacctcagacgaaaatatgataccaacaaaatgaattaatcatgaacgtaatatactatgcccaacttagcaagcatcatgtcttgtgcattgcactaccaggtaacctcttaaccataaagaatcaacagaatctgcaggtaccaaagagcaaaaagacaacatgcaattctgaattctgcagagttgagttttcaataggaagttcagagagggataaccaagcttgaccgaaaatttaatcaatccatcatggtaaagaatacaaaagaaatcaagattcaaccattttgggttctgcattcagtttagaacctcaatgttcacgcttcattcagtaacttttcaagagaaccagagaagccctgacagagctacataaccaaatatcagaaaccataaaattccaattcgttcaaggcaaatgtgcacaatcatctatcaattaaaacgttgtgcactcgtcaaagaaaatataagcacaagtgcacaaccatatgcacatgtccacactgaatatcagttgcagcacaggatatagatatactaatgactgaatcatccaattaagtgggaaacacacattagcaaacggtgcactgcaattgtagtacacattgatcatagctgcaatagccaagagatttatactagaaaaaggtgttctgcttctgctaatggttggagactaatcagaaactacaagctcagcactacaatactatccaaacttccaaactcagcaaaaagaaacaaagacaatggagacgaagcacacgtcggggatcacaaacaagcttacccgttgagcaaccaaacttgagaggagtagttcgatgggtcttgctccgggaagcagagctccacctggagtgcaggttttcccgtccatttcccgcagtctctgcaggggtaaagcgccggtgcgccgccgccctgcccgggaatccgatgatcgaagaagtagacgccgccctcgaagccggggtactgatccgtgttgtacgatctggagcagccgcgcccgacgaacagcatcctgccctccagcgagggcagctccctccagatgtatcgaaccacgtcgccgtcggatctggagcagggatccccgacgaacagcatcgtccggccatccagtaagggcgcgtcgccgtcgccgtcgtcgtcttcctcgggctgtgccatccggaacaccttgaacgccgacgtggactctccgggacgaggagagcacctcacgaccatgagcagctctccgctggactccacgaggtagcgcgccacgacgtgctgcccgtcgtagccgcgcccctgcgacgagaagcagcgatactcccattgcacttgaggcggcgcgttcgcttcgtcatcgaagcccggattgcccacgacgatgtgctgcccgttggtgaggaaatggaaggctccattgtggcgcacgacgtccaccgcatcccagcacgcgtcctccatgaagaagcagccgatgaccaccttatcgtcaattcgccagaacgcaatcttctgccggtggtggcccggtacgggagcacaattgttgacgaatccggcgaccacgcatccatccataaatgggtccgacgagagggtggcggcgttgatgaacagcgggtcgcgcgggcgcagccgcttctgcctaggccgcaatacaggctcttcgcggtccaactggatccagacggggagaacgaaggtattcggggtttggtggagattggtgaggaaataatctcgataaccctgagctcgaggatgagcagtggagacgaaggcccagccgccgtcgtacgagccgaagtagcaagcgtggcgaatccactccgggacgaagaaggggtgggtggcgcagtcgctcaggacgcaggagaaggccagctgctcggcgagcggcaggatgagatacggcagcttggggggcgggagcaggggcgggagccgctcgaggtgctcgcgccatggtcggcagacgccggcgaggtgcacgcggttgtacacgcaggggaggcggttggcgatctcgcgcacgacggcgtcggtgaggtccgcccatggcgggaagtcggccatgagagacggagacggtgggggagggaagaggaggggaggttgcggactggggtggagaagaagaagaccagagggatgggaaggtttgattcctcttgtagcttcgggaggagggagctgtgtctgtcttcggagtggattaagggttggtttggtttgttgcctaaataggtcttactaaattttgtcagtgtcaaattttggtaaggtaaagttgtgtttggattgaagccaaaatagcctaagttcactattgaaatgacctatttttttaggcatgtcaaatttggcttcaaaccaaatagacactaaacactattaaaattgtcaaatattgataagcctaatttagacctcaaaccaaaccagccctaaattactttttatactgcaatgaaatgggccggggaagctagggctgtctggacccacccactagggctcgtgtgggcccgtactgcccataattcaagaaacttaacaaacccattcattttcatctcgaatcaaattaaaagagactatgtcgtcatatttttcacagcatgtactgtacctaaattacatgtgtaattctaatgtaagtctcataattatatgtaggtttataaattgcgtatataattttagtgtatttacaacttaaataggagaattactaatactgattaattaacaaataacataaataagggaagagacaaatcagaagagaggagcgagggatatctctgtccatgccggccgtgatatacggatgtgagtcacccacgacgcatgcaaagcgcatcctgcaattcggactatccgactgaaatcgaaccaaaatgtggcgacagaaatttagcgatatctaattaaaaaaatgcatattacacattttctcgattccaataacttatcgaataggcagtctctgcctctctggtcatcaggctgccgtgaggggtaggggcgggcctacttcaattcaagctgaatacccaagatcttttttaagaaaaaaaaatatagtatgtactatgtatatgtgtgtgaagaaaatgaaaaaaaaatgatgtattcagttcatcttcttcactgcttgggcctgcttgccgcctccctgctttcctggcccaactcgatggcctaaacaacccaaaactagctggcagcagtgttcactcaccatcgtagatggccttgcctgcctgtgtcacatcgagtagctcttgaaaattttccaatgccacacgccgcacccctagacgcaactgcgatgcacgatggaggagtggagcacgggacgtcgccacattttctttgagtaatgtctatatgatccacatattctagaactgcactatagtaacaggggtattttttaagagaaacagtaaaggagtaataagaaggtccttaagaatcactgtaattctgcatccaaatgttatggagaacacgcaaaggagtgtcggtctctgtcaaaatcagtttcgtttaacatcctttagaggaatgcaacaaatgctaactcaatgttcggttgcaaaatcaaaagaaagaaagaagtggtaagacaagaacagagcaagaaatgctaagacaatatttgttggaattaatagatgggctttagcccactcaaagattaattctttgagtaatcacaaaagcccaactcataggatagcatgtatggggagtttagtaccaccttacttattctaggagaggaggacctccttaaaagggaggatgccctcctagccacttgaatcatgtgtggtggaaagaagagaggaaacacgcgtgtgcacgacgatgccagcctccttttgcagggagacctatctctatataaactgagccaacgccttcacgcaacacacataaaccagggcgccctgatcatgcacgacgatgtagcctccttttgcggggcgacctatctctatataaaccgatgtagcctccttttgcggggcgacctatctctatataaaccgagccatcgccttcacgcaacacacataaaccagggcgacgatgctagcctccttttgcagggcgacctatctctatataaaccgagccaccgccttcacgccgtcgctcgtacactactccatcctctccggaacctctaccttcgacgtcctgcactaggtttttgggaagcactttgcaccaggtttttaggaaacactttgcgcgactgctccctgttcgtcctgcaccgggaaaggcggcaataaggtttttgggaagcgctttgcgcgactactccctgctcgtccgcgacggctcgtcttcctctccgctcgcgtgctacgaggcggcaataaggtttttgggaagcgctttgcgcaactaccccatgttcgtccgtgactgctcgtcttcctctccgctcgcatgctgtgcggcggcaataaggtttttgggaagcgctttgcgcgactgctctctgttcgtccgcgacggcccatcttcctctccgctcgcgtgctgcgcgccttcgtcgacgcccgcaaccacgagtagttcctgctgagcaaccggtctttccgtaacctcggtacgtgttcgacatgttgcgcatatttgatctgttcatgttttactgcttagtttacacgtgtagatcctataatgcatttatgctagtttacatctgcaatatcatgatttatttatggaataaattaaatcattatgtgcttataatttcaacaatattcagttacaaggtctattcagaatgccataagggcctcaaacaaaattgctcgctatttcaatctgaacaacaaaaatggactgtgacctgatgcatgttgcacgcacagttcagatgagaaattattccggcatcatggttcatgagaatgtttagctactacttacctcggactaaaatacgataccaacaaaatgaacaggttaaacatgagccctaaaacagatgagggtaagataccatgccaacttaattagcaagcattgcgtctgtgtatgacaactttttgagaggtgtcttgtgtattacatatcaggtaacctgctaaccataaagaatcagcaggttccaaagaggaaaaatatagcctgcaattctgcagaattgatttgtcaataggaaatttgactaagccagcagaatctgcaggcaccagagaggcataacaaagcttgactgaaatttgataaatccatcatggtaaagaatacaaaataaatcaagatccaaccattctgggttcttcattcagtttataacctcgatattcatacttcattcagtggcttttcaagaaaagccctgacagagctacataaccaaatatcagaatccatagaaatccaattcgtgcaaggcaaaggtacaacaccatctatcagtcaaaacgatgtgcacttcacaaagaaaatataagcacaaccatacgcacatgtccgcactgaaaatcagttgcaacaggaatatactaatgattgaatcatgcaattaagtgggaagcagaaattatcaaacggtgtattgatcatagctgcaatagcaaagagatttctactagaaaaaggtgttctgcttcttctaacagttggagactgatcagaaactacaatctcagcactacaataccatccaaacttccaaactcagcaaaaagaaacaaagacaatgcagacgaagcacctgttagacagatcaaaaactagcttacccgttgagcaaccaaacttgagaggtgtagttcgatgggtcttgctccgggaagaagcggtccacctggagtgcaggttttcccgtccatttcccgcagtcgctgcaggggtactgcgccggcgcgtcgccgagctgcccggcgatccgatgatcgaagaagtagatgccgccctcgaagccagggtactgatccgcgtcgtaggatctggagcagccgcgcccgacgaacagcatccggccttccagcgagggcagctccctccagatgtaccgaaccacatcgccgtcagatctggagcagggacgcccgacgaacagcatcgtccggccatccagtgagggtgcgtcgtcgtcttcctcgggttgtgccattcggaacaccttgaacgctgacgtgaactctccaggacgaggagagcacctcacgaccatgagcagttctccgctggactccacgaggtagcgcgccacgacgtgctgcccgtcgtagccgcgcccctgcgacgagaagcagcgatactcccattgcacttggggcggcgcacccgcttcagcgaagaccggattgcccacgatgatgtcctcccccttggtgaggaaatggaaggctccattgtggcgcacgacgtccaccgcatcccagcacgcttcacccatgtagaagtagccgacgaccaccctatcttcaatttgccagaacgcaatcttctggcggcggtagccgggtatgggagcttgatcgttgatgagtccggcgaccacgcatccatccataaatgggtccgacgagagggtggcggtgtagatgaccaaccgatgcagcagcggcttctcctcaggcgccaattcaagcgcttcgcgttccaactggatcctgttggggagattgaaggtgcccgaggtgccggccagattggcgaggaagtacactcgattagcttgaggatgaagagtggagaggaaggcccagccgccgtcgtacgagccgaagtagcaagcgtggcgaatccgctccgggacgaagaaggggtgggtggcgccgccgctcaggacgcaggagaaggccggctgctcggcgagcggcaggatgagatacggcagcttgggaggcgggtgcaggggcgggagccgctcgagggactcgcgccatggtcggcagacgccggcgaggtgcacgcggtcgtacacgcaggggaggcggttggcgatctcgcgcacgacggcgtcggcgaggtccgcccatggcgggaaatcggccatgagagacggtgggggaggggagaggaggggaggttgagaagaagacccttgtgctggtttgattcctcttggcttctggaagcttcggaaggagggagctgcgtcttacggagtggagtactttttatactgcaaggaaatgggacggggaaggtagggccgtctgggcccacccactagggctcgtgtgggcccatattgccgataattcaaaaaacaaagaccatttttcatctcaaatcaaattacaacgattatacatttgctcgattcctataactaatccaataataattcaagaaacatatggctcatccgaagttaagaacatcctacgtttatgcgagtgattatgacaacttatggcattgactacagggctccacaacggtcaacttaactctagcgggaactttatcctcgatgtatcttccgatagccacaagcgctgtacgggcttccctcaaaatactatgcgcatggttctgcaccgttcaaatctttcgtcagaacacctaaaatcatacggatacagggtgtccaaagtaagacactcgagcgacaccgagttcttgaggatataacaagttagctcaaccaagctcttagcagagctaaaccctgtgatctccacattcttgaggtggcaatggtggtcttcagccatctgcctcaaatgtgactttgaggaatgtcctagaattgattcatgcttcataggatcatttgttacctgaagatgaaaacaaagtatagtcaattgacctgacacagtgaccagataactttgcaggataggatgaacagagctttacatccaagttcaaagtctccaaggaaggagacgcatcaaggaaagaaaccagagaaaaatagtcataggacggcgaaaaggttccggagctcaaacaaatggtcaggtgcttgaggtagaggaatttggtaggcagcattggtgtattaaccacctgcgcaaccaatatgccacgtctcagatcaattattcaaaagccatgtgatacacatacattgctaatcgacaacacaaagttttagagtatacctcatcataggagcttaaggcaagagtatcaatatttggcatactggatggaagctcagaacgagcataacagacaacatttggatggcgcatgcttaagttcttcatttgcaatgtttccccaagcaacagttccgcctttccgctaaggtctaaagtggagagatttggaactttgctctctatcaatttcagcctcacgcatccatgaaccctcaggcagctgaaccgctgcagcacacaaggtatccttaggcaaattatatgatcgcagtgaatgagtgccaactgctctaaagcaagagagtttgaaagaaggcactctaactcatcccctgtaatacgcacgtattgcagatgcaactttgttagtcttctgaaggggccaagttcagttgcgggacggaagatacaaaagccaagttcaagataccggattgagttccgaaccccatcagataaaagtgcgcagggaaagttgtacgttatctccagtctacataccataagggtgagttcttcaatgcctggtgtaacagcaacttgaagccaattgtcaagattgtgatatgcggtaccagataattcaagcttcaatgtcttcacaccaatgcctgagtggtttcccagaatagagtcaattctgtggctgatatcccctccatacgtaaatgctttgggtctaaacacatacttattgaaggtgaggttgggatagcacctccaggaacatagaaaggaatgagacaggcaagcagtgcgagcagcatcacgcattggcattagggaatgtatatgacgccagatatcctgcatggacaaacataggaagagaggttcaaatttgggattgtaaagccaaatggttacttaaaccagataaagaagaacagtgcgacgacatggagtactagctctccacatgatgcatgcaaggtgcgctgccttgcttaggtacatagtgcagtggaatgtaaccttcgtaggtaaattgagccttgcatagaaaagtttatcactaacagtgttatcacttatcagtgattctctgaaagaaaagacagttactggtgggtagcagtgattaactactatgaaatatactcaattggcattagagcactgagtagacaactatattagttgctgtgcaattgtgtcaaacaaaaatgcacggagatgatgttttattgtgcaacagaaaaaaaatgcaatttctgcatagggtagtacacctgagagcctaaccaaactggagcccaataaatagaaactagcagttttgagttttgacagttacagagtaagatagacataaacctcattaaatacatgaaagagataatagatcagaaaggaccatacacatcatgaaattcgctattcaacccatcagatagcatcatagcaatatggtaaaatcaatgccccatagtgaattgtgaagccagtgacaatattgatcagttctcctttccattttttttatagaaaatgaaaatgtcaatcaatgtccccaggaaattggtgacagcacaacattttcaccagggtatgacaaaagcatcccgcttatgttaatctaccaacagtggactttttttttccgattcttctggaatgaacacacatacctgacatggttaggtgtgctaatacttggcatacctgcttgtatttggagatcacaagttacagttgctagacttttgaggggaaataggacttaatgatgcttgccaggccttctggccattggccaatctaaaacacaaccatctcataagtttaccttcttgggaagctaaagacaatgttcaatgttataaaagtgcaccagtacatagggggctgatgatgatttaacaaactcttggtgtaaagacatgcttaatatgtatctatggggtaagggtgattgagatctcaatatgcttaagaataaacactggagtatattactgtttttaatccggaggattaaagattccagtgaagctgctactgtaactgttctctgcaaaggttggtaataccagtcgcatatctccagaatttgtgagatggacagctcacaaggtgggaaatcttatattaagagtttgcttaacagtaaaattatatatctttattacacatttaggggaaaccgtattactcaacagtcatatgcttcattattagtgaatacacactcaag

SEQ ID NO: 22215 - DNA, 10644 bp, Oryza sativa
ctgcagccctaatttaagagaaattaagataactcttgggagtctactcatcaagataacatgtgacctaagactcatggcagacaggaaagctaccaagttaggagcgtaggggctgtagcctttagcaattggagatccgttccctgcttacagatattatttagctagcatagtccaaagaacttgtttgttaaaggccattatggtgaaaatgtgcttgcaacataagccccccatcttcaaaatttatgtggcatacctctggaaggtctgggattgagcaacccttttgtttattcgctgaagcagccgattcatctgcaacccaacaaggtaacaaccatggttatgacagcccaatcccagacatgaatatattttcttaagataatggataagaattcggcctctatatctgaacatgaaccccagacatgaatagatgaaaggaaaaaaaaaaagaaacgaactcagcaaaggcaatgacatcttgaatctcctcccaatctctcttttttgttcaaggaatcaacgtatttgttcccacatgaaatttctcattgcttactcatgtgaaagagaaaattttggttcaacagggggaagcaacgacactagctaattacctctacagctctactgtgaacaagcgtctagtttttttttttagataataagcgcctagttagcaaaacaaaattatttttttctttaaagaaagagctgcatatatgaggttaaaaatactagtagaacacaagaagatgatttccggaacatatgcacgtaacagaagagagggtgctaagaggagttggtaagaggagaggagaggaggcttactccgggcaaggattttccggcgacgccgctgctggttacgctggatggacaagagccgctgcaaccccatggtaggagtagacgacgcttcttccttcttcatatcactgctcctcttccacctttatctatctgcagccttcccttcttcaagtgcgcctcgcggcgggatagcacgcgggcaatcgggttgggggtgcgcggggaggagatgagggggagccgtgcccgtgacgaggtgggatggagggaggcgcgcggcgacggtgaggtaacgccgccgagcagtgttgatggcacgatagtctaatcggaggatgccgatttgatgagcataggaactgttagccctctctgtatttgatttggtttggaactcaattcagactacagtacgattactagaccagtcttgggaaatttaactatttgtcacttttacgtttcacaattaaccaaataccctccccttcgttttgtttaccagccacaaggtagaggatacgcctccgctacagccgcgcacgacaacaagacatggaaaacaagttattatatgatctctgaaccctgtgaaaatcagtttattttagcatccatccatcataggattgcaacaaattaatgctagctcaatgctcagttgcaatactgaaagaaataaagatatgctaaggcgttgttcagttataacatataacaacagagcaagaagtgctaagacacacaattgctaggaaatgtcggcaccaactacaattccttgatttggaaatcttggtcacctgcgaaatgcaaattttatgcgtggcttatgatacaaatagagtttggacatccgaccggctaactgcaagagaatggcaaaacaatggattgtgccccttatgtcgggagacgaacgagacggtatgtcacctggtcgcctcttgtagatacaccatgagtatttggaggctaacggccagctgagttgcctatcagcaattggatctgaaccattgggacccatgccaaagcgttcaagagtggtgggacatgctaaacaacaaaaaggaagtgcccaagaaagaactgtgatccttgaccctactcattgtgtgggaaatttggaaggaaatgaatcaacggatcttcaagcacaaggaaacaacggctcccaatcttatggcgaaaataaaggaagagacaagaacctggatcatggcaggtgcaaggcggcttggagaattcctcccttcgtagcaatagcctctttgtttttgtgtacagtttcccttttatccataggggctgtattttttttacctctatatccaatgaaatagcacaatctcgtgctgattctttaaaaaaaataaaagaagaagtgctaagacaatgttcagttccaacttacaatggtctattcaggatattaactgtgtgggggtgatgcatgttgcttgcactaattcagaaaaaaatatggtactgccagcaaaatgaacatgatcaggatattagcaggtaacctgctaacagtaaaaaatcagaagaatctgcaggcaccaaatagagaaaacaatctgcaatttctgcagaattgagttctgcataggaagtttagaatggtataaccaaaacttggtaaaaaaaatgtgggcaattaatggcaaagaatataaaataaatcaacattcagacaatttgaaggctgcattcagcacagaacctcaatgttcagactttcttcaggaacttctcagaaacccctttatatactgatagaattgcataaccaaacatcgaattccatgaaaatataatccacttaacgcaaagaaagaaatacaccgccatctgtctatcagtaaaggtgtgctcccgtctaagcaaaatgtaagcacacagtcataagcacatctccacactgaatatcagtggcaacacaaggatagatatgacgggttatcaagtatcaactatttccaagtcttgaatcatccaaaatggaaacagaaatgtagcaaacgatgcacttggatcgaggtacacattgatcatatcagcaagagatttgtactagaacaggagttctgccttctgctaattaacagctaatatctcagcactacaataccatcacactcaccaaaacagcaaagagggggaaacaaacacaatgcagaggaagcacacgttagctaagatcataaactaacttgacctgctgatcgaccaatgttcccaaacgaaacggccaaaccttgctgtgtggtccgccgactcaactctcaagggagacaccaaccttggggggtgtagcctatcgccgggaagcagcgctccaccatggaggcaggtgttctcgtccatttctcacagtcgttgaaggagaatagcgtcgcgacgcccagcggcagcatcgccggatcctggatgtcatcatcgaagaagtagacgccgccctcgaagccagggtactgatccgcgtcgtaggatctggagcagccgcgcccgacgaacagcatccggccttccagcgagggcagctccagccagacgtagtgctgatacgggaacacgtcgtccggcccggcttgcgccatccggaacaccctgaactccgacgtcggctgtccaggataaggggagcacctcaccaccatgagcaggtcttcgcgggactccacgaggtagcgcgcctcgacgtactgatcgtattctcgcccaatgtgttcgaaggcgcgcatctcccagtcgaccggatccccaccatggaagtccggacctgccacgatgatgtgctccccttgggtgaggaaatggaaggctccatcgtagaacacgacgtcctccacatcccatggtggattatgtgtctggaacaagtgagggatcacccgatcggaggcgcgccagaacccaatcgtccgctggccccgggggacggggtcaacgctgatgatgccggcgaagacgcatccgtcgacgtctggttgggacgagagggtggcggcgacgatggagaacggcaactgccattcctgcccgggcgctccgtcctgctgcgcgatgaactcggtggggaggtcgatgtgagggcgggagtcttaggtgtcgaggaggcggtgctctcgaggacctcgaggtggagcaatggagaggatgaccagccatcgtcgtacgcgccgatgtagcgtgcgtcgtgcggccactccgggaggacggcggggtggatggcgcagttgctcaggacgaaggagacggcaggccgctcagcaagcggtaggatgagaaccggaagagcgggaggcaggggcacgggcgcttgctgctcgagggacgcgcgccatgatcggcagacggcggcgaagtgcacgcggtcgaactcgcacgggaggtggttggcgatctcgcccacgacggcgctgacgaggttcgcccatggcggagaggcagccatgggagacgggaggggaaggggaggttggggtggacttggtggcaaattgcacgggacgctcaccgctgcggtgtctgttacaagtttgattcccttttgcttctggaagccacggaacggaaggaggaggagggagggcttcttatactgcaaggaagagagatggggggattgggggatggctcgtttggcccactcgagcatgttgatcaggatgggcttgtgccccaagaaagaggaggaaggctcgcttggcacctgagcacattgttcgttcctgatgggcttgttgcggaccatttcatggcctgatttgattaaacatgataaatggacatgaaggtaaaacaacccaaatatgaagccgattctaaacacagagtatatccaaatcaaaacgagtttttttttttggaaaagttagatttgttttttatttgtgtaattttatcgttttgaacaatggtgaagtcaaactataaaatatttgactatgaatcatttaaaaatatttctcttataaatatgaagaccatatgtgcatattagtcttaaaaaaatacttcaataaaattatatatttgttcatatttgtatgtatattataatagaaaatagtggttaaagttgcttgatcgtgcccttataaaaaacaagtattatcaatccagagaaagtactacataaagcatttcctatgtcccaaaatataaacatttatagttatgaatctaaactaatgtgtgtctatatttataactaaaagttgatatgttttgggaggtagtaatatattgctttgtaactactggatttatttatttaataagaaaagctgcattcttaatgcagttctttctacgtactaattaatactctcgccggattataatatatgcggcattggcattttaagatatttttaatcattcttatttaaaaacttttatatagttaataattattttttatctgatttatcgttaaatattctttaagtacaatgatttgtattcttttatgattgcgctctacacaattagtagttctccacaaattttaaataaaaacaaatgatcaaatgtatattaaaaagttaatgatgagttcatcacaacaataaactagataatccacgagaataatttgatgaacaatatatttctcggtctcgcgtaatcgtgttcgtttacatatatacaactcgtcccacctcgcgaacagcacggggacaaaaacacgcaagcaacggcttttccagaccaaaccactgcacgtacgttaggtgacatggcgtccatcggcccattgctctaccggcgtgcgtacgtacgtcaacgtgtggcatggcatctcgctaatatttgagagcactcacagcaaaactcgccgaatccctgagaccctgactcccctgttgcggccgtcgcgcgtgcgcggtgcgccggacaggaggctagggggtaccggcaccaggcaggcaggcaagtacgcccgtgggacgagcagggagctagccgggtaggaagggcgcgcggcgatggagtcggggccgcgagcgccagtcgtatccctacgactacgtgctgacacagcttgccgccgtgccgaggcctggctctggctgatttccgtcgctcgtgctcgcgctgatgctgtcgctcatatgccattatttctacaggcaggcaagaccggaacaccaggcagtagctactcattgtgctgctagcggcgacgcaggagttcgacgacggcgccaacacggggctggcgggtcgcgtgctggcgcagtgcgcggcgggccgcgcgccggcggactgcgtgcagtgcctgcaggactcggcgcgagcgatgccgagatgctgctggaacacacgagggctgggagagagcgtcgccgtcgtgctgagcgacgactgcgtgctccagttcaccatgcacctggcctatctccggcggcaagccttggtggagctctccgtccgtttgtcctcggtgccgttggagcagcagcgctagcaattatcccatcacaaaactttacaccctataatgtttgaacaccctgtcacatggagtattaaatataggttaaaaaataactaattgaatagattgcgactaatttgctagacgaatctttttaaacctaattgctttatgattggacaatgtggtgttacagtaaatatttgctaatgacagattaattaggtttaataaattcgtctcgcggtttactaacagattttgtaattagttttttattagtgcccgaacaccccatacgataccctatataatttccgatgtgacatgccaaaactttacacccctggatttatacacccccgtagtaatagtaatcacgttcgaatcgagtgaattgaagacaatttgtagtaatataactgtgggatacacggtacacaccgggtacccaaggagaggcctttgggccgtacgacatagggtgggcaaagagccgtaggcacatgcggcatacttgtaaataaagaaagagaaatttccagaataagatataaatctgggggatcatacatatctttatagatagaatagggagatctagttacaatcaactagatactttacttgtaacccccctcatcctatataagagggggcaggggtcccgagagggggaggtcggattatctccacaacctaggcatacatcatctccactccataccggacatagatccgatacacatacaactggattagggtattacctcacatcaagacagttggatcatcgagacaactggatttgggtattacctcacatcaagacagttggatcatcgagacaactggatttgggtattacctcacatcgagacaactggattagggtattacctcacatcgagacaactggattagggtattacctcacatcgaggacctgaaccaatataaagctttcatcgagtcatggtgctcgatcgagtagtagaaataaatcgtcatatgtagtagggattatgtgttaggataacagtagcttatcatgtgtgttttgtttgcaaaatgctatgcccagctagccgctagcgttacgagcgtccaccgccaacccattctgcagggtgaaagattggacccctttgtgcggcccatggggcggtgaacagaatcaccccgcacgacgcacacgcgttcgccgcgcgcgcgcgcgactacgcgaccgtgaccgcgacgcgggcatatttgaaaaaaaaaagaatttgtgaataaaacttttatatacgtgtttttaccgatctaaaagtaaagactaaaaaataaatttcgataaaaaaacccctcaaaattaactttaaatctaagatagaaaatttaagttttggctgataagtataagtataagtgaaaagataaggcttttgagggccagtcgtggtatcggggcaaggcggggatgtgccggactgccggtgcgccaccatacactgtgaaactaaaagaaaatctcacaattcacaactatacgttatgaaatagcctgcggctaactcacaccgtttagtagtttaggaagcgtgcgcgcggaaatcgaaacaaactcactcacaatcagccaggaaagaacacagccttaagtttccaatatttttgatattttttttcagcctcatcgttatcgttcccgttttcaagaaatatatgattatttaaacggctgatgttgttttccaaccgtttcatccctagccatggctagcaatgcttggtacgtgaaggtgcagtagttaatgacccatgggaaaaggtttttgaatggccaaacatgatgattggtgttatattaataaaagaagtttatgtacatagcaagaggtggaagaaaaggaaaaaaaatgtacattacttactgcaaattacatgtcagtccatcttaggctgtgttttttttaggggttaattaagaaccccttccctacccacagaaaacggaatgatagattaacatataattaattaagtattagtctataaaacttgaaaaataaattaatatgattttttaaaacaactttactatataaactttttgtaaaacatataccgtttaacagtttaaaaattgtgcacgcaaaaaatgaaaaagatgggttgagaatcataggaaagaacacagccttactgacttactcctcatggcaataatctcgcaacgtgttttgtgccagccaagctccagcgacccaactcatgaacccatgagaaatggttactaaactggtagcacacaccatagtccgtaggacttaattgcaccggagtttcgtgccgaacagacctgccaggaatgacaacgcttaagaccgtaagctcacgaaaatagaagagcatagcgcttaataagcgagtaaagggagagaagtccagccaattcgagcaacgggtgaactagctagggaaacaactttcggctgagtaagttcggagtgacgccctcttgattagcgaattcggcggagcttttcgccgcaattacccgttggccattcacagtgcttacttgcagctactgcaatgacgcgtgctaacctcccgtgccatttcgagtagtggagcgtgcgcgtgtccgcggttatagctgcacagtgtggtggcatttgagctcactcgatcgcctacataaagagcggtatagcttcgagctacggcatgcaattcgtctccagcgccctggcgacctagctagctccctcctccgccattgccacagaacacaccttggtgtcgtgcaatccatcgctcatggcgctcaccaagctttcctgcctcctcgtcgtcgttttcctcgccggcgtgacgtcgacggccaccggagccaggtacttcccacagaacggcacggcgttccgcgagaacatcctcgtgctgcccaccgacctccccgcccaggccgctgcgacgaggttcgcctccacgcaggccggcgacggcgacgaccgcgcgctcgctctcagcgtctgcctcggcgactctgcgccggcgcagtaccgcgagagcctcgccgccgcagtcgcggacgtcgtcgcaggctgcggcgccgccagccgccgcgccggcgcctggctcgacgggtgctactgctacctcgccgccgacaccaacatgacgacgtcgcccagcggggggagttccaccggtggctcgtcaccggagacgtcctgccgttcagcgacaacctgtacgcgacgttcctcgacatgagcaacggcgtggcggcgcggatgctggcgacgacggcgacgcaggcgatcgacgtcggagcagccacgacgacggggctggcggggcgcgtggtggcgcagtgcgccgcgggcgtcgcgccggcggactgcgtgcagtgcctggagggcgcggcgcgagagatgccgagatgcttccgggaggcacgtcgggaggagcagggagagggcgtcggcatcgtggtgagcgacgactgcgtcctgcgtttcgacatgacttcttcgccggcgcctcggacgtcaaacacctgtgatgggacttgcaagctgttagccttcgccttcggagcagcactagaatgatcgtgtcagtcactttaatttgtgctccctccgtcccaaaataagtgcagttttagcactgttcatgttcaacgtttgatcgttcgtcttatttgaaaaacaattataattagtatttttattgttgttatatgataatacatgaatagtatttatgtgtgactaatatttttaatttttttcataaaattttcaaatacgaatggttaaaatactggacacgaatatctatggttacacttattttgggacggaggaggtagtagtagtaaccatcgctagctagcttgatggaatcatggtgcttgagtggtagaaataatataatgtctgtctggggggtagaatggttgcctatatgttagcaacttagtagtactaccatgtttctagtgctttcggtgacactattctagccggttgtgtgtttctctttgtgatttgcaatgctatgctcagctagctgaatatatatgccaaattgtcaccttgggaactaaatagagctatgtgatccattgtattgctgggaaaaatatatggtgcaaaccatatatataatataaacatagaaattactgaaattactataggatcggaaaataaacatatgagatttgtctatgtcataccaaaataaaaatttactcctgattaaatcttgagataatcccttatataccattgaaaatcggctcttcccttatatgccattggtttaaatttgcgcaccctctcatgccactccca

SEQ ID NO: 22216 - DNA, 748 bp, Oryza sativa
tgggtttccgtgtccaactttgactgtccgttttatatgaaatttttttataattcgtattttcattgttgttagatgataaaacatgattaatattttatgcgtgacttgtctttttaatttttttcataattttttcaaataagacagacggtcaaacattggacacaaaaaccagggtttgtctttttttggacggagggagtacagagtactcccaggttgtccattactgcccccagacgtagcttcgatggtttcgacccggtcaaatcatgattggacccacccactaacctgctacaactgtcatcctttcttgaaactatgttagctgctacgaagtactccctccgaaaaaaaaatcaatctaggagaggatgtgatccctcctaggacaacgaatctagactaccctttatccagattcattgtcctagtgttgacgcggaaaacatgcactggtctgagagatctgcttaactttaatgcacgtccaaaagaattgccttcggattctgagcgtgccagctggtttgatcctgcaaccaacaagatagaaaaaaggacaaagagttaaatccatcaacgatagctgatcggtaggattgccgatgacgtattgtatgagggcatgccgacgtaacttgcgttagatcggcagaggcaaataaaaacttggagattgttcggtatacttgatcgggtgtagatgttagcgatgcgtaatccatcaaatgggacatat

SEQ ID NO: 22217 - DNA, 541 bp, Oryza sativa
tctcagcagtgtgcttcacatcaatcagcaccaaacccaaaatccttttctctaattgccaatcagaattaacaaaatgagcaacaacacttaaataatcctccttagcattaccagaccatatatcagatgtcaaagcaacagagttaacagacttgaacctctcaataagcatagcacgactcttgtcaaagtacttaaaaacatctctactaatagtttgcctagagacagcttggaatctagggttatgaacattctgaatgtactcctcaaaagtaggagattgaccaaaattcagtggtagatcctctacagcaatcaatttaaccaactcagttctagcataatcaggatcatattcccatggacgaacagtaccatcagcattgagcttaagcatagactgtgacaaattactagcagttctaggtttgccatgacttgagatgcctaagcaaatgaccagtgccaccagatgaatgagcagacaaagttttttttgcagtgattgcatttagcagaaatgcgaaccttcgcg

SEQ ID NO: 22218 - DNA, 1104 bp, Oryza sativa
tcctgcaccccataacagaatggaagatattggcagagattatttcaatgagatggtgtctggatctttctttcaaccagtttctaaaacatatgtgggtacacggtatattatgcacgatctcctccatgatttggcagaggcactatctaaagaagattgcttcaggttagacgatgataaggtgaaagaaatgccatccactgttcggcatctgtctgtctgtgttcagagtatgacactgcataagcaaagtatctgcaagctacatcatttgcgcactgttatctgtattgacccactcacggatgatggaaccgatattttcaatgaggtagtgcggaaactgaagaagttgcgtgtactatatttgtcattttacaacactaccaatttgcctgaatccattgcagagctcaatcaccttcggtatttgaatatcatcaaaacgtttatttctgaactaccaagatcattgtgtactctgtaccacttacagctacttcagttaaacaataaagttaagagcttgccccacagactctgcaatttaagcaagttacggcaccttgaagcatacgacaatagaatagatatattgatcaaagcagatttgcctcaaattcctgacattggcaagctaagttcgctccaacatatgaatgacttttacgtgcaaaagcagaagggatacgagttacgacaaatgagggacatgaatgagcttggtggcaatttgagagtcagaaatcttgagaatgtctatgggaaaaatgaagccttagaggcgaagctgcatcagaaaactcgacttaaaggcctgcatctttcctggaaacatatgggtgacatggatatagaaggtgtttcacatttcgagattctagaaggcctgatgccgccacctcaattggagcgccttacaatcgaaggttacaaatccgccatgtatccaagctggttacttgatggctcctattttgaaaatctagaatcttttaggcttgttaattgcagtgagctcggaagcctaccttccaatacggagctctttgggcgctgcatggcactaaccctttgggatgtcccaaatgtgaagacatt

SEQ ID NO: 22219 - DNA, 645 bp, Oryza sativa
ccgggctggttataactgtcggtaataggtggaaatcattaggggattttttttctagcgtcattagacatagcctttttcatttagaaactaagaaaggacgacagcagtcggaactcggaacttttcccgagattttctcgctaagttcgcgaactagacttccccgcggagatgaaggggacgaggtcgggagagaggaagcgaacggtggactgaccgagaaagtgggcgaggccctcgagcccctccgggtcgctgaacgagcccacgccgacctccatacacgccgccgcctgcaacgccgaggaattaggggttagttaaacacacacgcacgcatacgcaccacaccaccaaatcacgcgagagtcgccgatgaaccgacgagcattctgcaggcgagagcgatcggggagggagatcgagaccttgtcggtgtcggagtcgctgatgaggaggcactcgagcgcattggggagcaccacccggcggtactcccgcttgtcgctgcgcgagcggatgaactccacattgctcgccgccgccgccgccgacatcgccgcttgttctccgcctccgctctcgcttctgctctcctcaccaccaccacgcggtcgtccaatctcagaggaatcgtggagg

SEQ ID NO: 22220 - DNA, 7237 bp, Oryza sativa
  unsure (1)..(7237): unsure at all n locations
gcggaccagctccacggcaacggcggcggctcgaacgcggcccgtggcgacggcgacggcgcggatccagtccgcggcggcgccggcggctcggacgctgcccgtggcgacggcggcggcgcggatccagtccgcggcggcgccggcggctcggacgctgcccgtggcgacggcggtggcgcggatcctgtccgcggcggcgccggcggctcggacgctgcctgtggcgtctgcggcggcgcggatccagtccgcagcggcggcagcggctcggtcgcggcccgtggtgacggcggcgtcgccgatccagtctgtagcggcggcgatggtgtggacgcggcctgcggcgacagtggcggcgcgagggctgtctcccacgtcgttgcttccagttgctttcagttgtgtcgttgtttcatggtgcaggccatctctttctcagccatctccatcatctcagcaggacagaagctgatttgcagccattcaagtgcttcttccttgaaggttggctgttcttcggattcatctatcctgttgttccctaacagaagaaaccatgtagggtttgtcattcgggttgagctcggaccacctgatgagccccgtggggatcctttgctgagtccggtgacgcacacaccaaaatctacggctcagcatcaaacctcggtcttgtgccgtttccgtggaggcagccgatggggattaacggtttgtcaagcggactgcacatcttttgaggcccagggtagcagtcgtcgcggcttcgccgcagatccctgtcgacttgctcctttttctgatgttaggttatttcaggaaggttgctttcgtagttcagttaaccctcctttcttaaggatggctcttttgcttggatatgtaatggggtttattccctagatctgttcctgcttaataaagttgatgtgttttcaaaaaaaaaaaaaaaagccgtggagtggaggagagaggaggccatttctgggaaaagggaaaaggcctgtggcgcgcgggccccgcgggcgctgaggctgacgaggaggagggttggctggcggtgtggacgtttgtttacgaaaggcgcctgcacccggcgtgttgcagcgcagcgcagctgcggctgcagcatatgactcgtgtgacatcacgagccaggttgttttcgtcgcgttcctcgcatgcagtgcaggcttttgctagcagcttcccccgccgtctcgcgcacgggagtttcgccgggcgcgcggcccggccggccggctggctcgatcgtcttctgcgccgagcgcctctccatcccgcgggtttccgccgggcgaggaggacgcgcgcggggatcgtgcacgcgagtcgcgcgcggtggagtttgcgcggccaaatcccggtaatcgtgggtgactcggtgcgggtgtgcgtggtgatcgactgatccgcgctagggtaggttggacgtccgcgcgcactcgatgtggtgtgtcacgcattgggggtgtgctttggtgagatcgctgctaacttcctggcacaaaagaaaaatcgtggtagtgagaagtgtaacacgacgtcctaacaagtgtcggaggtagcgcgagctgtaccccttcgtggtagtgatacacggcccaacattgttgtgaccgcattaaatattaacatataatcacagttttactcttatatatgaccaagatgttgtatatacataccacaaagtgcttttgtgaccgcattaataagccagttttactcctatactactccctccgtccccaaaaaagacaaaccctagatttttgtatccaaaggttgaccgtccgtcttatttgataaaattatgaaaaaaaataaaaagacaagttacgcataaaatattaatcatgttttatcatctaacaacaatgaaaatactaattataaaaaaatttcatataagacggacggttaaacgttggacacggaaacacaaagtttatcttttttagacagagggagtatatcagaaagtaaatttagtacttcctccgtttcacaatgtaagtcattctaatatttcccacattcatataaatgttaatgaatctagataaatatatatgtctagatttattagtatcaatatttaatacgagaaatactagaatgacttacattctgaaatggagggagtacgtctgcaaaggctgaatcacgtgcttagatccctgacccctcacgataggagaagctaggcacatagtagtggactttttcatgcatgcatgcagaaggagctggcagggtgaatgaagcaatatcgcatgttcttcatgaatcatgaggcaagataatggaaccagaggactttcaacttgggcagcaaattgatggtattgttattgtgtttcacgctaactcgactatttttttaatgtaatcatttgacatacccttttttttcaaacataatggaatataaatacccaattacgacaaaccggagtgttttttataaaaaaactttaaaaaaaaactacgacaaactggagttcaatccatcaatgatgagctcaaaagcaaggatctgattaaacttactagcagtactactagcttttgactgctaattgtgccgattagagggcaaaacacgtgccaaaacctaacccaataattgggcaggagtttcgttgcggcccggaagcacacacataaagattgattggtcgatcgttcgatctaaacaacccgcaaaagccaggccggagaagagagcgacgccccgggccgccacaacccgacgcgtagccgctctctcgcccacccgcgcccactggggcgttgctatagctgccaactcgaaaacaccccgcgagtcgccaactcgccaccgcgccgcaagccacaacagacactgtacatcattaacaaccccccggatgcggcgcccccctcccccatctccaaacggcgttgcgcgccgcagaaaaaatttcggcggagccgccacgccacgcgccgcgtccaaccgcgtgcaagaaaaaacacacgtccacttctgtcgatccgtggcgaattcgtcacgtacaccgctcggcttttcaccatcggcacttggaagttgaaagtgcacgcacctcctgctagcttggagctggagggctggaggctgcaacgaggggcatcagcatcggtcctgcttcttcagatcatgtgaacggtttattctctccggtgcttaagtcaatgctttttattctacaccaaaccaactaccagatgctgacacgttttacttctactgctcctacgtactcctacctgttcttggcacaatcaatgactgagtcagtcgaccattcgacctatcgccgagacctgttctccctaatcaagtccatgactgcgattcgttttcggtatcccacataaacaaaccggcctagattccacaccggcaccgcgatgtgaataaacaaaatcatcattgcgcgaaactcagtagctaagagcacccgcaatggtaaagtaatgtgctatctataaaacatgtacatctcagcaatagactagattaatagtaaaccatctcaatagtatgtctacatgggtatctatagctctttaatacattgcctcgtttttctctatagactatctccagattagtagatagctttgctctctctcttcatttaatctcttccaagtagaaaaatatgctgacatagatctcttatagagagtctatagataaccattgtgggtgtcctaagagcacccgcaatggtaaagtaaggtgctatctataaaacaaaacatgtacatctcagcaatagactagattaatagtaaaccacttcaatggtatgtctacatgggtatctatagctctctaatgcattgcctcgtttttctctatagactatctccaagttagtagatagctttactctctctcttcatttaatctcttccaagtaggaaaatatgctgacatggatctcttgtagagagcctatagataaccattgtgggtgccctaatacttgccatcggttatccaactcgttaacctagaagggcctgattgtgatgtccgtgagattgtcggtaaggcaaccaggcaactaggcagccgtttcctgggtctcgacaaaatcgagcggcggcagcagcccgaccgcgagaatcaaacaaaactcaacaacttgcatgctttagcttgcgcgatgcccagtactaatattgtccggcttcgctgacagtatacgggtgtccaggcctcgaagtccacacgtttcagcctctaaatggatgggaactgtcaatttggtgaaccatgggctttggctgtatgtgaaccagtccaacgccgacggcctaggcctctttgctgccttgaacattttaggccttctgggccagagtgattatatcattttaggcccccccccctttttttttttgccagagctatttggtcattagaactccagcactgtaattttgccgtgccataaacttgagaatgggatgtgtagtgtactaatacttactgttgatcttaaggctgtgttctttggtgtgcttgggaacaaatcccatgcaaaaaaaaaagaagtggtagattggtgaatggttaattaaataatagcttcaaaaacttaaaaatagattaatataatttttaaaagcaatttctctattattttttaaaaaaacacactgtttaacggtttgggaaacgtgtgtatgtgaaacgagcgtgtggagattaggaaccaccccacaaacgaactcagcctaagccgagttgttagcattgtccattaaaatctaatagtgtggcccgcgcaattacatggctagcgcctatataactatttttttacacataattttctttaaaatttactacctccatcctagaatataacaagctttagagttgaatacgattattaagaaaatagatagaattaaataggaaaatgttgtgattggttgagaagttgaggtacgtggaaaaagtgaatggcagagggttgtgataggttgggaatggaatgttgatgaagaagttcttatacttttggacaaatccagagcattaaaaattgttatattttggtacgaagggagcattacatagtcatctcgttcttaggattttaaaaataacaatttaaatttgagtaaattgtatattgggcctatatatttttaccagtgttacaccttggaccagagacaatctaacttttccgctatgaaccacttaattttacaatcggcttcagtttggacctctgtttcctcaagttccctctccctagtccctccccacttctccatgttgcagggacatcaccggtgaaaacctcatccgaccggcaccactgctccactcaatatcggccttcacatcgagcctccgtagcactgacgcgttcgacctcgagtcccaccagtatcggcgccggcgcaataacacccttcagccaagctagcaccacctgtgccccatggctttggcccctatcttgagctcgagctcgaccggtcgatatcatgctccatctctagctccgccagtgttgatgcaacgagcgcttgagctcaagttccatctttatccctgcaatggccaaggtcaatggagatttttttttgtgctttctttctaagctcaagtgcaaatatgtgtgggggagatattgagatgccactcaagagcgatgccggcgagctccgacgtgagcgttgtggcagtggcggttgagcgttactcgacctgctcatggtggttcctagcgtgaggaaggagagagggaaagttggaggtagaatagcatgcccatggtgaaatatttggtattttttcctagcccaacttgaaaatgtcagcttacccccggtccaaagtacaatagtggtaaaaaaaatatggcccaatatacaatttagtttttttaattttatagtttttaaaagttacanataanntcccctctactccttttcgtttgcctcctattttcgagtcacataacaataacaattcagtaaacatactcacgagaaatgaggtaatagtcagattggagaaaaacttaaggccccattgacttacctttttggattgactacttcattgttctatgtgagcacgttttctaaacggttagttttctttaagttccttttcaagttctattaaataaataaatacactttacggtagttaatattcacagtatgatgaatccgaaccaaaactttctatattttgggacggagggaggagggagtattaatatttagggcatgtttactgtgctactattttcaaccttaacaagttttggcattgccaaatttcgataaggttaccaaaattttggtaaatttgtcaaattttcgcaagatttcatatgtacttactaaaatttggcaacaaactaaatgcagctacttttttttataacttaaaaaaaaggtaaagttaaaaatggtaacaaagtgaacaagctcttaaattatacattaatgatttagctcgtcttaggtgcggtggaacagctgagcttaaccgcaaagcctgtttctattgagaggacgcaaaaactgcagtggaagaaacgaacgacagaagctgccgtgcaattcgtagttgcgtttggttctcgtcgagaggtcgagtaataactttggaagaaaggcaaaacaaacgcgttgggcttaacacagtcttacacagatcgcttcacttttacacgaagcccctcgcaattcttcgacctcctaaactcccccatcgcgatccctctcctcctcctctttccccaatctcgcgcgacgcggcggaaccctagcccccaccgcgattcgctcgccggagagggagagggagggaagggaggctaggggaccccctcgccggcggcggagatggaggtgaagctgtggaacgacaagcgggagcgggagctcctggagagcctcgccgacctgtacgccatcatcaaggcgacggagaagctggagcgcgcctacgtccgcgacctcgtctccgccgccgactacgaggccgagtgcctcaagctcatctcccagttcaactccctctcctcctcgctcgccggcgtcgtcaccatcccccggttcgtcgaggcctaccgcctcgactgccctgacgccctcaaccgcctcgttcagtccggcgtccccgccaccgtcgagctccgcgccg

SEQ ID NO: 22221 - DNA, 1314 bp, Oryza sativa
acaaaatggatctttttttctttccaaacaagtgctgttatctggttaattattttattttgccaaatcccactttattagtcaacttgtcattccgatttttagctaaaattttccatccttgtagtccatgttttgttggccagttatattagtcgagttatggctaaggcagcattccttaggagaataaaggaaaaaatatctctcattgtccactcgtacgcttctcaaatgattaaacgggacgtttttcctaaaaaagaatttctatataaaagttgctttaaaaatcatatcaaactattttttaagctcaaataatcatatgttaatggtttatcttgttttacgcatcttctcaatcttttcatttcccctccttccaaacacacctaagtcaaataaccctatggatttttgtgcgcttatataccacttctacttttttttaccgaatgaactaaccaatgtctggatgaatttagtattattgttccactggataaaagaaaattcaattggaacaacttatgttccaaaaccacgaatgcattcccggcgcttatgtgaagcaaaaggaaataagaaacaccacatgtatctagaaatatatagtagtactagtaattactttgtcctaaaatataaaatttaatattaaatatgcatttgaacagctataaaatataatgtgtaatcgtagttttttatattttggaacaaaagtagtttatgttttggaacaaactgcaggggtgaaacgcaaaaactgcctctacggcctccggcctccgcgtcgtatctgcgaggacgaggcgtggcggtagggggaggtctcggattccggctcccggcctccctctatgcagtttgcaccgcacccggatgcgaaacgtggcccgagcctccgcctacaccgacccgcggggccctcggttcgtcgcgtggggtccaccgagcagtggcagaatcaccggccgcggggccccgtcatgggagaagccgctttttttttttttttttggatgggagaagccgctgatacgctgggtgaagccgtggagggggcacacggagaacactctctcgaaccctccctcgcctgctacagtaaaattcccctttctcgacccctcttcctcctcgattccggcggcctcgtcgccggtgacgggagggagaggggtcgtccccctcccctagtttagtatagtagtcgggctagtctcgttaggtcgggtttttcccgtttctcgtttctatggcgatggaagttgaagacggtggcggtggcgcgattgaggccggtga

SEQ ID NO: 22222 - DNA, 1955 bp, Oryza sativa
ctagccgtgatcaagataggtagtaccagagggcatgacgctattctgggtattgatatttgataaatatgcagcgtctcctcacaattcaagtttgagagcatttccctctatatgaactgaatgatcaagaaccgacatgaaaatgctcattagataaaacagtatcaaactactggttagcatggacaattaagaaacacgataattccataggagatctactcagcaaacagtagtttgaacaagcaatacttcgaaaatgctgctattctctagaggctgcctacagtgcaggggtacattgttcagtttctacatttctgcaaaaatcaatcaagtgtgctcctgaaagagtcttcgcacctgtgtacagcatgaatagggacaaattctcgagtttatcgtcatactgcaagagaaatttaagtaatgtatcttccttgctgctcctgaaggagacgagccgatgatttagcgtccaaatacagagcactgacttcctcaagatcggcctgattaaaaacaaggtcatgggttcagcatacataaaacttgcaagaacaatatcaggctaacaagtgaatgtagcagccagccatagcccatacggcaaaaaagacaacaagaggacgttacaatatcctgctggaatttcaacacataccttgctgatcttctctctcccattagcctttgcaactacactggcgggtgatagcaactgaatagcatgcctacatgagattcaacatgtgttacaatcgttcatcttcgctagctgcctcagtaagatgagcttggtggttataaaactaaaactacaaaatttaaaatgcttatagaacaccgaaagtgggaaataagatcagtccacttaacataactccctactgcataatttccatcttaactctctttctcaaacctgtcggtgtaacaaccaagaatcgtacctcaaagatgtctgttgtccaatctctcctaaaaatgcgagactttcttcatcaatgtcaatctcttccacctgcgctctaatagcaagtatctgtagaggacaatgagcaaagatcaaacacatttctaaacaggaaagcctaagtgatataagatccaaaatcaaacctggatcatctcagtgggaccatatgtttctgttcgaataatcaccaatctgtctagaagatcaactggtataccatgtggacttgtcatatcagttcctctggacacaagcataacaagactttgtaaactttaaggagcatatggtaataaacaaactgacaaacacatgattagtctggtattataatgtagcgcagagtgcttcgactggtaaatcaaactgtttaccttacgttacatattcctctgttcgtagcaagtatcacaattggtgataatgggctctccaaagcacgattaagataagagaagcattcaatgtctaacatgtggacctgcgattaaagttcctcacaagtaactaaatcaaaccacatcaagatttataccatatagtagagaaatagcatggcagtatggcactgccccacaaggacaacccactgtatgtttgacaacagacaaacacaccctcatttgtatttataccttctgactccaaaatgagccactgagaaaatttccaatcataattcgtaaggatgaaataataagatacctcgtcaatgaacagaacaccaggtacaagctcagcaattccttcatcaatatattgttaaccacctagcaacatacagtatagatgttaaagatcatatgccaatcctgacatgtttattaaatgtggtccacttttaaaagcagcagtgctgctacatgggaaatttgaataccttattgatttcttgtcgtagcttctcagtgatttcagttttccgtggcttcatcatctgtcccataagggacaaaatatcttggcctccttg

SEQ ID NO: 22223 - DNA, 2538 bp, Oryza sativa
caatgcaaaaaagacttgcctgtgcaaaaatcttttaggctaaaattcaccaaattacctgcactatttccttcttcttatggacctcccctttggggattggaacatactcctcagcttcaagatcgtattctgtagcaaaagcatcacatctaccaactcttttgaccgcaccactattagcttcaatgtatataacatcacccactgacacctgcatcccatgtatcactgatgtaatgaaacaactagtgcaaaaaatggaagtaacagaagtgaatctcagtatcaaggcatctaatcagcttcacgatgacaagttatgaatttccaatcatgcaattttttttttacaattaacattctccaaagtttactttatagattaaatattcacaacaagacattcttctgaataagaaatgaacaatcatccaactattactaaaatttcaaaaaatgcacttagtgtattctaaaatatccagcacaagataggagggcgaggagcaggataccttttcctttattaaagcatcataaattgtaggatctagcttcagttgcttagtcccttttacagtcttcagacctatgattacatggctaatgctttttccatatccacctgttgtactctcagcctcttctggggaaagttcagtaacctaaaaggcaatgaagcacaaatatatattattttagaaacagacagtgagaatatcatatcagttataaatgtgctaatatcaagagaaaatgaaataatgcacaaattcaagaacaatatcttagtgcaaacttaaaaattagcatatatggtgtgcttacctctccttcgtagacctctttattttcttttatacgcaaacctatagctctacggaaattctccattagcacctcagttttcttgacctctgaggaatacacttctgatcctaccataggacagaaagggacctgtatagtaaaataataagataacacataagatattctccatcaacatgaatgaaacattggaagttttaccaaaaatgaagcagatgtaagacattgaacgaaaaatcttatagttaacacaaagaatttctcatatagattgtgaggtataaagtaaaaaaatgtacaggtatctaataaattgacatcaaattccagtgatccaccattagcagaattattttcaaggaagggaaacaaatatattgaaccagcaagcaacagaatccaagcctaaaagaaatgttgaaagccaaaaacatagaaaaaaacatgctaagtcgaccatttctttagaatagcaatttagttaggtgaatctgaaatttaatccaaccatcctcccaacagttgaactaaaaaataataaggcataggttctcaaataccagaagctcaatatgaatgcctttctggagctagatgagcccttataaatgtagaattacttgtttacactagctaatgaacaaaaaggattcaaacttacaaagaaatggcttattatgaacaattgtccacggtgcccttattgcacttaaacacgattcatcagtttttattggccacatgctttaactccattcaatcttcagtaaagagaactatgaaatagaagtaagacctcttaaactaagtctatggtatgaaaggcaggaaacataacccctctatgtagaagtgaggcttgaacacacacatgtataatatgttgttgaaatgaggcttaaaaccaaggtattcacaaccttgtgcggccaccatttcaccacgctgagggccatcgcatcgacctcttgacgagcggaagagcaaaaatccccaaaaggcaaaacactttgtacaagcttacggtgagcatatgttgctaataacatggcttgttcattatgaagcctaaaatctaacctccaaatttatttacagcagagtgtacaaatcatctagagcagtgctcaaagggtgttcgagaggagaatgagggagtggaggcaccaaccaaccttactaccgagctcctgggagatgccgagagcgagagccgtcttgccggtggcgggcgggccggcgagaagcagcgcgcgcccggccatcttcttctggcgaatcatgtcgaccaccagcccggcagcctccctcgccgccccctgccccacgaaccccgccgccaaccctatcgccgccccattcgcctgctcgagaccaccaaaccaagccaagccatgagaaaattttctctaaaaccctaggagaaaaacctttccccactgcagcagcagcagcagcagcagcaaggtgggggagagagcggaggagcaggagaagcgcggggacgcacgtcgaggccgaggccctttatgtgggtgtgcgtcgcgatcctctgcttcttcgtcgtcgactgcacctcctcgatcctcatcgccgccgccgccgccgccgccgcttcctgtctctccgcctccctccctctcccccaccgcaacgacggtggccggccggtggcgcagcgacgcacgtgcggagctacgagcg

SEQ ID NO: 22224 - DNA, 1187 bp, Oryza sativa
ccgcccgtcgtcgcggaactcaccaagctccgccgcgtggcccccgagctggtcgccgaggtcctcagcgctcgcccgccgccgcccccgccgctcgcgctcccgttcttcctgtgggcgggacggcagaagggcttccgccactgcttcccggcgttccacgcgctcgcctcgctcctctccgccgctgggctccccgccgcggccgaccagcttcccgacctcatgcgagcccatggcaagccggtctcgcattcccagctcaacctcctcgtcaggctccacaccggcgcgcgtcgcccgctccgcgcgctccacgccctccgccgcttccgccacgagttctccgtgcagcctgaggtccacgcctgcaaccgcgtgctgggagcgctggctgcggctgggcatgttgatgataccctcaagctgttcgacgaaatgtcgcactgcagtgtgcggcctatgccggtgacattcgcgatcatggtgcgtgcgctggcgcgggcggggatgacggataaactcctggagatgattgggaggatgcgggctgaggtgtgcagaccggatgtgtttgtgtacaccgcactggtgaagacgatggttcgctgggggcatatggagggttgcatcagggtttgggaggagataagaagggatcatgtggatccagatacaatggcttacaccacaatgatagctgggctatgcaatgcgggaatggtggagaaggcagaagaattgtttggggagatgaggaggaagggtttgctggtggacaggatggtgtatgcgtctctcattgatgggtatgtctccacaggaagggtcagcgatggttgtagagtgttgaaagagatggtggatgctggttaccgtgcagacctggggatctataacacactgattggcgggctatgtgagatagagcgggaggataaagcacacaagatgtttcagattgtcgttcaggaggatctaataccaagctccgagactgtttcaccattgctggctcgttatgccgataagggcgagatggttaagttttttggattggttgataaactagtggagctaagcttgcctatagttgaaattttagtggacttcctgaagctctttgcatgcaagagtggcaatgaattgaaggctgtggaagtttttaatgctttcagaagaagggg

SEQ ID NO: 22225 - DNA, 6397 bp, Oryza sativa
gacgccgagaaggccaaggactcggtcggcatccgccccggcaagggtaagatgcgcagccgccgctacatcaaccgcaagggccccctcatcgtctacggcaccgagggatccaagatcgtcaaggccttccgcaacctccccggcgtggatgtcgccaacgtcgagcgcctcaacctgctcgacctcgcacccggtggtcacctcgggcgcttcgtgatctggaccgagagcgccttcaagaagcttgaggaggtgtatggcaccttcgaggcgccgtcgctgaagaagaaggggttcatcctgccgaggcccaagatggccaatgctgatcttggcaggatcatcaactctgatgaggtgcagtctgtggtggagccgctcaacaaggaggtcaagcgcagggagaagaggaagaacccgctcaagaatgtcgccgctgtgctcaagctcaacccctacttcggcactgcacgcaagatggccacccttgctgaggctgcccgcatcaaggccaggaaggagaagcttgactccaagaggaccaagcttagcccggtataacttactctcctctcaattttgttgattcagttattataaaatgatgactaggttgtagaataatccgattagctatgtagatctatagttgactctcatggtaacaagaacaaccatttggatgcttgtctaatgtgttagctggtactgctttggatgatctatttgtttagatgacattctagtttacttagttagcctgcacttgctgtttgtgctgctatgttgcttcatgggctgttaatttgttagtattgctcggaattgatactacctggtgttaattcttgctgttattaggtacattcgtttctatattcatgcttctaatgtgccattttctccatgtttagttgagtagtattttgttctatgatctctctggtaagccaaggttgtattacttgttataagttattgacctcattgttgtagctcagtgtctgtcttatttctacattgtgttcctagaagcctttgaatgtgttaattgattcatgataacatacagttgtgcaaggtcatttagttatttttcttaaattatgtctctatgcattcaagtttaggtttcatgtaatgttaatattctagattggctccttgtccttggtgaaatggtggctgagttcttggcattagaaggtcatttatttggctgtgttttatatttatcatagcatgtgtggtttgttgttgacttcgtcgtaactgtttatttacactgatcttaggttctactatcattttttgtctggtttattctgccattgatatttcatttgctgtattgcccttagtgtttttagtgggatacttgtttagtcctcaaccatttggagacttcaatctcttggtgccttttgttctaactgaaaattcctgttgattcattgtaggaggaggctgctaaggttaaggctgcaggaaaggcatggtacaagaccatgatctcagacagtgactatgctgagttcgacaacttctcgaagtggctcggagtgacgcgtgagcgttgtcttgttttaagttttgagtagcagcgttaccggatcttatctcaaggatttatcaatctgtttttacctgaacatctccataagaagttatctgtgggattttgagactagtttctctgttttgttaatgtgctgtcgtgagaacatagagtatgtggtttggaccagcctctaaattatgtatgcacttccatgttctctgtgatgtcctgtattttgatgctgtgatcttgtatcgctgtatcatattgttctagggctcatggcttactcggtcaccatggcgctgattccattcacagtgttcagcctacttaaacatatttgcaattttggttagatgagtttgttgtgaaatctggtcagtgggcatgcctagcaagcctaaatcaagttgagcgagcctcaatcttatcttgcttttggtgaggaaaatgttgtctgttttgtggttgtgttagttgaggaaaatatggtcgtgccattgctttaatcctggaatcactgtgatgactgactgaaacgagtttgctagttaaccaaactctgttaccgtcaatgattgaggaagaagtcttggctcgtgctgttgcagaattgcacgggattgaatcagtggcaacttgagttctggatgaattttcttccaaacaaaacctcgacagttcgactgtgctggcaaccactgttccttggtttgcattctgttttgcgggaccgcttagcgttacgacaaatttagggcctgttcactttgatgacattttcaaccttaccaaattttggtaaagttgccaaaaaagtggctacatttagtttgctaccaaattttggtaactaatgaaatcttgccaaaattttggcatagttgtcaaaatttcagcaataccaaaatttagtaaggattttttttaagtatcaaagtgaacatgcccttagcaaaacactgaaactttgtccgaaatttgatccaaaacgaacggtttgaggaagcttcggacggaattcgaactaacgccgtgtttagttccaaataattcttcaaactttcaacttttccatcacatgaaaactttcctacacacataaacttccaacttttcatcacatcgttctaattttaaccaaacttctaattttagtgtgaactaaacacaactaagactgtttagttcaacgcaaagtttagattttggttgaaattagagatgatgtgattaaaaagttgtgtgtgtatgacaggttgatgtgatgaaaaaggactgaagtttggatccaaaccttgcatctaaacagtaaacacagcccaaattcgtaaaccgtcgggttcattcacttcaccccgcgtcaaacacgcaacggaccggagcgcgccgcgaagccagctcactcggtcagtcgcgcacgtggccccactccaccggccacgtcaccctccacgtcatcaaaagcatcctctccctcctactctcccctcgtctactactacttcacctcgcaatctccgcccaaatccaacgcctcgtctgaacacaaaaccccgtaaaaatctccgcctccgccaccgccaccgccgccgacgccgccatggccgccaccgccgccgcggcccacaccctcctccacctcgcggccccgaggaagccctccgcggggcccccactcccgcccgccaccctccgcctccccagccgccgcctcgcccgtctcacggccagctgcagcagcggctccgggaacaacagcgccgccgacttccccaaccccaacgggatcctcgtcgcgcccccgtccgccgcggcggtggcggcggcgtcgtcgcatatcgatgttgacgtggcgacggaggccgacctgagggagaacgggttccggagcacgcggcgcaccaagctcgtctgcaccgtggggcccgccacctgcggcgccgacgagctggaggcgctcgccgtcggcgggatgaacgtcgcgcgcgtcaacatgtgccacggggaccgggagtggcaccggggcgtcatccgcgcggtgcggaggctcaacgaggagaaggggttcgccgtcgccgtcatgatggacaccgaggggagcgagatccacatgggggacctcggcggcgccgccgccgccaaggcggaggtgagcttagctgccgctggattctgcctttggcattgccgccttgctaatttgctttcatgcgttcgatggaattcggcgagtaccgcgtgcgtggtgctagcaagtacgtgaattcatactactagtgagtaggaatgcgtgctttattcgacttggaattcggataaagaagatgtcctgacaccgtgactcggtagatctagatttgagctcaggttcatgtttgcacagtgaaggggaacactagtattgttatggaatattcttccatgaaatgctactagcacccaacattccctggagtggggataccagtttggattttgcgcaactttatcgcaagttgggtgataacatgaatccagattctactgcagagaatataagagatgctcaggtagatgcaaaagagagagccacatcataatctcacttgagcaagtgctccagccccttctgggactaccatgttatagacctgtcaacaagctaaattaaccacctatttaagcgtgtaaccattccaagtgctggcctccttgttaactattgaatactctgcaacttttcatgctattgtccacgctggtagagaaacacagttagtttggcctaattgtcagctatgtatgtgttttgtacatggcccaacaggctcttgttcctgtaatgtcagcctatagtgtaaatcttgctttccagctgaaaaaggaacaccgcatctgaattttgtttattagattcagcagaagcatgcaggcatctgtagtttgagttttattgacttggtttggcagtcataagctctgttcttgctctagtaaagaattgaagtttcacattaaaaaaagggtaaagaaattgaagttaacaatatctgatgctccaaagtttctgtatcacctatgtcaatgaaccatgacataatcttagagattaatgaattctctcatatgactggctcaccactctcaaaaataagattcttgcataatttttttcatttgaaacatattacaagtggcttgaccgctatctagcactccctcctagtcatatccaatgataactactttactttttctagccatgccttttattggttctttttgggttttcctagtggcaatatgcccctctaatagttatttattttaatcctttttttttcttttgttggatttcacaggatggagaaatatggacatttagcgtaagatcctttgaggcacctcccccagaacgaactattcatgtgaactacgaaggcttcgctgaaggttattttcaagcagatctcttctgttggtcttatttatatttctattcccctctgtaatgtgttttttgaacactacacagatgtgagagttggtgatgagcttcttgttgatggtggcatggctcggtttgaggtggttgagaaattaggaccagatgtcaagtgccgttgcacagatcctggtttgttgctgccacgtgccaatcttacattttggcgggatggtagtattgtccgtgagaggaacgctatgctacctaccatttcatcaaaggtaaattcactagcatggcaaatttgttgctgcaagcctgtaatcaaaaagtaggctgaatggttatgtcattttgttgcacaaacagttcatgttttacatgttactactgaggtcagcccaaatgaattacctggtttactcaaaccattgtgttgtaatagtgaataatatctgcatatattcgaaaaagtccaccatccatttcttagaaagctttatgtggactgttaccaagagttattgttgttgagaaatgatgattcttatttctgtgcaacttctgcaggattggcttgacatagactttggaatttctgaaggcgtagattttatgcagtttcgtttgtcaaatctgcagaagtaattaaccatctgaaagctatatagctgcaaggagccgtggcaggtaagatgagtataaatactctcttcttgattgagctcatacctccatgaagctaagtacatggtttgatggttgaactgatggccccatatgtatgactaatactgtaactatccaactcttgtgcatttgctgcttttggttcttgtccaattctgtggtaccagttgggtaagcttttcagtcagctacccctcagatgatcagcttagtatgaacgcactgtttttaactagttattacttaaatgttgagttagccataacttgctatagtgtcaactcttttgcaccaacaatcttggtttttattaggacatggtctctttgttgttagtttctccaatcaattttttcgatttgtagtagagccaagtggactatggcagtaagttctgatgtgttgaagattgtcttggttgctccatacctgttcaaacaaaaaaactgatcaatatattattttgtactgtttctagtttagatttgcagtagtgtagtaattcacttttaggttgctttacgtgtattcttttatttctagaagagtgaacatgattaataaaatgcatgaatttagatggcttaagaaaatggaccatacaaatatatcggtatagtgtatagtgtttatatgtcccaaagaaccaagaaatattacatatatttctattaaaaaagctaggcattgcattcccgaaatattagttt

SEQ ID NO: 22226 - DNA, 1594 bp, Oryza sativa
ccatgaggaactggaacttaaagatgtttcatcttccttctctgacaaaatatcagaagaaatctgcatttcggccgctaaatgggtaaccactgccaactctacttctattgttggactgctgctgtatatatgaatcgttttttcgctgttacttctttttgttattgtgcattgccatggttattatcaactcagactactgaattttgccatttgcatatctgggcaaggcctaaccacagctaatttgagttgcagccaacaaattggaggtagatgccgttttcgtctacacaaacactggccacatggcctcactgctctcgcggtgccgtcctgactgcccgatcttcgccttcacgacctcgacatctgtgaggagacgattgaacctccaatggggcctcatccccttccgcctcagcttctcggacgacatggagagcaacctgaaccgtaccttctcgctgctcaaggccaggggcatgatccagtccggcgaccttgtcatcgcgctctccgacatgctgcagtccatccaggtcatgaacgtaccttgagaatcatcatgctcccctctcgtgtttgtttgttctgcccaaaacggaacacggctttagttgacatcatcttaagggcggttttctggtttgaaatttattcgtttgttctccattgtgttagacgacagaaccagagaatgttacaacaataatgctgcaacttccagcgcgttgtaaactctatgctatttagcctgatgtataaggccatgaactgttttgtcgcttactatgataggctatgtatttaccaataaacccttctatttaagctatgtaagaattttcctcatcagaaattactccttgctagagccagtaaagattctttaaaaactccttgcacatcaaattagaactgagtagttttactttcatatggactttggccaaactagtcactaaccttttgagtgaaatttttaccttttttttttggacatgtatgtatgcagggtattagttgacctgatgtagccatgaatagtttttgcattggtacgtttgtttgaatagtttttgcattggtacgtttgtttggcatctgtcacaacccacaagtaggacgctagcaacgacataaaaatattttattggggcgtgaaaaatgggagaattatgttcgcaagagggtttgaccaggtagtcatgacattcttatgctaatctcaagtctcagccatatatcaaacatcttaatgcacactgcaacgtgttacgtgagtctcctgctaccgctagtctcccaagtctaccaaatacttgacccgtttttaaatacactcagtttgaaaccctccgttctaaattaagatgtttttgtttttttccaagtcaagctttttttagtttgaccatatttatagaaaacataactgcgtttttagcacaaaaacaagtgtactataaatatagccagtaatggatttaatgaatttggtgtgttactacgtatttctatgagcttgctgaagaaatctgacttagaacaaaagactaaaacatcttacaacctagaaagtagaaaa

SEQ ID NO: 22227 - DNA, 1732 bp, Oryza sativa
ccttgcgtttttgtcatgggaattattgtttttttctttttaaacatttccgatgtgtttgtaaagtatataaaaaattttatcactggtaattgtaatttctgaaaaagattgatctgatggtaccatggtaatgttcacgcttctgctaaattgattatatatattttttattttttttgtcttttgtttgggagacgagagcaagtgaatatagttttgtgtcactccttggtctctccccctgccttatttgattgttcatatctccttatttttattttatttttttgcataaaaaaagagaaaaaagctaagttccatgaagatataattatactttttgggtgaggaaacccgggcaaatatttatggatctattctcaaaagattatgagtaaccatttggctactcttttgtagctataaaaattgatacgaagatttgtggctgacctatcttcttgcaaggctcatatgttcatggaattctatattaagatttataataaaatagataaaaaatacatattgattgtcctaaactgctaatttcttatttgttctgtcataaaatatagcaacgtagaactggatgaaacacattctagtacagcgaatctggatatatactagtcactaatatcattattattatatatgtgtgcttagcagttatattaagaattagattaggattaggattgtgtcaatgttccataagagacttcgaatcctatacgaatctcaattttgcagttataccaatttataccctcccctccgtgggagaatgttcctctatagcaacctgtacacctgtgggtagacgtacgtttcttggcgaaagtagcgccgccgtcgttgcagccgccatcgccgcggagcagatcgatctactggcagcgttcggactgatggttgcagactcatttccattgacatcgtcgactaatgctgctgatccgtcgcatgtcacgccgccaccaagacccccgctgctactgagcagattgatttgtttctgaatctaggaaagatggctcctactacgctgccgcacctctatccacgatgaagttcatcgcctctccgacgtataccacgtcgccgccaccgcctccgtagtcggatagacccacgatttcctagtcatcggatatcaaccatcatcagggccaagagaaccgaggtgactccagcgagcaccttcgtctcggcgagggaggcaccatggtggccgccctgggccgggacacggctatatatggaagtggacaccgtggtgtctatggcttccataggcattatcgtgacggttggagaggtgatcaccatggtgggcatggacaggaacacatcatctctcacattggtttcctcccgccgctgccggcaccacattatcctttgtcggaatttctgccgccgccgtacttcggcgcataccatgaaccaactatcggatacgcaccccacagcgaatactatggatcaatggtcagccatgcacacccaggtatgtgagataacgaacacatcctctaccttaaaagataggtgactgagtcgcttacatgtgagaccactctactataggatcacatgtcagtgactcaaagtcatgtgacctaatagcagaggatccaatttggttagatatactaaaagttaagtttggtgaattgttatttaaaaaatatatattgatattcagttatacataccctat

SEQ ID NO: 22228 - DNA, 630 bp, Oryza sativa
gaactgattgtttcagggcaatgcagccttcaggctcttggctagctcttctagcttcttcaatccttcttcgggtgaagcagcttcgcccaattgcctcaccatagcgctcccaatgatcacaccatctgcgccccatcccgcaatctgttacaaggaatgaagcgacaaaggtcatgcaatgaattggggggaattaaacgtatactgttttgaacataagttcttgagtatgatttacctgcttcacatgctctggagtcgatataccgaacccaacagccacagctttgtccgtgacctagaaaagaacaagagattctatgagcatccttgaatgttatataaatgttttggagatgccaacaccaattcactgacgatgaatgatgcaaacctgcttgatatcctggagaagagattgcaccttgccactgacatttgcacgtgcacctgtaactccaacagtgcttacctgaataacataggagttagcaacaagccccatcataaatctagttcgctatcatcaaacagattcttgagatttgataataacaaatttccagcagtgcactgtgattacaagcattcagtttaattttagaacgttgaggtctatgaggtgca

SEQ ID NO: 22229 - DNA, 2655 bp, Oryza sativa
gttatcaagtcgctagcagtcggattcttggaggattcggttaaggaaattaatatattaagggaagcttatccagaagtgactgaattcaaagaggatgcggcatgtcaaattatctattaattaggaagagtttgttagttctcttttatctttaggaaagtgtgtttagtgtcccataaagactttatgtcttccttctatctttagaaaatttctttcttatccaacaacgactagtatctacccatgggtataaatatgtacacccgaggtttttttttgtaaactatctccacgatcaatacaacttcggcgcatcgccacctttttacttttctaatttttcgacgagtttatacttgtcatggctatttgcatcggcggggctagggttcgacactctgatattgtcaatctaagcacctatctatcatacatcttagataatctagtttggtagctcgatttacttgtatcggctgacattcgctttagggtttatattggtatcggctaaatcgcttaccatattagattagctaaggtatctaccaccctgaaaatcagtcaaaggcttgattgtctaaatattatgcttcctttcatacttagtgcagcatcagttaagtttgatctactaagtcgtgcttagaatcataatctctagcccgcttcttgattgccaataagggtttcatcagagtttcagccaatgaggttatctgaacgttgcatcggcttacaaggattgcatacatgttggatttagccgatcacaacaaatgtttcattgtctaatcttgtggatttgatgacatcggatattcagccgatgtatgttttaaccttcggatcggtgattattctatcatatcattgttagccgattgatttctactggatattattatggtttaattacattaccattagtcgattgttcaaaccctatcgacatcggctggaattattccatcggcttgtcagccgatcggctcattgatatgctatttgtatatcttgtcagttgcaggatcaaactgattgacacgcccacatctcatcaacctttggaccttcactggagctaagctaatctcccagtctgttgtgttcgttgacttagttcgcgccaacacagttctggcaccatcgactgagcgcagatttttcgtcaataggtggtcgaggcccgcctcgccggattccttattgcctccttaggtcgatacccggagtccgcatcacctcccgaggtcgatctggggaaagagaggaagaggggtggcagtggatgccgcttgcctcgctggagccagcctcgcctgctgagatactggtaagagagggaagagaggaataggggcagcaacggtagcgccctcctcaccatgtctgcctgctagagttgagctggagaagagagaaatattggacagttgggaccacacaattttttaattattgttttgctgattggactgccatgtgtacgccatgttgtaaaaaaccgcttcagattgaatgagagggtaattcatccggttcaaagaatttggggtgttaaatatctagtattgagtttaaggaggtaattcgagcaactgtaatagtttggggtaattcaaacttcttttttcccttaagaaaagaaaaaaaaaccctcatctttgtaattttttaacacctataatgcttttacaatgatcctctccttccttatcctccaagagccatccctcatactgtgcgccaccgccatgctcctgctctcagccttgagccaacaactaactctattgtacgttaacaaaataaagttgttgaatggtctcaaataacataaaattaagaggatagctagaccgtaggatcccgtgggaacgggatacccttccgttccgcgtcgctagcccccccccccacctgcttcctctcacgtagcattctactgattactcatggctgtgtttctagctacatgcatacatgtgacgtggctgtgttgctagctgcatgcatgcatgtgacgtggcatgtgagttgatacctgatactaaaactagtatctgataccaggcccaataccaacaggtatcgttcaacatcaattcaggtacacctagtacccgatactcaggtggtatcaggtatatgatacctcatgtaccttgataccagcactaggtatggtacctataggtatcagaccgatctaggtaccaggtacttgatacccaaatacccgatacccagtactagatctggtacatatgggaatcatgttgatctaggtaccaagtatctcgatgtacctatgatatcagttggaacaatctgggttggtcgatacccagtatcgaagataatacatgtaggtaccggtgatgatacatgtaggtactggtgatgatacttgtgaggtatcggtgaagatacatataggtgccaattgatgatacatgttaggtatcggtgatgatacatgggtaccaatgacgatacctgtctggtactagtgataatacctatgaggtatcagtgatgatacgtaggtactagtgatgatacctatcaggtattggtgatgatacatgggtactagtgattatacttgtgagatatcagttacgatatatgtaggtattggat

SEQ ID NO: 22230 - DNA, 2010 bp, Oryza sativa
acgcgctcatggcgccgatgctgtgcctggagctcaagatctatgggcagtggatgtcgagcgggcagaggcggctgtccatggtggcgaacccgtcgaaccacctgtccgtcgtgggcaacttcgtcggcgcgctgctgggcgcgtccatggggatcagggagggcgccgtgttcttcttcgccgtcggcgtggcgcactacgtcgtgctgttcgtgacgctgtaccagcggctgccgacgaacgaggcgctgccgcgggagctgcacccggtgttcttcctcttcgtggcgacgccgagcgtggcgtccgtggcgtgggcggccatcgccggcgagttcgcgctcggcgcgaggctcgcctacttcgtcgccatgttcctgtacgcgtcgctcgccgcgcgcgccgtcagcctcttcggcggggtcaggttctcgctggcgtggtgggcgtacacgttcccgatgaccagcgccgccgccgccaccatccgctacgcggcggaggtggaggacacccgcctcgccagggcgctctgcgtcgcgctcgccgccgccgccacgctcaccgtcggctgcctcttcgccaccaccgtcgtgcacgccgtcgtgctccgcagcctcttccccaacgacgtcgccattgccatcaccgaccaccgcaaggtgaagcccaagcccaagcccaagaccaccatggaggtgcactacaagatggatggcaatggcgacatcgagggcggtgctcctgccatgacgccatcgccatgcatgccgatggcgacggcagcttagaggatttcttttcttttctttttgacctgccaagccaacgcgtccacatgcacatgcatggttttagcggtttgaatttgataagatgaatatttgaaatacaaagtgcctatgaaaatttatattgttaatattttttgagtaagttgaactttatgtatctactagaagatggtatgtgctttactgttaaatactccatccgtttcaaaatatttgacgccgttaactttttctcacatgtttgaccgttcgtcttattcagaaaaaattatgaaatatgtaaaactatatgtgtacatgaaagtatatttaacaataaatcaaatgatatgaaaataataaataattacttaatttttttaataagacgaatggtcaaacatatactaaaaagttaacggtgtcaaacattttaaaacggagggagtatatggattagatgactatatattaaatgttatagaaatgataggtaaaatttagtttaatatatcgtgaaaataatgtaagtaatgatgatttagcatgtttttatgttgaactttaaaagataataaatcataaatataatattatagttttaggtgtttaatgggtaggaactttagagtaggtataagtttggttacatactttgagcctgtgacgccctagaataatcggggaaaaaaaaagatggagcaggcagcagcagctagctagctgtagctggcggcccattttgctggtggccttgggcccatttgcaataagcataaataaagcggaaaaagttcacttcagttccttcatctgtcatcaagcttcaaaccgttcctaaaccggaatactaaatataatacatccattatctttcaaaaccgagtcacactaaaggtgtgtttagttctaaagttttttttttccaaactttcaacttttcatcacatcaaaccttacttttcagtcacatcgtctccaacttcaaccaaattccaatctaaacacagcctaggtagtaaggcaatgttgcttccggttttaacagacgtagcactcttaaagcaaaaattaaaaaaaacataaaaaaccacgtgggatccgcatgtcagtgaagctttagacggttgacttaagtgaacgagctcctgctcgcgcatcggcctggcgcgcctctcctgctctgttggaccgccgcgcccagagcgctcgaccagtcggcgggcgatggtcg

SEQ ID NO: 22231 - DNA, 1541 bp, Oryza sativa
atagttggaaagcctatggggattcttggtgaaaatctatgcaagcttgtgtggtacgtcgcaggtggctcaacgtcgcctgagggggccacccggggcgcgtcctaccgagcacaccggtgcacgagtggttctcgcggagtcgctcgacggcgaggataaccagctgatggtgaacagctaccactgcaccaccagggagggcgtgcaggcggcggctggcggagcggttcgtgccgatggcgttcgatctgcgctccggatgcgattctgccgccgcggcgccggcctcccgccacctccgcgcccatcgccgcggcggtcgagcggctgctgccgtagtcctcagcggtgcgctaggccgatgcgtggccaggagtgagttcgttgaagccaaccggctaaagctccactggcatgtgggttctatgtagttttaattttttttaatttttgtttttagtgccacatcagttaaaaccaggagcttaaccacttaaccactcggatgctatactaagatgaaataattggcctcactctcctttttttttttactatggtttagctaaagggccatgcattgcaatggatactataagagataaaagaaagtaaaattacaagtttatagtattggtatatttttagagggttgtataggtagttaattagtcatataatgtcatatccaaaataaaattattcacgtgtgagaattttatgctgttagcttataatgtcagagacagatccgaacatcatcactaacattatttaagatagtatagctaccgagagtctgtgagtcttgactagcttgtgagtaatttttagagaaagtaaatcaatttactaggctgtgaaaaaaaaacgagcaagttaacagaaagtacacgcacgaggcgtcgacatacacggacgtatatacgtagacgtcgcggtcgtatggccgtacgtctctctgtattgcttctagaagcatcctcaagattggtcagctgctcgtctcaaccgctgctaaacgccgccaagctcttgactttcgaatagccgtactccctccgtccttaaaaaaagcaaaccctggttttcgtgtccaactttgactgtccgtcttatatgaaatttttttataattcgtattttcattgttgttagatgataaaacatgattaatattttatgcatgacttgtctttttaatttttttcataattttttcaaataagacggacggtcaaacgttggatacgaaaaccagggtttgtcttttttttgggacggaaggagtatagtatatgatcattggtcttttctatcaatcgattcagattttttttattgtacttaattattgtttttgtgattgtacgacgtcgtcctagccattattttaaacagttttttaatcctactgcctttacttaaaacaaactttcattcgtggctataaatctaaataagcacttgtccaaattctctatccatattcacgtaagtacaagaatcgatctaagtattgaagagaagagcggaaa

SEQ ID NO: 22232 - DNA, 2007 bp, Oryza sativa
ggagcatcggtgcgtcagccgtggattcgcaggtggtgagcggcgggtgaaaacccagtctggccttggccggaccgacaacgatggttcattccccctcctgagggcgttgtcgtgctgtctcacccctcaagggtgattgccgggtgaaagcccagtcttggctcctttgagtcccgacggacggcggcggtagttttttcgtcgcttctcttcttgaagacgccgttttggcatcccctagggggcgatctcgtctgtgtccctttgttagtctagtggcagtcggtcatgcttagcggcggccggtccggtgttagtcttctcctggacttgtgtgttggcaatgtcggtgtgtgggtggtggcatatttttttcctggttacgaccctccaaggttgtaatcttgtattttttttctgctctatcaatagaactttgcaccatctcgtgcaagtcgttcaaaaaaaagactagtttacagtgatgggggatatatactctctacatgcagacttcctcaaactattttttaagataataaaaatgttttacatctacatctccaacctctgtagttgcgcacacaactgatgagtttgaatacttcaaaaaaaatgaaaaatatataagaaccaaattggtgggacaaacactcaacttcctcaaaactgaatagaatatatagtgaatattttgataggactatagttgggatttagattcaagtaaaaaaatatgtatatttttctagctttttattgttactagagattccctgttttcctctttgttttatgggggcaaacttggacagtgtcaatgacttacagctaaccagcagttgatgggagactacgacatttttttgcagttggtctgtcaaatcattttaggttgtgatcgcctaaccaatgcagcatatacccatcaaacaataattaagcacacatcatcaagggaaaagccagtagttacacaactaaatcattatcccttttgcttatccattaataatgatgagaaaaagaagtgtgagtggggtgttgtctctataatttgtgacttttagtgagtttagaatgcatactagtgtccttgctagtaaaaaagaaaaggacagattagtgtttaacatgtttgattatatatggttcaaattaaatcactcatactactgtggactgtggcgtgtgctttgtacgcttattttaaaaataaagtctatgaatctcaattaaagcaagccattgctgtgcatgttttgtgagtgcaaatctctgctttagctttaaaaataaatcaatatctatatataaccttcaatctaaaattttatcatatgcttcatccagatttgcgctcacctaatattaactaccttgacgcgaaagggcctgtagcctagtggttacaagagtctcagtagcacctgaggtcctgggttcgactccccatgggagcgaatttttcaggatttaacggcgttgtgctttcagtgataggcgacgtacccgtcgacagcgaggcgcctgtggtgacttcgtcaatctctccagaatttgccggccaagtcttcgaagatgctcataggggtaaggtttgcgtgcgtgtgttcataggggtgagtgcgcgtgcgttgtgagtgtctgcgttgtactgtgtaattctcaaaaaaaaaatattaactaccttgacatgaaattagtagacttttgaaaagaggtgtaccgaagcaacgccctacctgcacaaaataagcaatgtagtatatggagagatcatggcaggatgaacctagctaccagtcaagtatctttagggcatcaattaattcttgccttctattatgtactttactctttgagaaaatcataatatagttctgttttgactaaggatttttttaattagtttagttatgcaaaatttaacattgtgccaaaaacatcttctcaaccttataaacacaaaaagtccagatatgaaggccaaatggtgcaaaa

SEQ ID NO: 22233 - DNA, 1471 bp, Oryza sativa
tttgactttttttaatgaaacacattacaaacgaaaacgctcataatatgtgcacactcacatctataaatgcacacacacatcctactcctatgagcaccttgagaagattgagtccaacatgatgaagtcaccacggatgtctcgctgttgatggatacgtcacttaccactgacagaataattagccgcaaatgtgagcacccatgtcaattttagaacttgaacccgactaggttggtttcagcaaaataaactaaccagttaaattatactcacttcaccttttgggtttgacttttgaccgcatatagcagaaaggcaaaagccttaatttaaaattacaattttcgttattatagaaaaatatattgaaaagtacaaccacagagtttataacttatttctatatatatagagagtaataataacatagttaaaatgtatacttgcatgtttaggcatggcggataataaaaataaaaaataaagcccaaaaccctatcgaaaagatcaaggcaaaatttactacagaatacttaaaaaacgtgtaattagttgtgggacaccgcaaatatgtgaattggctataggacatcccaaaagagtgataattagctactaaacaccggagacattattttatcatttctggtggaaacggagagaggaacaatggaaaaaggaccagatttccctatgtgagccaaggatgtcagcatctccactattttcatgtcctcttactcctgatgaggcacaccacacgcaatacggcgccgctgacaccgtccttctccatcacgccggcaggctcgtacgcaaacgtgggtagggcatcgatggcgtgataattagctactagacaccggagacattattttatcatttccggtggaaacggagagaggaacaatggaaaaaggaccagatttccctatgtgagccaaggatgtcagcatctccactattttcatgtcctcttactcctgatgaggcacaccacacgcaatgcggcgccgctgacaccgtccttctccatcacgctggcaggctcgtacgcaaacgtgggtagggcatcaatggcgtcgcggacactcacatcgtgcccactatgccacgtcacgctctccgcgcgcaccctcgccgccctcgccgccgcctgcgcacagcgatgcagccgcaaccggcgaggacggcgacgccaatgcaaggcggtaggtgctgcatcgacgagaagtggtgctattccatcggctccttgccgtggccgccagagccagtgcccgaggcagcggctgttgctcggcttgctcctctcgccttgcttgcgcctgggctagcatctgatgcacctgcaccgccacagccccagacggcggcttcttgatggcatgcgactctaacacaagcaaacgacacgggggtatgttggtacttccagcgctctttctctctctgtttccactag

SEQ ID NO: 22234 - DNA, 1276 bp, Oryza sativa
gtcgtctcacccaacgaacttttccggcgaactccccgacgagatcgatggccgccggcgaacggcaatcgaacaaggagtactaggacgcccttctttgttgtttcttctcggcaagatcagttggttggcaccacctgccattcttggtttggaagtgtgggagggaggggttcggttggtcgatgccgttgcggttgccgtgcgcgatggagacgaggccaccgcgggcggcggcgccggcgccggcgagggtgtcgaggttccggaggctgcttgtgcgggtgtccgcggagccggagcgggcgggcggcggcggcggcggggaggtgagggagaaggaggagaaggcagcggagatggaagtggggtcggtggggttggaccggatggtgctcagcttcatggaggattccgccgccgccgccgtggagcggcccccgcgtggccgctgcggcagctgttcaacggcggcggggacggcagcgacgacgaggagttcgacttcctcccctccgactcctccgccaccgccgccgcttcggccgccgccgccgccggcgacgccctggacgcgttaaaggtatagggcctttttccccggctcgattgtcgtttccaattgctcgccggagtgatcaacgctttgtgtcgtcgcagggcttggtgcagagcgcgagcatggcgaagaggaacctcctcgccgacgcgtcgaggatcgccgagaggtgccgcaagggcggcaagaagaaggccgacgtccgctgcgccgtcgccgacggcctcgccgccatcggctacgacgccgccgtgtgcaagtcgcgggtgggacaagaccccctcctaccccgcaggtaaactaaacctcgcccccaattcgatgctgctgaatcgccggcgctgaccggcggcgacggtgggcggcgcaaaccttgtgcaggcgagcacgagtacatcgacgcggtggtggcggcggagacgcggctggtggtggaggtggacttccggtcggagttcgaggtggcgaggtcgaccaaggcgtaccgcgcggcgctgcaagctctcccgccgctgttcgtcgggacgccggaccggctcgggcagatcgtcgccgtcgtggcggaggccgcgcggcagagcctgaggaagaagggcctccacgtcccgccatggcggaagccggagtacatgcgcgccaagtggctctccccgcaagtcctccgctgctcggacaagccgcggccgccgccgccgtcgcccccgcccacgccggtat

SEQ ID NO: 22235 - DNA, 1180 bp, Oryza sativa
gttaaaattgaagaattttgactaaaagaaaaaaaatcaaataaattataatatgaaacggttggaatagtttagaaggttaagtgaactaatgtaatataaaacaatttaaggtgtaaaatggattttctttccaatactaaaaaaacaagaaaacctccatttgaaacgatggattgacgaaataacgagagaagccaagccaagccatctccttcctcttggcctccgaccacctcgctcgcctcgcctcgacgtctccttccctcccgcctccaagcaacccctctcgccggaggaggaaaccctcctccgcttccaatccccaaatccccatccgctatatcaacccgatcccctccccgatcgttcgatcgttcgatcgatctcgccctcgactccaagccgacgagaggagttgaggagttgaggccatttcggtgcgtgcgcggcgggcggaggtgatcggtggcgtttcgttccgttggcggcgggcggaggtgattgctcgcgcggcgtggagcggtggggggaggatccgagcgggagggagagcgcgcgcggatggggtggcggagtcgcgcttcggcggtggcggtgctgtggatgctcgccgctgtggtggcggcggctgcgctggatcctgatcaggacgagctcgaacgcgcgtaagtgcgattcaccagaggcagcttctgattgtttgttttttttttcaatcgtatagcatcagactctgcttttggttgcattctgttgttgcctagcttaatggggttgagatacatggagattccggtgtgcatttttcgtgttcatctgtcgcacgcgatgctgtcatgctgcgaaattcaagttagtacggccgaattgcggctgttttttttcctatctcttaacgccacattggaaatgggcacttgagatgattgtgtgggaagtgggatattggaggggagcaggtagctctgatgcatggttgaaatgagaaaccaagtggattattcatgtgagatgtggagtaggtagccggtgtgttgctacttgcatcaaccggactaattgagcgtggtgggtagatactttgttggttaatggatgtcaacttgctaagtttcacctacatatgtggataattaagaaagggaagacacatcttgaagatggaaaattttgaagt

SEQ ID NO: 22236 - DNA, 1248 bp, Oryza sativa
actccctaacatgcaataaaggtacaatgagttcctgccttacatacataccatgctccaggaaagaggatacttggaatgatggattgataaattggctctgcaggttttggagttggacatatgcgagataccaaaacaaaaggtttggtggtgccaatgacaactttgtaatgttatcctaaatgattccatatcctaattgaaggattctaacactctgctccacatattgaaggtatatgggtctggggtactcccattgagttagatgtgaatggctccaaagtttctgtcctttacctggacactgagggatttgagagcatcggaaaatcaaatgtatatgatgataggtttgttgcttatagatgaaatgcatattaagtttgaattggaattttaaatggtgaaaaatggactgttagttcttttgtttttgttgcaggatatttgctctggccactgttttaagttctatccttatctacaatcttccagagacggtgtgtttctctggctcatgacatgctcacctccattctctcatttgatagctattaacttgacttatcttgatcatagattcgtgaagctgatatatctagactctcatttgctgttgaaattgctgaagaattctatggaaggtttgctttctgccattcctatttggagcttacaatttactaagtgcctccttaatgttctaacaaaatttccacttttctgtcggcatttgttgactccagagtgaaggtaatacttaaccttaagtgttagaattatttaaactagaaccactatgtcaaagttacagtgcttgtctctgtaggggcaagatgttgcttttgagccagcaaaactactgtggcttatccagagggatttcctccgtaagtttctgtttgcgttacatatgaacaattttattttgataatcaagtattcctttcagcatgttctgaatactagatgagaattagattttcataacaagaatagacaataaatcacaagtcggaccataaaaagttctaattgccttgtattaatgtttgtacattgtgaggtcggacttatgttgcggtacagactacagagggactagttaataacttgatatgtgctgtatattagcaatagtggaaatatacaggtctcgtgctttattttggtcaaatgtctattgttttgcatttcaccgtttgttgttgctgttttgtttttaggatattaaacttcttt

SEQ ID NO: 22237 - DNA, 1179 bp, Oryza sativa
tgtgagcatttttagaagtcaaatcgagtcaaggtttcatgtagtaggtaccatttcacccattatgaatagcaaaagggaaaagcagagatgattgtccatatgtagaattcgaaagtaaaacatctttattcaccttccttcctctttttttttcctggtaaatacaccagcacgttctgatatgttgtaagttttacctgaaactcattttttgtccaactatgttctttattacttgtgttgtgtattcctgcaccaatctttcttgaactgatatactccttgatgataaccttatctctgcatggtcacagatgctcgcaaggtctcgtgctcttttcatcaaggagtacaacaacaaactattcaattggctggtgacgttctccttgtcatgattgtgattgcgcgctttgtgatcaagttctttttactcgaagttgctgcatgggtgatattcatcttcttagagacatacacgagattattctggtcgtcagaattgttgtactacaatcccatctggcacatgatcgtctcttcatgggaaaccattgtgtataacccagttcttgatattgacaggcaagtttcttctctctgtgaagtgcacaacatgaatgtaatctctattttgccttccttactgttacgatgcttgtcttgtgcagatgggtgatcccaattgttgttgtgctatcatttttagctgtttactggcgttgcctcggtgtcaggaaacgaataggaagatcattgcttcctttgtacagaggttcttacggaagctccagtcgcccaagaacagattaatccaggtctagaaatggtgatgaatgatgcaaatcgctgggaaaatccatgaaaatatccttttgccgtgtgatggatagtggacggcaaaaggatgttggctctatgcacacgctgcaagaagcttctcttgcaatccaagaagggaatatttaggctcagctcacggctcttagtcttactgacccaccaagcaaagcaaacgctaacgtatgaatgataatcaatctttgttctatatcgaaatgcttatagtaacaaagaaatataaccatactttatttcaatgtaaagatcattctttgtatattatggcacactagataataacaaagaagatctggtagtgtacaggccagagca

SEQ ID NO: 22238 - DNA, 2721 bp, Oryza sativa
gacaaaaacagcgacaacaactactactacaaaacagcatttgcaggttgcaaatttgcacctccaaatgctctcatcatgttgttaggatatgctcctactactgaagctccatgttgacaagctcatttgcatccatcagagacgatccccatgctgtatattcattcgaacttgcgccgccaccacaagctctattctgaagatgctgcaagctcgccattgttgctgctgcagctgcactggatctgttgggtcaatcttctcgacagaatccacaatctggaacgctggagaaacctggtgcatgaagctgttaacaccggcattgttagcgttggagaagtagttcattgggttgttgttctggatcggcacagaagcatcagagttgacattgaggggagattgcatgtcaggaatggcctggtgaagttgtctagcccctgtaaccatcttcacactctcctctgccatcctcacctgcaatcatgtcaagatgttagctaacccacatcgcatggttcatgaattttcagttgtggtctagaagcatatggctataagatacgacaccgcagtagtgtagtgtagctcaggttctttgttaaaattgattgtgatccattgtgtgaattggttatcaccattcggcaagcgattatttacacctggtacgttgcaggaaaaagaaaagtagttacacccggttgtttcaagacaaaacaagtgagtctaattgttgcaggttataatagatggcaaacaacttaatccttcgaatggagcaagaggacaacatttgcaatatctcctgtaccaaattttaagaacaaatgctagaagttcgtttcattccaagaaaatttggtatatgtttgatatgtagaatattccggttttctacaccatgaaagatgcacaatactgaccagaatcaatgcacatggataattggatacctatttgaaagagaggttcagttcatacagaggactaaaaggcacttaaacagttgcatacctttgctcttagggcttcaatgtctgccattagtaccctattgtcaatagcagcagcactgtacttctgatttgcatcagcaagacgcctcaacagagaagagttttcaacccttaatagtgatacctgcaatgatttagcaacaattacacttgttacttacatattccaaaactttgttgtgcagtcaaatggaatagtgtaaaacacaaaacctgctcctccaggtcttttaggcgagctgcctttctgcttcttgagcgtctagctgactcccggttggattccttcctgaaattggacaagaacacaagctcaaatctcaaatatccggctgtatttattacacaaaaaaaggcgacatgaatgtctgactgctgcgaaaaaaaagaccacagtagataaactcaatttttcatatgtagaaaaagcaactagacacaacaggacatgatattcccagcatgttatgaaaagcaagaagcaaatgcctcctaaattgttctaatcatacacgttgcatttttccttttttgcatgaatagctgcttgcacggaaacaataattatccttaatgcaccagcttgtaacaagcattaccaaaattcagtcaggtatataaagcattgaaacacctagcaagcattagctcaagcatttctaagaaaaaagtgagaatgttgtatataatcaaatacatccagtacaaacatgaaacacctagaaagaaactaaggatccattatcttgataatctaaagcatattacttaaaagctatttctaagaaaaaaggaaatcaatagatgtaaaagtcccctaatttctaatgctaatgctcagtgtttactctttgtatgtgttgaattgaaaaataaaaatacacaagcaaaagaatacatattaccttttcttcactttatcttcttcatcaaggatcatatttcccattgcctctgcatctccttccatatcatcatcctctgatggtgatggctcccttgaggaaccactcgtagcttgcttggcatgagcatctgtattttgatttacatatgggcctgatcctccatttgggccaggacttaacttggtctgcactagtatcccgttacctgaatgtgtcgaaatagggggaaaatccaatcagatatatataatatgaaaactacattacgcaaaaattagatttgcttacaacattagagattactcataagtcataactcataggtactgagaagatttaactaagcacatatgcataatagaataccttcaatgcacttctgtgaactcaggatggaaccaactatactcagtgatgttttattgcctagaggactctcagaatgtattgcaccagaggcctgtggatggatggacatgccaaaaattgaagtcagaatgcaaagggacttaataactatcggagctaaacacacactctcatagttaattagttctaatggcattataatcttatatagggaaccgtttcacattgtaaactgaaatcaactagcaaaagctcagatcaacatgttctgtagtcatttgtaaactgaacccacataatgagttcaaagtatgatatccaattgcaaaaattatataccccacttagaaaactaacataaaaagaagatattttctccggtccaacaaaaagtacctcgaggtaccggtacctcccgg

SEQ ID NO: 22239 - DNA, 1707 bp, Oryza sativa
ccaccaccccaaatggtgaacccaccagtacaactgtacaagccatgaagcaagcaaagcaagcagcgatcgagatgagagagagtaccctccacatggcgacggtggcgaggtcctcgtccagcttccgcttcagcatcgcgttgtactccacggggtccatcgccgcgctcgccggcgccgccggaagcgcggccgcgggcatgggcatcacccccaccgcctcacgatcgccgtagcccctactccagcgcgccgccgcctccgccgccgccgccggcatcgggctagggtaaatcgccgcgccgtccgggctcgccgccggtgcagggacgccgtcgagctcctccagaaacctctcgaggttccaccccgacgggcaccgctccagcaacccgccgccgctcaccgcgccgacgtcatctactccggcggccgccgccggctgcaccggcggcggcggagcccacagcgggtcggggatctcgtcgacggcgaacacgtgctccattgcgctctcggacgagtttgaaatgaattcgcgaggggttttcgaaccgaaatcggggcgaaattgaaaacgctggaaaagtttgggagaaattcgatcaaatgctttggaatttggtttcgcgggaggaagcggagaggaggaggcttcggagagaaggaaatggtgggaaagctacggctacgcaacccatgggtttttttttcttctctttttttttcttttttttttcaattttgaactgagttgagagggtgctctcctctcctatttatataggtttgtcccctctttagaagcttcaagaaacgtaaaaagcaaaacaacccgcacgatcttgagtgataataccgatataaataatttggacgtgttaacagaggtttcaacggatataaagtgaaacccacacgatcaaagcgataacaacgatacggacgaatacgtttttattaggaaaaagggttaacagaaagcgtgcaagtaagctacgatggtatggtgttcctagcacaggtgtagcataattttgacaaggttctataaaggcatggatttatttgtttttatcttatcaaagtttttgagtgagggtgtagattacgcatccttaatttgacaatgataatataaggacaaatggctttctacagaaaaagaggaaaagtataacagaaagggtagcaaagacattcgtgaataagagtagtgatgctacttaagaaatgatccatctctatttactatgacaagtgtctatagtaatccaaactgattatatcaaactgacctaacaatgatatttcagtttgtaactttataccattgtcctaagaaacgtgccctacacttatggttatgctagcagcttattgacatgtatcatccatgttttctgctaactttttctccccctcctctttacttggttgctttcgagtttaatttcagaaatcacaagaatgcataggtataatgtggttgattccatgtgataatcaaaatggggacatgaaatttaaaagggggaataagatcagctgaaagtgcaatatgtgtcgcttaagcgcccattttgccacgtcaagtttttaagtttcttatgttctctagcatatttaatacatactacttagtcttttagatattattagtaacacaagcacatatgtattttatctttaaacgttaggacc

SEQ ID NO: 22240 - DNA, 3015 bp, Oryza sativa
atataagctcatctgatttcaccatgtaaaaggatctgagctaaagttggagcggcccagggcctgtctaaagtatgggtccgctcccaaccatataaattcttgttgaagaattcgaaatattcagcaagaaagaaaaatggaagtacaagacgatgaacataaaaattgcgtagttctaagcacgcatccaaaaactgtttctgaaagtggaaaccatgtgtttttttaaaaaaaaataatttaaattgatagtgttgacactaggaaactggtggaaagcctgccgccggctagtaacctaatggactttggacgatcacttatgattgtttttcttcttggtcattgatctcataaagtttgtttcaatcaatgagatcagaatagtttgtttcaatcaatgagatcagaatattaatttccaatcagatatttcctttaccaaatttgtccatagaatagtttgtcatgttcgcgtaattgtaaacacgcatcaatttcggtcagcaattttaaataggtcggttcaccaaagaggcttgtgcaattaggattgtatatatcataccattacatatagatgcttgaagatctgactttaaaggtatatactagaaaatagatgctttaaacccatacactcaatcaagcggctactctcggggcattgattccaggggtgccaaggtgcaagatcgacggatccggagatggctaccaaactccagcatctgccatggtaaaggtggaagcatggaggtctcggcatagccgtcacgtctgaccagcgagatggttgcggtggtgtgagcttggcaagcagggcgttccccgccattgaggagtccattgatcaacaagtcttcgatagcactccaatattcacggaagagccatttagtgcgagtgccatcgcttatacaatcaagtattgcagtcactgccaccaccattgctcctatttaatctcattgcgtagctcaattcttctttcgatggtcaactccttatttgatttaatcaggtaaatgattcccctataaatgttgtttgaaactttttttccttcattagtttgactacaatattgtcttgtttagtgctaaatcatttgaaatgagaccagaatggaaaatactggagtctaaaatggtgtggaaatagttctttctaattacttactctaggtctctgggggaaggaaagagagacacgtgtcaacatataattgtgcttcatcttaaccaatcagcgagcagcaaccttgccggcttgagatatataaagatattgctgaaactgcccgtgatatagtataactacctagaatatataaaaaatgtgacttttatcccaacacttcccaattctcatgctacctctatcatctactaacccttaaaccgcaccacaccatccattaatgagggcattgcagatcttttaccctaatcgttaatttctccaaaacatagaaagctatattttaggacagaccaagtatctaaagcatattgtgattttctctagtcaggagtgatgtacgtgtgcccttgaaggtactgctaggatcgttcaacagttcttcacaattcaggaataccaagaaaacatcacaacaggcagatatacgaggataattttcagaagcactttccagtttcctttgtacaatggccatatatcagtttaagacaaacgcaacacctcctgctacataagaaggcctattttggaacacgggaattccatggatccctacagggaaatatacagctaaagcaaaactccaactgaaattcccatgttccaaactaagactatcatccccaaagagcattcactaaactgtataatgtaccaatagtgatgccattagctttaagttttcagtcttctgccatggtttaactacggcttctcacgcagcgaatccacaaaaaccatcatctgtgttggaaaatattcgtcattatcatgtggtcaacctgctgtagtacatgaatcaacacaaagataagatgttgagatttaagtgtgctcaataccaatttgatatatggaagttacccttacattttttgccatgcctgcttcgataggactgcgctggttggcgagaacttgattgcctcacctgaacagagtgaaatacaaatggtcaagttatatgttggattgtaacaacaaaattaaatatcagaaatcaggaaacatttaacaagttagaggtgtatccacaggttcacccaggtttaagggtgggaggaagatctagagaatttgccataggaaatcatacctgactactgattggtgttcctgttagtccataataaaaagctgaaaatgcgtgatacattacatatattatagtccatatggaggagtcctttattaattgttagcaccagacacactgtataacatacctaggtgtggaggatatctattgctgtcatgataatgtggcagagaagattcagcagtagcagggggcagcgcaccatagctgacataagaggatgcaaaatgattaagtgagaaagaatccgctactctattctgataaataatatgacatatggggatagtttagaatttcagatcaccttgatgctgctgtagtataggtgctaccctcatgacgacgacaagaatgacctctcaatggataataaggatcaccctggattaaaatcaaaactacgagattaaaagatcagtatgcagtttttcaagacgatatggtttaacctaccagtgttgaaaagggacgcttctctccagaataaatgtgggtataatcttgaacagggtatcttactgtttagaggacgaaaactcagctgatagggattttaaagagaaaacaatatggcaaaacttcaaaaatatattgtattggacgacatgttaattgtaggaggggagcaaacacaatataataggagcgcacatagccagagtggcagcatgaaacagctagcagattttgcagcctagtgaaaa

SEQ ID NO: 22241 - DNA, 781 bp, Oryza sativa
ctttcattaaaatctgaagatttatgtgtcttgagctatcaatcttcagattataatgaagttggttgattaatgtagttaatatttacataggagaaagctggagccacagatgggtcaaacaattggaaatagacgacaagatggatggaattgggaatgactaacttttagaagtcttcattttgccttccccagtaatactagatttatggtcttccttggtctgcttgctctgttgggcaggtttagccaatgaaactttaatattcacctgggacacgccaaaagatgtaaaaatcctatcaattgtaaactaatactctgaattaatccaagtcgagaaaagacctttgagccgttcttactgaactcttccttgtcaaaagattcaagacacgagattgcagcctcacgagtaatgtaattaataaaggcaaagtccctccttttagctgacggcatatcgcgtgacagaaccacactttcaatcttcccatgtttcttgaagatttcttttagctgagcatgatcccaggacgttggtatcccatccacaaaaatcgatttaacctagatggaacaaacagtgcatcagagtacttagacttcccagggaagcgaaatcaaatatgttgttaagtgttcagaacttcagatatgattaaaggacttgaacggggatatgaataaagccaggtatgttaacaagtggaaacaaatggtcgttaacttatttatgtaataaggaggaccccgatgcacttcgaaccaagggcca

SEQ ID NO: 22242 - DNA, 2247 bp, Oryza sativa
tcatgggaaacacaattgagaaaataccgtaaactgcaatgcaaagaggacattagagaatcacctcccagcagagacatagcgatcaaatgtgtcagtcgggtaggggaggtcctcagcgtcaccctcaatgatgttcaccccattcagtgccaccttctgcctggccttctcaagctggtgtggagactggtctagcagtgtgacattctcattgtccacatgcttgacaatccccaatgtggtgaacccagtgccaccaccaacatcgacaaccttgagcccatggtggtagagttcagcaggctccaatgcatcatccctcatgtcctcggtccaatgccccgggtttatgacatggtcatacacaatggaaaggaacctatagaaccagaatgcttccttcttgtgttgtatgaacctaggttgtgatgctggcctagcagaggagaccgcgcactttggtgcgatatactttacccttgatctcacaccacttctatttctcaaaggaatcaaacctattttgaaggccccaagaatcctaatccaccgggagctctaaatgtagaggaagaaaccatttccttcattgttgtttgaaaacttggatcaaatcacgtatggcttagtgtatcgttgggcaagagaatactggttttatgtacgaaagaatcaacaaacaggaatggactaggtagctcctatgcttcatttgtgaggtttcttggtagatttacaatgcaaataaatagaagatcagtagatcacatatgagtcctgtacgatgcaggagagagggagctagttcttggccatggtaacctcagctgcaagccacaggaacttgagaacatgcaacagccatgtatgtaagcatgtgtgtgtgtgtagtcgtgtacagtatagaccttttttgtgatgcaacaaaaggcttaagcttctattccatcaggaattcaggatgctgatggctttatttgtcttcatctcctctagttgctccattgatggggcatgtgggttggggattgtaaacctatggatgacaattctggacaggaatgtatgggggacttgctacttggcatcttgcagtccttttagttctcatccaaacattacacctaatttgtttggtttatgctacataaacagctttttttttggaataacacaaattcaaaatgaaagttacaagagctgcccataacagtctaaaatacaagtatcatttaaagtacccataattttcagttctaaggaagattaacagcatatgtgtgattacacaattacttctgcaagtgaaaatattttattgtgtaaacttatggatttctttaagttcacaaactaaaatgggtgcaaatgttaccaacttaccatagacaaaacccatattttggtaatcctaatccacataatccaaattgataggtatacacctctcaactctaatgtggacaaataaaacatgtttatagatcttgctagttaagtaaaaagaaaaggctaacagtgacacctttctgcttttaatgatctgtaaatgactatatatctttagtgccataaaaaattctctatgagataaatatataggtctacgaccaaggagaactcatgatcaaccaaagtaaattgagcatacctggtcaatgtgaagaggaccatgaacaacactggagcagaaatcaagcaaagaattatatcgcatgagctctgatgaagatatacatcacatgggtacatcacagaaggggcagcaaattcatttataattgatttaccattactccaaagaacgtcaaggtgacttccttttttacattcacatggcaaaggtaggaaataaaaaaatgtgtaaaattggttagtgcggaagttcccaggagctaagattgaatttgtacaactatatcattcagagtgaagtaatacttttacagggccctggaagctgggacaagtttcaaacataattcctcaaaaaggtaactaaaataccactttcagattacttgttgagactatggaggatcattcaggatttagtagagtgaattgcagcttggactgtctcttgttaccatagtttcactttgaatccgctttaccttttgcttcactttgaaccccctttttcttcttctccagctctggaaatagcattatctcctaggtcacaccacttccgcggttctgcagccgctgccataatactggcagtggatatgtgcctga

SEQ ID NO: 22243 - DNA, 1345 bp, Oryza sativa
catattgatttacagcaatacttgggccgatcaccttcgccacctccgcgtcgtcctcaccatcctgcgccagcatcgcctgttcgtgaagaagaccaagtgctcgttcggagtcaactccgtcgggtacctgggccacaccatctcggcgtcgggtgtggcattggaccccgctaaggtccagccatccacgagtggccacagccccgctccgcgcgtgccgtgcgcggcttcctcggcctggcgggctattaccggaagttcgtccacaacttcggctccatcgccgctcccctcaccgcgctcctgaagaaggacgggttcacatggactgccgacgccgcggcagccttcctcgccctcaaggaggccgtgacgaccgcgcctgtgctggcgctcccggacttcgccaagcccttcatcgtggaatgtgacgcgtccacgtatggcttcggggcggtcctcatccaggacggccacccgatcgcgttcttcagtcggccggtggcgccccgccatcgctccttggcagcctatgagcgcgagctcattggtctcgttctcgccgtccgccactggcggccatacttgtgggggcgccgcttctacgtcaagacggaccactacagcctaaaatacctcctcgaccagcgcctcgccacgattccccagcaccactgggtgggcaagctgctgggatttgatttcaccgtggagtacaagtccggcgcgacgaacacggtggctgacgccctgtcccgccgggacaccgaggaggcttccctgagcacgatcatggcggtctcgggaccccgcttcgacttcatcgaccgcctccgccaagctcaagccagggacccggctctggtggcgatccacgacgaaatcgtcgctggcacacgggcggcgccgtgggcgatcacggacggcctcatcacctacgacggccgcctctacataccgccaacatctccgctgttgccagagatcgtggcagcggtccacgacgatgggcatgaaggggtccagcgcacactacatcgcctccaccgcgatttccattttccaaacatgcgtcgatgtgtgcaggacttcgttcgggagtgcatcacgtgccagagatataagacggagcacctccaccccgccggactactgctgccgctgcccgttcccaccgtcgtctgggctgacatcgggctcgacttcgtggaggcgctgcccagggtaaacgggaagtcggtgatcctctccgtcgtcgaccgcttcagcaaatattgccacttcatcccgctggcgcacccgtacactgccgagaccgtggcgtaggcgttcttcaacgaca

SEQ ID NO: 22244 - DNA, 2380 bp, Oryza sativa
ctgcatgctcgtgtatggtaattaatattgttatctaaagtagaatagtgggaaaaaagtctcactatgttcctttcaatggttctggcatgatttgttctgttataaagatacattattctttcaatgagcaattggcatttagtttggtcaggtttcttgtaagtcataggcttatcatttcagtactatgatagtttgtatttaaatgatgtattagcactgatttgcaacctgtgtgaccttttatatccacatgctcactttttggttgatatgtaggtgagagaggccttggagtatctacacaaaagccactttattttaagggaacaaacatgcatcgcattctgaaaggttttatggctcaggtactgaaaattaaaccaaatatccaagtcctctggccactgcatatttctttgtatcaactcacagtatgtttttgttcttttatgggatttcaaatgctgaactctacataattctagaatgtagatatgaatggcttgctagttatacagcataatcccagatttttttttgttccatttgcaggatatatctactctagattgcattctagcatccattttttccctaactatactcatcttatcaaaattttcaactgcagggtggtgatttttcaagaggagatggtattgattcattatcccaggcatcttctttcaactgacttcttgctgttgtacactttatagctcaacgttacatgctgtttccaggacgtggtggagagagcatatatggtgcaaaatttaaaggttaatgactaatgaaatttgtggctgccatagaatttttttaatccaattagtgtcaaatgcattagtatgctttcgctaaagtttttgtatgtactttctggtgttctacagataaaacttcaagttaaagcatgaccaacctggtgttctttccatggaaatgctggaccagacagtaatggatcccagttttttataacattcatgccaacaccacatcttgatgggtattgcttctttctgttagtcagttggcaattttctctgttaatctctcttctagttccttgtgcatattaagttatgcctttctttctttccttactgcacaaagatataggcttgatatctaccaataccaaaatttaacattctagagagatttagtctattaaaaaaccttgaatctaaaaattctgtacaaccatgaaagatcaattagcctcatgcatacacacataaaagttgccatttgttaaataatatcttataaacagcacatttatgtctatgtatatacaccatagaaaactctctggagtgggtgtgtgtgtagaacacatcattaagccctactcctttcttaaatgtgtctacaagttgtgtcaggtaatggttgagagtatgtggtggctccaacacagtgtatgttgcccacagaagtaatcaatttcctaatttctatggtgttttcctgtggataagaagtcatataacttccttttaccaatggctccaaaatctatcaacttcaaatgacttaaaattataatcgtgtaccaaacatgtggtctttgggaaggtggtcactggaatgcccttgctgaagaagcttgaagcggtaggttctgataccggaaagcctacttgtgaagtgaaaatcgtggactgtggtgaagtctctgattcccagaatcagctaaagggagagaaaggtaaaaagcaacataaacagataataccaaacagtccatgtgttgtctggttagctttctcactacttgttcttttgcagaaaagaagctcagaagaacagaagacaattctgctgctgaaaaaagggtcaaaacccaaaaaccacctactcatgataaacaaaagaaaaagagaaagcattattcttctgattcctatagctcagattattctgacacacagtcctcagatagtggctcggaatcagaatcatactcttcgtcatcattggatactagctcatccagcgaccacagacacaagagaagaaaaagttcgaagaaggataaacacaggtctgcaaaggggaaaagcaaacacaagaagactaagagaaagagtagaggaacaaaaaggaaatccaaacggtacgttgatgacctgtatgatcttggtagtgttattagcttataatgatgtatttgctgaaagatcccctgtctggagctttttacagaagctacaggagctcaagtgatgattcagatagctcaaagacaggcggcagcagttctgacagtgaaagtgaaggccgtcgtacgactcgtaccaagcattcctcgaagaaaggtaggacaatagaagagtcaattcacattcatttgctatgaaaa

SEQ ID NO: 22245 - DNA, 1077 bp, Oryza sativa
aaagctagtaaattaaggtttgattacttaaaacaaattacttactgtcaggttcctttcagtactactccctccagtcacaaatatgtgacttttggaatgcgtgcaccgtgcagtcaacatgtttaaactttgaccatcaatattgctttgaatattttgaattcaacttttaaaaatgttatgattatatttgtcttaaaaatagtatcaaaatattataccagtaattcctaataaaataattgtcttgatgactgtgtcattgtgcaaaacgtcacttttttgtgactggagggtatttagcagggataaaaatgtcctgttcaacattgagataaccttatcctttgagtacccaattgagatgtttgtttgtatttgcagggatgatcctggtgcgagagctaggagcagtcctattagggctgatgcaagtttaacaaaagtggatggcaacaatggtgctgatactgcagaggctggtatatctagagctgaacctgtgccaaccaatggtaaagatttagcaatgggctctacagacaacggacagcctcaacgtgtcaggaaggggcgtggttttactcaacaatatgcatttgcacgtcgatacaggacaccatctccagagcgttcccctgttcggtctcgctacaatgatggaagaaatgataggtggaatcattttaataggtactgcagttagattatttaccacatttttttaaaaaaaaatgatgattaatttaatgtttggatgccatcatgtgcaggtatggaagaaatggtccctacggtgcacgctcaccagtaagaagatatcgtggttccccaagagccagtagtccgtccaggttggtatcttctgattatccttggaatctcctagtggtcagtaccaattgattgggtagagtggatgaactattttgaatatagttgtgtactcttcatgagttcatgccttctttggggttaacagtgtagtttgttattatttagtaccataatacccggggttatgtgcaacgtgccgaaacatctgattttgttcaacatggcccatgatgagct

SEQ ID NO: 22246 - DNA, 647 bp, Oryza sativa
ggcaaaatgtgcaaccggagattcaattggtccatcgtcctttttgtggactttgagatcatgcagtgtctcctgaaatattatgtcatgcaatttcttttaataactaatccatatattgtttatgcttccaatcttcgatgaaagcatacaagttaaaaatatgccatactcaaacaaccactccacatgtgacatttcattgcttaatcacccaacagctcctgttaattgcaaaattcgtgcttaaatattcaaacatttgttttccattgtaattctatatatcttcttatggattttcaagtagaaaaagtaatactattttatatatttgcaaaaacatacataagtgtgcatcacatcgaatatttagcaaaataacatagaaaggttgcacataccgggagccacatgcagcttataaagataataaagcagaagaccgatatacataaggaaggtaataagtacgggtacctatgaaaagaatttttaaaaacagtaagttgaagccacttgtctattgtaactgttttttttaataaatgtattataaccgtattcatatgtgatactaaataccttccgaatagtgagttgccaggaaataactttggatatttttccgttggctatcagacaaa

SEQ ID NO: 22247 - DNA, 16730 bp, Oryza sativa
ctctctctcctctatatctcacgcggtctgcacggtcacactcactctcggtctcactccctggagctggagcgtattaaaacccttctccgtccattcgatcctgccacttcctttctctcgccacgatctcctccatctctctctctcttcctcctcgccggccgagtcagctatctcgccgccgcctgagtacgtacgtccgtctcggtatggccatggccagtggcggcaccgtctgctccatgtgcggcgacgtggggttcccggacaagctcttccgctgcgcccgctgccgccgccgcttccagcactcgtacgcactcctccgtatttgcctcgttaatttctacctctctccctattgattcctggcgtctaggtaggtacatagtgatcagaactgacgcgtcgtggcaacggatgcatgcatgcagctactgcaccaactactacggcgacggggcaccggtggaggcgggcgccggcgtgtgcgactggtgcctcagcgacgccgccgtcgtcgccgggaagaaggggccatcgtcggaagggaacgaggagccgttctccagggagtaccgtggcaggagcaagcaggcggcgtcgaccggcggaggcgagcaggagggcggcggcggcggcggccggagggtctccaaggccggcgctgtccgtaggtacaagcttctcaaggacgtcttgtgctaaagagctatggtctaatacggaccatagctgatggatcaatccttcattttcactgcgtcaccccgtcatgtacaaaactagctctagctagctaggtgcccatcgctaggtaattagatcatccctgtgtaaattgtccccgtgttaattaaccgcgcgtgtgtgtatgaatgtatgatactactccatcctagctaattaaagctatatgtatgttttcatagacatgtcatgtttgacgagaagtatcaacttgacaactagtgaaaggaggagctagcctaggtcttgtatgcgtgacattcaccaactaattgtcgtcaaaccctacttgcaatacgtgcggtgcttcccgtcattcattatcgatcgtcatcggatcgaggaaacgagctagactgtcctcaactcgatcgatcggttgatgtttacgctccaaatcgcgatcagtctccatccacatcgatcgtcttcaaacgatcgcgaaacacgaaccatacacatcagtactagtacttaattaagacttcaataattaagcactattacacgtctgcttgattattagtttcatgcatgaaagacgacgatccatcatccatcccttcctctggcacttgcgatatgtacgtggtactcggtagttgatcggtacgtactaatccagaagaagactctagaaggcgatcgcgttgcatgctcggcaccctcgccttttttttcttctcctcggcggcgtgccgatgcagaggaatcaaatcaacaactcgtacaagtacggagtatgctgcaaaatattaaaggactccaaagtggccgacaaacaccatgttatattccccccacttgtgggttagcctcggatggcacgcagatctttgtgggcgcgtgaatccatctatccactcgatatccgtctcgccgtggccgtcagatggatatgtaagatcgagctttggcagacggacagcacagtgtacgtgctccggtcaatcagagctattcgattgatctgctccgtacgacgagataaacgaacacggttggtgtgcgtgtggcttgcgttgcggcacgtcgatcgccctatcaccccgcggccgagcggccggcccgtgcttgcccaaatgtaacagtggtgttggcattttggcagaccatgtttgaggggcacactgccactgtatatcattatattagatagatcggtctgtcgaaccaagtgttctagtgtaattttttttatgagaatttggaaaaagggtagttgatgagtgtgcacggactaacgtggcatatttccgataactgtttattcaacagtagtttatattttctagataatggattaaatattcttcaatgataatatctattatattattaagacagctcgaaaagaagacaccacgttcaccgtggaggctagaaattcccacgttaatcgaagaaaatatgaattatttacaccgttggattgtaagaggcatagatttcaatgtctgagatttaagacaaacttggcatgttaattaagagatacggagtaccgtacgcgtgtagaattagaatcaatctctagctaggacctttacatgcaaacggactcaaaagagttttgtccgatttcctaaaccaattaaccagagttagagatgaattaggctataatacacatatataaataaagcagcgggcaacgaaccactatagaacagtaatttggatgcgtttttgttgatatgaagatagatgctagcagcgagcgacggaaatccgaagcagcgggtcaagccgtgcggctgcacagtgagccgtatttgggtgatgcacacgtcagcaaccagaatagcatgatggcatgtgcacggatttttatttgattttgaaataacacaataaaaaatgaaagaagagttcatgtagaacacaattaaagattaattgaaatccataataaaaaataaaatagatttagaaactagaaaaatcaaatataagagttcaataagagttcaagtaaaaatacattttacgaacaactgaaattaggaataaaaaataagaaatattagaagaataattcatatagacatagtatgagattaataaaaaaatatgagattaataaggaatattaaaagaagagtgcatataagaactcaatatgagattaataaaaatttggaataaaaataaataaatccgaaattagcaaaagaaaataaaagaagaattcaagtaggaatatagtttaaaattagctgaaattcggaattaaaaataagcaatattgaaagaagaatccatataagaaccaatacgagattaattaaaatttagaataaaaaataaaataatatccaaaattagaaaatttaaaagagagttcaagtaggaatacaattttgaaacaactgaaattgaaaataaaaaataaaaacattaaaagaacacaatacggtaataactatttttttaaaaaaaattctgaaattagaaaaagaaaaataagatttcaattaggaatacaatttataaataactaaaatttttgataaaaataaagattattgaaataagagaccatctaaaacacatgatgagataaattaagtaacatgcctataaaaaagtagagtggtggcggttgatacgacgtataaaaattgttaataaaacaccaaatagaatcctaatgacgattaaaaggagggacatcaggcaggccgtgaagcaaacgagtaaggcggttaccgggacttctagaaagtaaaaaaaaaaaaataaaccccattgataatcatattcgatttttaaatctcaatgacaataaaaaggagaagcagcgggcggggtgcacaagagtatagttgcagagccgccgacggctgacgggacttatagaaaataaaaaatgaattccaacggtatttatgttcgatttttagaatcacaatgataataaacagtagacggcggacgggctgtagaggggcatagtggcatcgtttgatgggacttctaaaaaatataaaaaatggaactacaagtccaatttttaaatgttcgaaacttctaaaaagtaaaaaaaaacactaataatcatgttcgattttaaaatctcaatgacaataaagaaggaaagcagcgggcgagctatagaggagtacaatggtaaagccatagacggtttggcgggacttttagaaagtaaaattgaacctagacaataattatgttcgatttttaaaatctcaatgacaataaagagaagagacattagacgggccgtagatgagtataatggcaacgtttgacgggacatctaaaaattataaaaataaaacccaacatgacaataaactctagaaactataaaatctaatttttaaaggttccaagaagaataaaaagaaatagtggtatatcgagcaagcaaataaagaacgagatgacataaggggtagcaactggtgtgacttttaaaaactagaaatacgaggatgataagggttggtctttcaaagtcttaagacaataagatagctatctaataaattttaagtaaaatcatataaaaaatatgtgatttttttaggtgctagccgcgcaattgtgcaggccatccagctagttcgtttcattttacaagtcgctttggaaaaaatatagtaacattaatttttcaacacaaaacaaatatattattataatgtattcattattagttttaataaaactaatttgatgttatagatgttattatttttttataaatttgatcaaacttaaataagtttgtttagtaaaaaaatatcaaaacacgacttatatatgaaacgaagagagcattagttagtgggcgtgtacttcaagacttcaagtcaacccttgtcaatgctaaactgggatcaaactcaggaagttatggtctactagcatggttaacaattaccaggcgagcagatcggatgcataggtgtttgagcggtacggccactgtgtatcggtcaaggactgcctccgttctggaatagtgaccgagcacgtgtagggggtgcacagcaaagacaataattctcgaccctggctgcctgtcagcctgtgtgctaaaatgtgttggtggtgtactggtgttcctgttggtgtgaccgtgatactaggctgaattggtgggaagcttgccggagaaatgatcaaagagcatagaaagaattttgatggccttttcatctacacgacatggaggatttggctacaaagaaatgctagaaattttaacaatgactatggtacagcatagtcattgtcacatgtggttgactcaacatgtgcaaagccttcgatgaagcgcaaatcgtttagatgataaaacgccgacttttgctgttagtggctttgtactttctcaaagtgctataatctcctccagtgcataaatctgaagacacctcttggagatgtccctgtacgtgaaactgcttctttctcctttaatgaataggcagaactcgtgccattatcctctcgaaaaaagatactaggctggattcagactttcagagaagaggatcacagtatcctgtgggtctgcttgggctggtcgagtgggccacagtgacaaattgtcgtagacttgggttaagcttaagcctgatccggtaactttccgatcttcttgggccgctgaagaaatctcatgcaaatttgggccatggaagtccaacgagctaggcctattgattcttgcctacaagcccaagcccgtgtacaacgcatcccacaccgttcgttccgttgctgcaactgagctgccattgctggatgcgtctgtgacggaatccaaattacctgagctgacattacacaaaactggaagacaataaatacagaatagcaaagcaaggatcggatttccgattaatcacagttcatacatagataaggtgaagctggacggataacaatatttgagcaagaaacactaagcaaagaaggaacgtgcagcttgcacactgagggcaggcaggcagacagacaaacacaagagtggcactcatgtggaaaagattccgaattgcaggcgtgatttctcaatcatttctgcgcaaagcgataaggtaattaacaacaccattgcagcctcgcagcgtcattaaacgacagcaatgcacagaggaatgttgccgcttaataatgcagagagcaggacagcgcaactaatctctgaaaaattagtggctaggagccttggatcatagcaaaaaagtgctaacaactgcactataaaatgcgtgcctcgcgagtcacaaaattggctgttgtcagagaatatgaaattgcagaagattcttgcaattttcctgttaagtgcatttctgcatgatgtctgcatgacctacatgataggagcacaaagcttttacatctttggtaaggctttcacttacatggattaaaagaatgttaggtgctagcgaaatactagtggagtaattcacagcttctctgatgtaattttgtcggagctaaaaccctgcaagctatgataatcaaactagactactgatgttggatagaactgcatattgtcaacaactccaccgtccagatatcagccatgcatgcagtcaacgaccgccctcactacaaaaatttctcttctgttaccatcaccaacatgtataaatgattaaatgtactccgaacaaatgaaatctttcacctttgctcaactgcacttccattgggggaggaaatgtaggaagaataattttcaatggttacaggataaaagaaaccaatgtatcaagtcctaatcatcgtctgtccttgcctaatgacgtctttgccaccgatttagcactatcattttgctgtacctgacgcgaacttcgtatatctaatattatatttcatcgacttcaaaatttagagttcccatttgctcctctaccgatcggtgatccgaactatctagaaatgtagaaagtgcagtttgaagacatccagtataacctcactgtatctagcgaagatattctgagttgagaatgcttctacctgaccaactgttgaaaaatgcgagctttcaacaagagggcaataattatcagccaaatcacacagcagactttccctagttactcgtatttgtcatgcatatggaagtattccctccgtttttaaatatttgatgccgttgactttttaaaatatatttgaccatttcctatcatttaattcattgttatatatatatatatatagacacacacatacatatatatatacatatacatatatatatatatatatatacatatatatatatacacatatacatatatatatatatacatatatatatatatacatgtatatacatatatattacatattccacaaaagttcttgaataagacgaacgatcaaatatgtgctaaaaagtcaatggtgtcaaatatttagaaacggagggagttgaactagtttcaacagtcagacgaaaaacaaattgtgaaccattttcctgcacaagctaccttttcctttgaattgagaggaagagttttacgcaacttgtcaacagtggcttttcacggtggaacctaataaaattcaaaattttctaggcatgacgttatattttgtaaaaggaacaaaagcaccgggcagactttttgagtgtacactggcaagaaaaaagaacttcacttcgtttcgtcagaatcataagaaacaaaggcagcaccgcagcacatcaaacatttcctgccattcaaatgcacaacatatgatccatattattactgctagctaacatccagagtcttagtattctcatagccacacattagtcctactcctacttaaatttcataatagcaacaaaacatttggacaaagcaaagtgcggttgggcagaggctagtatcaatcatagaacaagctagcgtctaattaaaatgtttttggtgatcatccgcaccgcccgttctattctaaaccacaattgaagctgacgaattaagttgccagcacgacgccatgtgtataaaaggggcctaagctgaacgagcttcgccacatcagtaatcgccaagctctctttcaagcgtagagacctctccacacttatcagagtaataaggaaaaaaatatagattaaaaatggtgaagctcgcattcggaagcttgggtgactccttcagcgccacgtccgtgaaggcctacgtggcggagttcatcgccaccctcctcttcgtcttcgctggcgtcggatccgccattgcctatggtgagctcaacgcattttccggtttgatatgtacagtagtatgtttcatttctgacctaccgacggcttggtttgtgtagggcaattgaccaatggtggcgccctcgacccggccggccttgtggcgatcgcgatcgcccatgcactcgccctgttcgtgggcgtttccgtcgccgccaacatctccggcggccaccttaacccggccgtgacgttcggcctcgccgtcggcggccacatcaccatcctcaccggactcttctactggatcgcccagctgctaggcgcctccatcgcctgcctcctcctcaagtttgtcacccacggcaaggtcagcacgcacaccatcgccatagattaaaggcttagatttaaactgctgtgtatatatttcccgacaagaaggacagcgcgattaaccggtgaattcgatatccgaacgcgtgtaggccatcccgacgcacggcgtcgccggcatcagcgagctggagggcgtcgtgatggagatcgtcatcacgttcgcgctggtgtacacggtgtacgccacggcggcggacccgaagaagggatcgctcggcaccatcgcgcccatcgcgatcggcttcatcgtcggcgccaacatcctcgccgccggcccgttcagcggcggctccatgaacccagcgcgctccttcggccccgccgtcgccgccggcaacttcgctggcaactgggtctactgggtcggcccgctgatcggcggcggcctcgccgggctcgtgtacggcgacgtgttcatcggctcataccagcccgttgccgaccaggactacgcttaaaagtggatgaaccgaattaattgaagtatccgtgtcagtttgcatgcatcgtacgtttgcttgatttgatattcgtcgtgtgtgatacgttcacaggctttgtattttccggtttaccttctttttgtcaaacacggtacatgtaaaaggtcactttctgcgattgttgtctggaaggggaaatcaaaattgtaaaatttcatcgacacaattgataagatcaatttgcattagatttggtttgtaccaggaaatttggaagccatgtcccttttctggctaagataatctatctatctatctatctatctattatatctatctatctatctatctatctatctattatatctatctatctatctatctatctatctatctatctatctatctatctatctatctattatattattaaaacagctttgaaaggagacatcacgttcgctgtgggggttagaaatttccacattaatcggagaaaaagaaaaaaaaagagtccaagtagaagtacaatttaaaaatagctgaaattcggaattaaaaataaacgttcgctgtgggggttagaaattcccacattaatcggagaaaaagaaaaaaaaagagtccaagtagaagtacaatttaaaaatagctgaaattcggaattataaaaataaacaatattgaaagaagtttccatataagaacccaatacgagattaatcaaaattcgaaataaaaataaaataaaaatccaaaattagaaaaggaaaggagagtccaagtagaaatacaatttaaaaatagctgaaattcggaattaaaaataaggaatattgaaataaatttccatataagaacccaatacaagattaataaaaaattgaaataaaaataaaataaaatccaaaattagaaaaggaaatgagagtgcaagtaggaatacaatttaaaaatagctgaaatttgaaattaaaaataaggaatattaaaagaagagtccatataagaacccaatacgagattaattaaaattcggaataaaaataaataaatccgaaattggcaaaagaaaataaaaaataagagttcaagtaggaatacaattctaaattagctgaaattcagaagtaaaaataagcaatattgaaagaagaatccatataagaacccaatacgagattaattaaaatttagaataaaaataaaataatatctaaactagaaaaactaaaagagagttcaaacagaaatacaattttgaaacaactgaaattgaaaataaaaaataaaaacattataataacacaatacaatattaactaatttttttaaaaaatctgaaattagaaaaagaaaattaagatttcaattaggaatacaatttataaataactaaattttttgataaaaataaatattattgaaagaaaagaccatctaaaacacatgacgagataaattaagtaacatgcctataaaggagtagagtggtggtggttgatacgagatataaaaattgttaataaatcaccaaaatagaatcctaatgacaattaaaaggagggacgtcaggcaggccgtgaagcaaacgtggaaaacggttgccgggacttctataaagtaaaaaaaaaacctcattgataatcatattcaatttttaaaatcttaatgacaataaaaagtagaagcagcgagcggggtgtataagagtataattgcagagccgccgatgattgacgggacttctagaaaataagaaatgaattccaacgatagttatattcgatttttagaatcacaatgataataaagatttggcggcggacgggctgtagaggggcatagtggcatcgtttgatgagacttctaaaaattataaaaaagtaaactgcaagtctaatttttaaaggtttggaacttctaaaaagtaaaaaaaaagcaaatgataatcatattcgattttaaaatctcaataacaataaagaagaaggcagcgggcgagctgtagaggagtacaatggcaaagccgctgatagtttggcgggacttctagaaagtaaaaaatgaacccaaacgataattatgttcgatttttaaaatctcaatgacaacaaagagaagagacagtggacgggccgtagagaagtataatggcaacgtttgacgggacatctagaaattataaaaatgaaatccaacgtgataataaactctaaaaactataaaatacaatttttaaaggttccaagaagaatgaatagaaatagtgatagattgagcaagcaaataaagaagaagatgacataaggggtagcaactggtgtgacttttgaaaactatataattagaaacacgaggatgataaggtttggtctttaaaatcttaagacaatgagatagctaaatagctatttaataaattttaagtaaaatcatactaaaaaaatatatgattttatttaggtgctagccgcgtaattgcgcgaaattctcatattaatcggagaaaaataaaaatagagtccatatagaaatataatttagaaatttaaaattatattgtcattttaatatatttgaataatacattgagaaaacatatatgttattatatgagagaaaatataatgatgctagccgcgcaatctgcgcgggccactatgctagttattattaagacatctcgaaaaggaggcaccacgttcgctgtgggggctagaaattcccacattaattagagaaaaaaagaaatatctacaccgttagatcgtagtgggtccagattataatggtgcagattgatcaatgaatatatggaaagaatcatacagcaaattgatttttcgtatccgtgttgttgtactaattcgtatccgattaaccatcgaagaaaaaaaaaggacatgcactgccatatatatatatgcatgcctaaatagctagcctagcactcctggagaaaatatggatggcgtcccggagagaaagcacaccaaatgtcatgcatttttttcaatagattgatgactagcacggcaaattggaagggagtacctgtcgtcatatttttcatcaaataatagtaagcatgtatttacgttataagtccctaaaattatatatgtaattttaacgtatttagactataagtctcaaaattattacatatgtaaatcccaaacttatatatgcaagtgatgtaagtctcaaaattataaattattggcgactaagatatagggttttcgaagattaattggtaatcctaattagcaaataacgtaaaaagtatagaagaaattagaaaaaaaaaagagcggagtgatagacacgtcatgatgaatcccaaaatttgatctcaatacgaattcgtagaattcgacaaagttcaggtaggaatacaatttagaaattactgaaatttagaattaaaaataaagaatattagaagcagtgtccatctagaacacaacaaaatattttttaaaaattaaaatttaaaataaaatacaactccaaattggtttttaatatgaattcgaaagagttcaagtagtatctatttatcatattattgaattttaatattactaaaaaatatttgttagatgatatcatgttaaaattatagtggttaaatttaacacaaaaatcaaatagaatcccagtaatgattaagagaaggaatgatgggcaagctgttaagcagcacaatcacagtggttggcaagagttttagaaagtaaaaggtaaaccaaaatcataatcacgttcgatttttaaaatctcaatgataattaagagggaatgcaacgggtgggtcatagaggagtacaatggcgaagctgttgacggtttgccgggacttctaaaaagttaaaaataaacaccgatgataattatgttcaattttaaaatctcaatggcaacaaagaaaaggaggcggcggatggactatagacgagtagagtggccgcttttgacggagacttataaaaattataaaaaacaaaacccaacgagacaataaactgtctaattttaaaagttccaaggaggataaatagaaaccctaatagatcgagcaagaaaataaaagggtgacaaataagtaagaggtagcgataggtgtgattttcaaaaatataaaactagaaacatggagataataaggttaggttgatcaaattcctaagataataatatagctatttaacttttttttaaaaaaataattttgtatggaagctagccgcgcaattgcgcggtcacccagctagttatattattaaaagaatagaaaaaggagctcccacgttcgctctcatggcctaaaaattctcacattaatcagagaaaaaaaaagcagagtccatatagaaatacaatttagaaatagcagaaattggaaattaaaaaataaggaatattagaagagaagactagagtccatatatacatacaatatagaaatagctgaaattcggaattaaaaaataaggaatattagaagaggagactagagtcgatatagaaataaaattaggaaataactgaaattcgaaattaaaaataaggaatattagaagtaaagtatagagtccatatagaaatagaattaggaaataatagaaatttggaattaaaaaataaggaatattagaagtagagtaaagagtccatatagaaatacaattaagaaaaaaaatagaaattcggaattaaaaaataaggaatattagaagtagagtatagggtccatataagaatttaaactaactaaaattcaaaataaacataataaaattaaaagtatagtttagagtccgtataaaaatacaatttacaaataactaaaattcaaaattaagaaaaacatgggaagaagagtttaaagtcaatataggaatacaagttagaagtaactgaaatttgaaattaaaaattaaagaatattgaaagattagtttagagtccacatagtgtcggtgacatgggatcaggagtatcatgactagaggtttgaggcagacgcaatcgcccacgtggcctggcaccctcgggggacgtcgggcccgagggtgatgtgttcgccctcctcctagtccccccgagggggtcgggctgcacccccctcggccccgagggccgaggcgccccgacccctcgtgggttttttgctccgcgtgtatgggttaggtgagcacagtggggctcacctaccacatttattgcggtttgactgagcgtgtcacgccgcatgcaacgtagtgcagtgcactcgtttatccggtctgtgaccagtcacagaccggtcagatcgcgggttaggtggccacaggcgatctgacacacgcctcgccccatcccgtcaggacgagggcttctaggcgctcgtccccagctggagctagcgtgttacctcccagagatggcacgttagccctgatcagatatatgccaggcttcatcctaaccattacaagcaagatgttgtgtgaagaagggcggacatgtagattgctaagctgacacgtggtggacaagaatgaccgacgtgactggtctgactccggtcatgtcgtcagcaggcggccacgattccacgtcgcatctgctcccggcgaaagtgggggtagttgtgggccgtcccatcagaaggtgactcggatggcaactatacaaatctccgtccatttatgaaaaggtgggggaggtccccacaaaaaagagggaaatggtgcatgtggtatcctcttaagatataaaaggaggaccttgcccaccgagagagggggtttttctttttcttggactgaacctttccagattaggaacccagaacaagggagaggctggctcatactttgtagctctttcacacacgaatccaccaaaacacaggagtagggtattacgcttctaagcggcccgaacctgtatacatcgccggcgtcttctgtgcttcctgtctcgcgaaccttccacatacagattgggagcttagagtctcacccagggtccccggccgaaccggcaaaggggggcctgcgcggtctcccggtgaggagccccacgctccgtcatctggcgcgccaggtaggggactctgcgagtgatcttctgagctctcgcactccttcgtgtgcgccaagctttttctgttcagcccaatggccgagccagcaaaggcgcacgacctctccccgagtatgagcggtgacgacggggagccaaacccacgccgtcgagctcgtactccaccgccccctccacgccaaagtcctaggcgggagaaggcgctcgagagggctgaaggatccgcgacttcgacatccacaggaggtggagaagggcggcgagatggggagcgtcgcctcctcgtctacggcgacggcagcacgccccagggcgcgctccaagctgcaggcgcgctcctacgtcacccgcccgtcgtccatgacccggagtctccagcccaacgttggctggacgatgtggccaaattggtcatgactgcacggcagcgcctaggtgctggtgggcggtcctccgccaccaaggcctctggtgctgctaccaccggctccgcgtcgtcaagacggagggcacgaagagcggcagccgctgttcgccattcggccgccactccttcgtcgactccttcgacccgggaagatctgcgtggggggccggacgcccgcaccagcatcgagcgccggcgtaatgaccgacgtgctgcccacgcaacggagggcgcttcctcgtccagagtgtcacctcaacacggacgcgggaatcagccctccgtgcccccggttggtggtgtcggctgtagagcctttgtggcgagtcttcggaatgtccgttggcccccaaggttccggcccaccatcgccgaaaaatatgacgggagcgtcaaccccgccgagtttctccaagtctacacgaccgggatcgaggccgccgggggtgacgacagggtcatggcgaatttctttcccatggccctgaaaggacaggcgcggggttggctaatgaacttgccacccgcgtctgtccactcttgggaggatttgtgccaacagttcaccatgaacttccaaggcacatatccgcgccccggtgaggaagcggacttgcacgcagtacagcgaagggatgatgagtcacttcgctcgtacattcagcggttctgtcaagtccgtaataccataccatgcatccctgcacacgcggtgatttacgcgttcagggggggtgtgcggcacaaccgcatgctcgaaaagatcgcctccaaagagccccagactaccgcggagctttttcagctcgcggaccgagtggctcgtaaggaggaggcatggacctggaacccctccggttccggtgtggcagcttcggccgcccccggatccgccgctcagacagggcggcgtgataggaggaggaagaagaggtcagcccataccgacgacgagggtcatgtcctcgccgtcgagggcgctccgcgggccacccgaaaggggaggcctgcgggtgacaaaaagaaagaggccggcgctcccagcagggagcgcccaaccggcaagtggtgcaccgtccacaacacttcccttcatgacctcgcggactgccgtgtagtcacagaccggtcagatcgcgggttaggtggccacaggcgatctgacacacgcctcaccccatcccgtcaggacgagggcttctaggcgctcgtccccagctggagctagcgtgttacctcccagagatggcacgttagccctgatcagatatatgccaggcttcatcctaaccattacaagcaagatgttgtgtgaagaagggcggacatgtagattgctaagctgacacgtggtggacaagaatgaccgacgtgactggtctgactc

SEQ ID NO: 22248 - DNA, 1364 bp, Oryza sativa
acaagggagaggctggctcatactttgtagctctttcacacacgaatccaccaaaacacaggagtagggtattacgcttctaagcggcccgaacctgtatacatcgccggcgtcttctgtgcttcctgtctcgcgaaccttccacatacagattgggagcttagagtctcacccagggtccccggccgaaccggcaaaggggggcctgcgcggtctcccggtgaggagccccacgctccgtcacatagaaatatatataatttacaaataactaaaatttgatattaaaaataattaataactaacacgtatataaaatacaatatgaatattacacattagtagtttcataaagttattacaaaatttaaaattatgatgtcattttaatatatttgaataatataatgagaaaacatatatgatattatataagagaaaatataatgatgctagctgtgcaatctgcgcgggccaccatgctagttttaacttgtttccgttaacatgttttcaaactactaaacgatatatttcgtatgaaacttatgtgtaaggtaactttcaaacatcagataaatctttcttaaaaatttaaaataattaaaactcaattaatcatgtgctaataacactctcgttttatatgtcgtgcttaatcttatctttagcggatgcaggctaacgggaccatatatagagacaccgacgtgcaatcccaaggcgcaacgggcacagattgtgactggatggatgacaattaagcgcaggaactgcctacaggaaccgtgcgcaaacatttggccatgagtaattttacggtttactattttttctgttataaatttaatagtaactcttagtatctacatactgtaatggtacctttaaaaaaccgtagaattgctctttggccattgcgcagccgtaaattcatttcatcagcgcggacttcaagaaataggccgtgtaccggccagactaattaatgctcagcgtgctgtggtgcagaggtccagagtttggtcttcggtgtgtgataaccgtcatgtaggcctcattttgatgggcctcaatttccaacccatctacgtgttcagactacagaggtagcaagcagcatacggtcgcatcaggttgaggacgccgacgccgtcgccgttgccttgttcaccagaggcgagggacgacggaggtcggatcgaaggaggggagcggtggtgacgactgccgagaaaaaaaaggctgtggcttcgcgcgattgtcgacggcaaggggattgtcgatcccgatctcctcgacgatggctgcagtatcctccactccactttggcaccattgtcccaccgattgctgaccaagtg

SEQ ID NO: 22249 - DNA, 3618 bp, Oryza sativa
tcgcctctccgggatgctcatgccggagacgctcgcgctcgccgccgcctccagcacaaacctgagcccccgcaaacgcgtaagatcatccgcgattggatggagagtgcgagaggtttttttgcgagatgatctgatccggagttcgtgtttctgcgtgcagtattccaggtgcaggagcgccatctccgcgcaccagcacacgatcgggaggtggttccaccacagggacgggagcagcagcagcagcagcagcagggtcgacaaggcccgcgccgagcgggcgcgcgtgcacgccgcggtcaccgtggcgagcgtggcggccgccgtcgcggccgtggcctccggcgcggcgaacgacccggacgacctcgacgacgccaagatggacgccgcgctggcgtccgccacacagctgctggcctcgcactgcatcgagatcgccgagctcgccggcgccgaccacgaccaggtcgcctccgcggtggaggccgccgtcgacgtgcggagccccggcgatctcatgaccctgaccgcctccgcagccacaggtgagcaaccatgcatcacgacaggccttctctagctcctgccacgcatgccaaccccgaagcaactaaatcatcttcgagttctctcgcaacatggcagctctgagaggagcgacggcgctgaggctgagagcgcagcgggaggcgaggagcaaggtggcggcggtggcgccctacgagaagaccggcagctgccgcggcgacatatggtgcaaggaagggacgctcctgaaacgcagccggaaaggtaaagctcaaaaaaagcctctccttgacacggacgcacgtcacaacgtcgtcacgtcgccgcgcgcccaaactgagctcgatcttgggatggtgattttttcaattttctcatcaggcgctttgcaccggaagcgcgtggccgtctacatcaacaagaagtcgcaggtgatcgtgaaactgaagagcaagcacatcggcggcgccttctccaagaagaagaagagcgtcgtgtacggcgtcgacgacgacgtgcaggcgtggccggcgccgcacgcgtgcggcggcggcgccgtgcctcctgctccggagacggcgtcgtcggagaagtgccagttcgggctgaggacggcgcagggcgtggtcgagttccagtgcgagagcagggcgcagaagcaggactgggtggagtcggtgaagaatctgctccggcaggcggccggcgggacggctcagctcgagcactccttcgaatctctccggcttagcgcctcgtaaaacgtaaaaacccagtgaattcgttttcgtttgctgtaaaatttacctgtcgagaccccgactgcccgttcattttatcgcaaagggagcagccgagacgtttcagtgttggagctgaagaataaatgtgcatacttgtaataacatgaataatttgtataaggatcagtagataaatgtcggtgttaagattttgatgtactgctctctttacacacgccactcattacctgtttaggtagcaattccgctcaaaaatgcaaacacgcagtgataagtagtactcatatgaattctgaaggcgttttttgacctttcagtcagggtctcgggggagagcccattagttattgaccctcttcatttacaggtatcgggggaaagcaacaatttttgcacgctaccaatcgtgcatctaactgatagcactatagcacagcgcacaaactttgttgaacgtctcgcacgagacggtgcaaagttctattgatatagcagaaaaaaaaaacgagattacgagggtcgtagccaggaaaaaaaattaaccatcacccacacaccaatatcgccaacacacaagcccaggagaaggctagcaccagaccagccgccgctaagcgtgactgaccgccactagatcaacaaagctccaccaccacactagctctgccgacatgtgggacccctgcaccggcgccccccgccggccaaccttcgtgcgccggagtccgctccacacccaccggcagctcctcctcgcacctaggtcgcctcctccaccgccggtcgcgcctctctgcaccaagccggcctcctccaccggatgcgcctcgcgccaatccggcctccctccatcggctgcgcctctcgcgccaagccggcctccatctccgccgcctgcgccaagccggcctccatctccaccgcccgcgcctctcgcgccgagccggcctccgctgccatcggctgcgcttctctgcgccaagctgatctccgacccctccacccaacgatgccgcgccggccagatgcaaccgtctcccacgccctcggcaagccgtctgaggccgccatgcctctgatgaccgccacggcaccaccaccgcagccgctgctgtcgaacactcagccacctcgccgtcgccatcctcgcctcgcacctgactccttccgcgccaccaacgttgccaccgcctccacagtcacggccgccgcgccgctgccaccgacgcgaaccaccgcctccgcaaaccgtcgttgcgccgtcgccctccaccaccaagcagccagcaaccgccgccgccaactgccgcgaccacaccgccgccgctgtcgccaacaggcgtcgccagccgaccaccaccgaccgcacccagatccggccgagagccgccgtggacgttgcagatcgcgggcgccgtcggcagccaccgccgccggcagcaccacctccagaagctcctgccgacggatgtcgccgccgctgccgccgcgacgggtgcccctgccacaagcttgccctgctgtcatcgccacgttgtcgcgagctccgctgcccccgccacgagctagctcgatccggccgccgggtggctagatctgccttcagcgtggccggatccagcgcctctgccgccgtcgccatccccgccgccgtcgacccagccgcgtctctgccgacaccatcgccttttggctgtcaaaccttacaattcgaatttaaaattccaccccctctctcgaactgagctattccgatgataaatcactaggacgacataagacagacacataacctacgtaccacaatttcttcccgccgccgtctccatccctgccgccagccgccaccccgccagatccggccgaggcggcgcggatctggcggtcaccgtcgccactgccctgggttgctcccccggccgcccggacgagatgaggttgacgagaaaatgaggagccccgccgccgccgtccttgcggccgcgcggctttgccggcggccgctcaggcggcggcgaggcggaggaggaagatgggggggaggggcggccggagattgacgcctcccgtgccacctctgggggagggcgacgcgagaggaagggtagaactcgcttcagaaatagtgaacttttgtagctgatggcataagatggtcattaacataaattactcattcgatctcaagtaacaatgttcatacaaagactatagatttcactcaagtatcaccttggtttccaggtacaaattgctcatcttactcctaactagatgcaattcgaagaaactaatatagaaaaggctggtaaggagttgt

SEQ ID NO: 22250 - DNA, 6031 bp, Oryza sativa
gtgccaggatatataccgtctcggcgaacgcgccgatggaaccttcgcgagcacccatccatgcatcgatcagacgttgttgttttacgcacgtacgctaccttcctcgtcgagccgccgcaccctctcttctcgatcgtcgcacgctatccaattgcctcgggcatggctggctgcggtttcggcgccgcacgtcccgctccccgcgcgtacgcgtacgtgtcagctggtcgcgttacggtttcgatacaggcgcggtgcatggtggcgtgaagacagcagccacgcgcgctaggccgctagctggcgtcgttctgagttcgtcacaagcaagaaccaagtctcgtatcgatcccgtgcgtaaatttgattggttttgcgcatgtttttgtaatgataaatcgactgagaaggttaaattagcgtggtgctagtttgagatttgcgcacgctgtagctgattagttggtgctttctgctcgtcgtggagacgcggagagtatctgatccgtgaaagcaatggcacgtgggtggggcctgaaaaggtccgtcgtttaggttcgctgtgtgcctgtgtctgacaaatcctgttttatgagtagtactccgggtgcacgtagcagtcaggtgcagcaagcctgcaaagcgacgtggatgaattctaccctatgaccaggaagcatcaagcatggtgcaacgaagagccaagggcatggaaaatggttgctccacgtaagctgaatgcgtggaaccaaacaagaagattttaattaatttcgagtaggtgatttttttttctgtttcgtattttcaatgacgagcacaatacaagattttttttcctcaccccaaaaacgagtggacgaataaaatatgctactgggatatactttttttataaatatcatttgagtttaccttttaaacactatgtggaaaaatgctcttgaataaaggagaaaatattggggagggtttctctgtatgcgtgatgagagagagaagagcattatgtgcagttctttttcttattacgctcaccgcatctatgtatcatctttaatccagtttagttatgcgatttacaataaaaccattatagcagctacaacaaccaagtattgaaattcatttgttgacgtcggtaattgtagttgtcgattgcaactgcattgcggacatggtaaaacataaccgagcaaactctttatgagattactatttgatgagagtttcctcatcaacaaaaatttttgatcaatggagaaagagaggagatttctctcgttctccgcgcacacgcttcccaaatgttaaaatatcatattaatttatttttaaatttaaataattaatacttaattgattatacaacaatgactcatctcgttttaggtatcttttcaatattctcctttctccttctctcaaataatctcttagttatcgacttgtaaatgaattgttttttcttaacaatgtcatactactcttccataagaaaataatgaaaatacttctaaaaagttatatatatttgtcacatgtttatcatataaaagtagtagaagagtagacaaataaagcaaccaataggcatgctccaattccacaagaaaccaaacgaggagctacaacaaggtaggaattgtgggtgaccccaagcaatactccacctccatccagatattgcaactacccttcctatcccagtcaaaagccttcaaaaatttattatctccaccacatcatcacaagccgcagcagtcagaaaaacaaggggaagaagagcagattggattagcgccgagccgaggcggcctcgacgataagcttcgcctcgccggccgccgccatgcggaacccgcccgggaggcacctcctccgcgtcgccacccgcgccgtgcgctcctcgtcggcgctcggcagcggcggcggcggagggggcgcctcgacctccgccacgtcccccgtcgccgcctcctcctcatccggtggccgcccgcgcacccgctccggcggccgcctcctgcgcgccacctcgccgcccccgccctccgccatcgccgcggccgcgtgctgggagtcccgcacgatgcgccgcgagggggaggaggagtgggaggaggtcgtcgccggggccgaggaggcggttcatggggcccccgtgcctgttgcggaggaggaggaggagtacagggtggtgttctggtcgccgcccaccggcgacgaggtccgcgcagccttcaccagcatcgaggagtaagattcgtttgcctctcgcttaaatcctcgcctaaatcaggttgctgtgaatgattatgtcagttagttttgatcgaattgattgatttagattggaaccgtattggtcatatgcgtttgatgcgagaaagtcagcgaaaatctgttgtttgtcgttagtagtgttcaaatccgtgctccagtggcaggttgtgatggtctttgtcgtgtgctgttcaatgtttgcaattggtgggtttggtttctcctccataattggatgtgagcctggggaagcatcgtgtacttccgtgatctgcacggacagatgccaacggaccttggaacacttgccgtgcagagttcatgaatgaacaatcatgagttcgttaaagggcatacgtttcttgaaaatttggactgttccatggcatgtgctgtagtactatacctcctccgtcccaaaatatggcaacacagttaacacaacctattagtacgaatcaggatagagggtaggttgtgtctaattcagtagctatattttgggacggagaaagtaggtgatttctgaatggaattttaaaggattaaaattggacaatacatggatccacctattgagggtatcaaaattcaagatatatacctgtagttacatacagaattatgactggaaaagtagtaacattcaagatttgcttgcagccttttccaatcccatggctgagtttcttatacactttgggtttcttctattattcagaagcgacctaacaaactgtgttcttgtcataaccgatgatattcatgggcttatggctacacaaaagatcaagtttgctatcttttgttgaaaatggatctaaactaataaactaatctccgtactgtactcatataatcttgaagacaagaagaacattgttttagatggagctgtcatacaatatactgtcaatcatctatgctgaacatgagccatttagatgtagtctgtgttgtttgctccatctgatcaggctaccatttgcattcagggtatttggtgatccttttcgtgcgcattcttatgaaactgaggagcaatcagcattgtccacctcagtacattcgtcatctggcaattcatcaggatcagatgactggattgaacctgctgcctatgctctcaactcaactgctcttctgacaagggaacatagaaatgttttggatgccttccgtttattgcaaaaagatcctaatgttcaggtgagaaagatataaccaattctgatgtgcgctgtaacaatttattatgttatatcagtttattgcaaaaagatcctaatgttcaggtgagaaagatataaccaattctgatgtgctctgtaacaatttattatgttatatcattatctattgggacatgtcatttacatagtcctttcaacttttgctccatctattgcaaaaaagatcctaatgttcacctgaatgagacctaacaatcttcaggtgctccagaatgtttattactttgtatcatttattctcaattggaacatgtcattttacatagtcctttcaacttttgatgtacttttgctggcttctgtccgaagttctgacatagaagttcatgaacaattcgtctctgcactgactctgctaaccttgtcttcaatgcagaaaatggtcatgtccttgtcatgcgacagggctgtatgggatgctgttatgaacaacgaggcagtgcaagaattcaggagatctttccaggatggtatgttacactaaaattttcatgtttagatttgctggtcataagcaatactatttggccttctcttttttccaaaaagactaacttgtcacagcaatacagcatcattttgatgatccttttcaccttagtactgcaaaacatgcaaatacttacaaattctactgatttatgcctttacttcctagctgttcattgtaatctacccatctttcagacaaagaagcagcaggtagaaagggaaaccctggtggtcctgctggagtgcttaagtggattctgggcaacacccaagcaaaaataatggaattcatgaataatataatgaagattgtgaacatgcttttccactctgatgatgatgaagcgaagcccgacctttacactgatgcagtgaaggtgtcattcatgctctcagttttcatcttcatcgtggtggccattgctcgtatcaagtgagcacaacaatccgtcgactttacatttcgttgttttgtggtctcttagctatgcgcaggagcacctctattcatcttagtttagccaacattgatgccaatcctagtttgtcaggctcagaagtttaattgcctgtgttggaatcatgattttatcatagtaaatctcaatatttaagcttcccttcagtcttatctcattaaatttcctggtgcttttgaacacagttttgagccgtgggatttcaaagtgtggtgatgcaagattctgcaagccgtgtgtgcatgttttgtaggacagctcatgatttccaagctatctaacttaaattcacacgaaattgtacatcgatgatttctgtatcatttgaccctgttagtctgttgtaaaggattggtttgtctgtgtcccattttcactgggagattaatatacttaagaatagataaatagttccgcttgcttggacgatgggttggaactcgcccgtcgcgttgccgccttgcagcagcaagttgaccgtggttgtcaagcccaatctctgaagctaccttccccgtccacgctaagaatgtcgagcaacaaatccacaagcacccaccaaccttaggtcaaatcgcaccaaacaaagcatatgcgcttatgtttggaagtttgaattgacactgtaacttttcatccgaataaatctgcaccaagattgattgtgcactcacaaaattgaattctgttttcccttttcatcgacgtttctcatagcaatgagattcaagatcacatttctgttacatccaaagggtgcaaaaccatctggttccaagatcaattccaagttcgaacaaccaatcccccaaaaaaagatgccaaaaacaacgaagaattgaattaaccatgcttattgcctgcccagaaattcagaaattcagccagtgatcatggtgccggtgccctcgtcggtgaggatctccagcagcagcgagtgcgggacgcggccgtcgatgatactcgcggtgtgcacgccctgcgccagcgcgcggacgcagcactccaccttggggatcatcccaccgcccaccttcccgtcggccaccatctgccgcaccccggcgatgtcgatctccttcacaaggctcccggggtcattgcggtcggcgagtatcccggacacgtcggtgagcagcagcagcttctccgcgcccaacgcggcggcgatctcgccggccgcggtgtcggcgttgatgttgtaggcctgcccggtctcgtcggcggccacggtcgcgatgaccgggatgtggccggactcgatgatggggtggaggacggacgggttgacgcgcgtcacctcgccaacgaagccgagtgcggcggcgtcgggggaagggcgcgcggtgaggaggcgcgcgtccttgccgcagaggccgacggcggtggcgccggcgacgctgatgagggagacgagctgcttgttgaccttgccgacgagcaccatctccacgacctccatggtgagcgcgtccgtgacgcggaggccgttccggaactgcggctcgacgccgacgc

SEQ ID NO: 22251 - DNA, 3471 bp, Oryza sativa
gtgcggcacagtgtttgggtacttgtagatggtggccggcgggcggagtaggtgatgaccgggctcccgagctggtgcggtgcgcgagagcggctgcggtttgacacgagcacgtgcttttccttttggtgttggctataacaagggttaattggatccatgccaacttttttttcccacctctcgcaggcgcagccaaaaccaccgcaaatagttaaatgcccccaaattctcccacctcctcggcttgctacctcaaatcgcaatccggggattaggctgggggttggtgcctttccccttcgcctcgccggaggagggattggtacggtggtttgggcgcattgggaggggtggttagggttcgtatcatggagggcactgatgatcctgacccggagcggcagcgctccagctctgttgcaccggcgccgcctcgccggctgcggtggcagccaccaatcggtccgtgcctcccccgcgctccgacgaaaagaaggtacaccctcgttcggaatttagtagttccttctcgcttgatttctgggtgaaacaagtaggatgaagtgcatatatgtgttgatgcgttcaaatgttcaagtttgtgacttcaattttgtttggattttgcatctggtattctggttagcttgagtcaattgccttgtgatagttcgtgaatccattggagcttcttagcatcagttattctactcatcacttcatagtttgaagggagagcttgcccttgttgtatattcctctagttggttttcagagaccgaatgctaaggccaatatggcaaggaaaaaatgggatgagaatccccacggtgatttatgcccagcacgagaaacaacagatagtatcattctaagatgtcaagcagctgcaagattatgggaataattaggactacttgatcttgcttaaaactcagaatcagtagagtaatatgcttcctagaggatattatcaacggcaatcaagaattcagggaaactgacgaatatggccaatctagcatgtcatcccaaaatataagtacatgccacaacgaatatacagagggagtgcatgctgtgagttagagaatttttttgagaattaatattatttttatggaaaatcgcaaaagtagtggtcaaccggggaaaatcgcgaaaataggtccctgtcgaacggatgcagttcgatagggcgcctatcgaacggccagagcgcgactggcgacgagatcggaaggctgccgttcgacaggacctgtcgaacagcccccgttcgacaggcagggctgtcgaacagcccccgttcgacaggctgggctgtcgaactgccgcagttcgacaggatgtccgtcgaactgccgcagttcgacagggtcgcgttctccatttatttgtaataagttatttttttaataatatgtaatttattttagtgtgtaagaaaggaaaatatttttgtaatgttatatgtatgtgatttagggttttgataatgtttggtcagaaattgtagtatttatttgttggttaaaatatttgaattatttagtttcattatttgtatatttgaatgataatttgtcatgattcattcgaagggtatgctactgagtaattatccgaagaagtttatgaaatagtactgatagtactaagttaatcgtaaagtgtttctcaaatagtacggacagaacataaatgactaaaagtttaatacaaatagataagtcaaggacgatcagtgcccttcgcacgcttgctaggtcctcccttcttactacgcctaatctgctcagtgggatatgtcaaattatcaggggggtgcctatctctagctgcctgctgtggtgtcacgtctggcccctgaccggcctccgtctcctgcgtcggctgtgtgacctgaggtgctgcgtgccagtaatccatccctacttccccctggggaggatcagtggaaaagaagtcctcaatgaatgctgtgcgaggggagtaagcaggcactccgtgatgcgtcgacgccgaaccgtactcatcgtctgtttgtacaagagggagaaaccaaaaaatatggcgtagttagtaacgatacatataattagaaactaaagcgtgttattgtttaaaatgacttacatgtgtgctgtgtgtggccctgctctggcgcacgcggagtgatatgaagtccccatgctggtgtgttcaacacgttgtcccccgttggcatgtaagggaagtgtgccgacccagatgctccctgcgaggggtgaacataaggcggagtttggaatacctgcggacgtggtggtgccgtgctcgacgtgggtacccctgatccggctgaccccctggtgtactccggtgctggggtgtgctgaaaggaaggacgactgtgagatgtgtgggccgcttcgtacccgcgacgtgaagaggatggaccactccgatccacgctggaacgtcggggtagtggtggtgatggccgtcggcccgacgtctgcaccacatctgccgcgctccgacaggagacacgacgtagtagtgcggcagcacgtgcacggaagttgcgaaggacactcgccacgtcgtcagacctggaggtctcgcctctagtctttgcagcagggtgtcggactccacgtgaacgtgctcaacaaattccgcctgttccacaaataatcaaggcaattaaaattatttaaccagttgcacatttattaagagtatttaacaagatgcacatttgttagaaataatgaaccagttgcacatcatttataaatactgaactagttccacatactaacatgtgctaaccatacatactaacatcgaacaatgcgaaacaattaacaactcttaaaccaattttttattaaactttcatatgcattgtacttagggattactaatgtataccttaacttcactgctggagggcgtcgccaaccctttcctcccggccggcgcctcctctccggcctgctatcccctcccctcgctccctccggcgctcacggcgacgatgtggcgactctcgacggcggctggcgatgtggtcctcaaataaatcgaacaagcatcgcgggctgggagacggggctttaaaccggcctgtcgaacgcccattgtttgacagggtcggtggagggacctgtcgaacgcccccggttcgacaggcctggcggcgcggggtggtgggccctgtcgaactccctccgttcgacaggcaagcgtgtcgaacgccagccgctcgacagggctctgtcgactgcccgtcgttcgataggtgccctatcgaattgcacccgttcgacagggacctactttcgcgattttccccggttggccactacttttgcgatttttcataaaaataatattaatcctcaaaaaaattctgagttagatgggagataattcgaaagacatgttcattatttctgctaaggaaaattatggtga

SEQ ID NO: 22252 - DNA, 5473 bp, Oryza sativa
gaacttgggagagaacaattgtgatatgccaaatgccatattgccgccatttactgaggttaccaggtcactcttgtttatgacacagaaaataaactgtacttttttcctagcaatcatgcagttttcggcttgtatgattgctgcactctttcaaatggagagttattttgttacttttcactagcctgccaaaggatgctcaaactacatcatagatttgcaaaagagatgcctgatcattaaatgcacttttattcttgctaaagggtattagtgaaatgtgtcaactgccaaagggcatattaatacccttgacaatactttgccatactgatattctagtgttctctgcacgcaataaacagtaagtctcctgctcatgcactgtttgcccttaattccagcagtatggtaaagttgcattaacgcgacactctctagagggcatctcgagccttttcgagttagaggtaggatcatacgcggactacctcgaaccagcgttttagagatggcccacaaggcctgcttctctccagagaaatgcacgagaacaccggttccgcgttgtatacttgaattttgctctcctttaaacaaatgaagtatctagcttcatagggctcatcttgatgtttcttttgtgccttttgtgtacttaagtcgcattacttcctttcaatatgctgttgaacttgtagatttcacactattcttttttgttgacggcttggttttgctatacttcaatgcagaaatcaaaaacttttggaatagctagaagtccataagttggagtactgttcccttgggagtaaattaatgatctaaaacagcagcagagtgctaataatgagacccttggtctggttaacaagccttgggagaaggctagctatacttctatgtttcctttactccaaaaaaccacaagtcttcaaacatttaccaagtgtttcatttgaacagcttgtgatagagttgtactatgttgtttctgttcacagaagcagtagtccttgctcagaattctgccagcggtaatcaacgtagaatatgaaggaataaggcaataagcctcccaaaaagcatattcctaagcatgtgactactacagctggtttttttatgatgctaccaagtttctggcgaattcccagtcatattatagtgtatctaggttcctcagtcagcctgagtaaaagttagcctgggcaaagaactggcaaaaaaaaaaaaactggttattggcacttgcagtttgtgaaacacactttctgttgaatgaacgaaaaccttgaaagcgcttgccccttttgttgcacttgaatctgcctatcacccaaatttatcttgttcgtttagcaaaaaataatatctacacagtagttcttcacattgttagcgtgataatatgtgctgaatttttagaaaatctaaagttagtaatgcacaatatacatgttgggttgcttagtaaaatatatacgagcaatcatcacctgtgtaagttctaaagagggacacacggtcatgtaagtcctgaagaggtcatgttagcttgatttataaattgtttggatcaaagaagaatatttcttaatgagttgtgttgcaatcttattgtttttaaatgttactgcagatctttatggaaggtgtcatagtgaaacaggttgaagatggtttgcatttagtggtatacaccttgcacaggagttgcagcaggcaaacagcatggtggatctctacaatgagacaaggtaatgcataaggatacaaaaaatatgatatgcttagttgcttacgggactgatgaagacacggtttctcctaagtcctaatccatttgcagttaaaagtttggttagatgtggtagggatctgtttcgttgggcaatgctcaaagaaagatggtggactttttttttcgggaatacgcaaggagcgcattttttccattaagagaaataaaagttatttacaaggataaaaggaaaacaagcaggggaccgatacaggacgctatggaaaactataggaatatctcgcactaaatttggctaccacgacctcgtaaaggccaaacagcggggatcccgtgattagccgacttccaaagcatggcctcctccgccattgctttcgccacttcggtccaagacctttgttgttgattgaagatttggttgttccgttctttccaaattgtccaagccatcagtgtcacgacggtgtcgaagcctcgacgatgccgctccccaatcttcattcggctctcacaaagccaattgtggaaggatggctcattgacaagtaagcagttcggactccttattgcctgaagcgtccaccaccataattgtctcgattcagggcatgctaccaagatgtgatcaatgctttcctcgtactgatcgcaaagaacacagcgatccgggtgtggcaaccctcgactgcgcagacggtcagcggtccagcatctgttaattgcgaccaaccacaagaagaagcagcatcgaggcggagcgagcgacttccaaattggggtggaaaggaaggtgacacgaccagaaaacaaggccttataggcggattttgagctgtattggcccgaactctcccatttccagatgattgaatcaggagtagtaggatcaagatccaccatttggacaagcgaccaaagctttagatattctagaataggctagatcccaagtgctcctcggatgtctttgatccattggcgacctgttagtgcctcaaccaccgttcgacgccagcgcacgcgtggtggaattttatcatagatgttcggagcaatggaccgaatgcaaccctcttgcaaccagctatcttcccagaagagaatagtttgtccgtctcttaattaacagacggtagaggctgcaacgaagttcgtttccttttgcgaccccggaatggctagcccctgccaaggtttgcttgaggaggaagatggtggacttacaggatgaggctaaaatattgaggtggtcaatggatcaaacaagccaagatcaaagaaagattgattggaataaatttctggtctgcttatagaattatataaggaaagataattctgtgagatgtcatctccaccctgtgacaccttccaggagatgaaggaatagtgaaatgtggtgtcggccacaaccgacagaaaaatgtgaataatcttgctccatttcttataaacttggtcatcatattgaatctaaaaacataccctttaggttgtgatcgaaaagtgttactaccttattttcggtgctgaatgtgtgcagaagtcattcagaaacagcaagaaggggtgcccttcctgtggatcaagcttttgggctagtgatgcagcctactcctatctgagatgctgcagatgcagttgcttgtaaagtgattcgaagtggacttattcctattttggcatgctgttgggttttgtagaggagaaagacccattgtatggcccaacttgttgggctttgtagatttgcaggccggctgtcgttggcatgtgggatgccaatgtggctagctgcatctttgtgaagtgttccttcatctcggaaccactagcagtcttagcttccttatacacattcaattgcttgaagatcctatgaaagagtgatgcatagtgagtccaaaacatgtcatgcatggtatactcctatagttctattgctcctaatggttgagatgatggaaaggtactggttctgtctggagtctagattttaccgggtacacggttccagttttttttggctgctagccaaatcacatcaaatgaatttctttagcaacagaatttgatttgtctggcacgggcaacttggttgataagcttggatgcatttgtataactcatgtcacgggcttaaatcagcgtattatggttatggctgatcacttgccagcagaattagcgatgattcgttgttccgggtggaccctgttctgtaatttctgactttgttacaattaaggtccatttcctgacgagagctcattgatggctttcttgtgcctttgtggagacaggttggtagaggttgctgagggcatcaaaacctttctccctgtttcctttttctagtactggtacgcttggtgttatcgagtttatgtccatgatgccctacattgattgctggactgaaggagccctgatacgctctactgccacgcctcgccaagataagatggcacttttgtttgtaagcttcctctgttgtttctcccgtggtgcgtgtcgtggttgggtttcgacggccagtcggccagagaagggtcgtgtcacgaaaagccttgcccgcactttgaactgtcgcggtagcatcattcctgctttgacccctgatgaagtcatgcaatccatgcatcgcagctagaggcgttcactgtgttccgccttattcgagctcgtgctcttacttggtccttgaaaaagattcgtgattctttttttcagttgtacctgagatgctcccattttcagagcttccggaattttcagccccccccccccctaaaaaaaaactaactttgcacttggattgtgtttggttcctgaaaaaagttaaaagtttgataaaagttggtagtttggaaaaaaattaaaagtttatgtgtgtagaaaagttttagatgttatgtgatggaaaattggaagttgagggtgatctaaacacggccttgatgggaaacaggcaggagtagaatggtgcaaggtaggtaggtgtgcaggtaggtaggcgtgcgcggcgtgatctgaccgcgaaattaccctcgcgcaggaaccgaaccaagctagttgtgctccgtattcgctgcaactgtgaaacacctggagcatttgactccatacgcacgaggaggaagtacgcgaggccggccggccggcctgccggctgccgacgctgtcgcggcggcaccgattgatcgatccgtgggcccgcgaactccactcctattccggctaacgctatagctcgatctaccaccagccaccgcaccggcgcaccgcaccccgtgtccccgtggcatccacattaaacgccaccgtccccgcaacagccgccggctcgggtgcacgcgcgggctgaaaacagtcggaaacaatactcgatcggtaatggaacatatttatcatttaaactactcagtatcgatattaatacgatgtaaaagaaattatgaaaaaccaaattttaaaaattaagaaaaagtacggtcagaaacagtacccatattacgaaaacgtcgttcggtcgatcgggaatttcagtatctgttttcaccccatcatcgcgcacagccggcaagcttgcattggctccctccgatccctctcctaccaatcgcgacgatttatcgaggttgattcagcgcgcgtcgtcataccgccgtcgcgatccgcggcacagcgagtagcatg

SEQ ID NO: 22253 - DNA, 11665 bp, Oryza sativa
ggtcacaaatcacacaattatttgtagtactactctcagtctcgtttatacgtgctgaaagagagtgggacgataaatttcacaggaactttattgtatactagtagcctgtcttttattgatcagtttactttcggcatgaagcatagaacagttccatgcgtagctgtaaaacgctcaattcgtcatgtactgaagcaaatgaatgttcaataaaatcaccctggtgtgtatcctgggaacagggatttttgccatatatgctctccaatgatcgttcttcaaaagacccggtacactgcacacacagcaaatttattgtgcctagctaccggctgtcctagcttcctccaaggctccaatccaaagtctcccccactgtttgcttgcgcatctgttgaccccaacacattggtgtgtttgaggaggaggagatagagaagattaaaaagatatgtaaaacgagttgaatcattagcgcataattaattaagtattaactattttaaactttaaaaatgaattaatatgattttttaaagcaatttttctatataatttttttaaaaaaaacgtaccatttagtagtttaaaaagcgtgcgtgcggaaaaggagtaacaatcttccctatctcccctgaaagaacaatctcccgttagtagtactgcatggcatttggcacgggatgcaacgacattttgatcgagctgccattctttcggatgggctctcttaatttgttcctcttttaccttttggttcgttcgtacgtgaagccgcgatcgatcgattgatccataggagtctggaccattaattcctttactgcctttgctgattaggatgatgtctgcacatacatcgcccttcttctaacaaaacaaagaaaaattcctcacccggcgcgtcttcatcttcttttctgtgcctaaccaagtagacatcggatccccatcgatcatccagcataatgagagagagatggactatatgcgtagttgtgtagattttcttgccgtgctcttattaccacccggccgtataatgcagcaagtaaagtagaagtatacacagtattgcagttaaaggagtggacgcggtgctgagctttcataccactcgagtacgtgctcaactattgaagtttcagtactcctcgcttcattccctccctctatctcatctgctcatttgctaggtgctctcttttgtgggccatttttgagccctaaccatcgtccgcacaatcacaaggaatctaatctttgaatgcctttgatcctcgtcattatgcatcatcctttattcaccttgtctctacgtgtagtatagtgtcgctcccatcagaaactagcagctgcctctcagtagactttaatactggtgcagtggtgggttgggtaacgcattcttttcttacagtactagtacctcatgcacacaaacgtgcaaaggattagtattaccctctatcatatggcgtgcgtgcgtgcttgctagctagtcatgtcagtctggtttagagatagaggcaggaggcgcctatggtgcaaaagaaaaggaggaaagttaagctgtgcgtggcgtgcatttgctcgtacgtgtatgtgcaccatcgatagggcgcttgcagcctttgcttattaggcggcttgtccgttggcaaatgctgtagtgcaccaattatccgttctttatttacatgctggtcgatatgcatgctatacgatccaatgagtataaggaatggacacgggttactcattagtgagtacttgttgacccaatattgcagctgaaattaaatcaactataccacacatttactccctccgtcttgaaataggttcatttttaactattttcatttgttccaaaataaattcaattttagagaaatcattgcactacaatttgtgaaaataaaaaaataattgtttcgagagtagataaaagtaggaagtagttgcattgagatttaataaaataaggtattctaatcttttaattttgtattggtatatttaagatggtgaaaaatatacttattttaggacgcaagaattatctaattttgctcattttgtttgggcatcgatcatctgcaaaccgtacctgtcactgacatgtgcgtcccatttctctaagcccacagatcagtagcagtaactgccactccatcctggtttagtatctgcttaattggccgagttggccgggtacatacctaacaagcagcagctagcgcgcggtgtggtacctagcttggacagcgaccaatggtactgtttggcgacccatgatgatcactggccgggccggcgcgcatgcatgatggtgcgccctggacgcattcggtgtctcgactgcgatcgccgcggacgtatgcgcgtggcgcgcgtaccgtgtaccgtaccgccgctggagagaccactcgtacgcttgcacgctgtgggcgtagtattgcagccggccggccgcgccagcgtacgttttgtccttccctaagaccatttccaacccataacactagatataatttccataaacttcacatcatcgagaaactagtactagacactactcttccaatgcaaacaccactatttcatgcttcaatttaatgttacttatctcacatgatgtcttggatgttgtgtagaaatcatgtctcgcatggtttccttctctttcctcatttattcacttgccacatcattttttatcctatgtagcagcttatttaatgttatggacaccatcctagtcattgggttgggaatggcctaatcatgtacccctcccatgattaccccaattaatatggagtatatacgcagtgagcgagcgtaccaccaaattgaatgaaggtccccggtccaggacgacgaacagcttaattaattcactgcgttaattaatttttgatgatctcgatcgatccgtttcgttggacacagcacagcggcgtgcctggtagaagaatgtactagtaattctttgattggtgttctaaaaaaaaaattctttgattggtctgatccgacgatggatgtgtgagattgtgagctgtgtgtggtgtgtgcgcgaatgcgaatcagcgtcagaaaaaaagaccgaagaaccttgaggggagaaagggaacatcatatcgacgtcgatctctccatcatcttctccatttccttatacgtactactagctttgatcacgtcgagacttttgcgccccgaaaacgaatcgacggcgccacggcggttgtattggtcgcgtggctagctaccctttgtttgtcgctgcccctgtggctttgcgctttggccgtacgacggcgacgacgtcccggccggacgacatgctgcgtgagtgattatttcattatttgtattttgggagtggtttggagatgaccatcaaagggtggcgaggtctatcgtactacatggaaaagctagcacggcgtacgtacgtggaattgtgggcgacaacggatttgttcaggtgatagcgagccccctgacgcggacataacaacaacagcaaggcaaattaatcaaggcttctattggaaatctacgttacggtaggaaacgtatccggcggggacatacgtatattaagaaggaaacgtgctgctccttctagtagtacatgttttctgttcaacttttcgatggcaaagcttagaaacaaaagttaaatccctttaactagtcctaggtagatacagacatactttgtacagtagtatatgtgctatgctccgtactgtcacagtagatggcagtcaatcgttgtagtactacacaggagggagttcatcacgccagattctcgcgccctggaggaggcgacaaaccaacagctggcacgcccagcagccggccggcgccaccgctacttgttgtggctccccgcagcgcgcggcagctctctcgatccatttccgatcgagccgagcgtgactacgccacgacagacggggatcaatcaggagaaaaatcaatcgattacccgtacatacgcgcaggcgcacgcaggcatcagcgcgcgggtcagcgtagcgaccccccgttttctctcccactactcgtgccgcgccgcgccgctcgccgctcccgcaacgcttggggccgcggggaggcaaggccgcgcccgcgcgctggcgcggcagcgttgcagctggccacccgcgcggccgcctgcgaaacactgtggacctctttcgtacggggcgcgcactgccacgcccccgtcgcgcgctgcccgcacgcggcatcacgttgcctttttctttcgcctcggcttcgggttcagtacggagttttctctgtattcaccgcaccgcaagcggacggctcggtggaccgtaccagtaccacaccggaccgcaaccgggccgtatctgaaggtgcacatgtgcagcgcagctagatttttacattgtgatccttctttaaaatttattttgcaaataaaccttaaaaaactttttttttttggaaatttactctttttcttggtgccaaggttatcggtgctgacgtttaatgtctccgcaccaatctcactaataccgacaccatgtgaagggggtcagcattgacgacctatttgtatttttttaaaaaaataattagcatggtagcccacgcagattgcgcggctagcatcattatattttctctcatataatagcatatatgttttctcattatattattcaaatatattaaaatgacatcataattttaaattttgcaataactttacgaaaataaaaatgtataatattcatattgtattttatatacgtgttagttattaattatttttaatatcaaattttagttatttgtaaattatatatattcctatatggactagacttgtctttcaatattttctttttttaattccgaattttctgtaaattgtatttctatatagactctaggatttctatatagactctaggctcttcttccaatattatttatttttatttctgaatttttattatttctaattgtatttctatatggactctaaactcttctttcaatattctttaatttttaatttcgaatttcagttacttctaaattgtattcctatattgactttaaactcttcttcccatgctttttttaattttgaattttagttatttgtaaattgtatttttatacgaactcaaaactctacttttaattttattatgtttattctaaattttagttagtttgaaatttctatatggactctatactctacttctaatattccttattttttaattccgaatttctattattttctacttgtatttctatatggactctatactctacttctaatattccttatttttaattccgaatttctattattttctacttgtatttctatatggactttagtttcctcttctaatattcctttttttattccgaatttctgctatttttaaattgtatttctatatggactctgccttttctttttctccgattaatgtgagaatttctagtccataagagtgaacgtggtggctcatttttctattcctttaatataataatagatattctaattttttttcttataaatagacaccatgtgatagtctctttgcctttgaggacttatttgtgataaaaaggttatatttcaacctttctttaaaaaatataaataggtcatcgacgttaacatctttgtctccaactcctttacatctcggcttctaggggtgagggtgttggcactaggacattgaacctcaatactagggtcattgacttcaagaaaatgatctcatcttataataagtttttatagggatctatttatataatatgtacttgcaggggactaacaccatcctttctgttcagccaaaacactaaagagaagaaggtcttgagattttcaagtgttcaaatggtaaaatactattttagcggtgagagcagtataatactactcgaacggtaaagtactattcgagtggaaagttctattcgagtggttttatgctattgaagcaactcgtcccgtttgagtgtgtttctaaccagtaaaaagtaaattccgagagccatataagtgagaaggagtgttcgaaatctcaagatggaaagacgacccaagatgaaaaaacgactcatgttgaaaaatatgaacaaagatggaaaagacgactcaacctaatgactcgagagaaaaagctactcaaccaagaaagatgccaaaagaagattccatagagaccagttttcaaacactcatgccagctagtgccaaaagaccataatgacctctacaatgtaccataatacatctagggttgctgacatggcaagagtataattttaaactcacaagggcccatgggggcaaagttgtaatctcacatgtacgattgtggggtatataagccgatcaaaagcatgtagcaagacaagacataatttaatactactagagaaacattagccatcaaagttctgtattttgtatttgagctcatttctttggataggcgagaaaagaaactttcctgtttatctccaaacttattcgtgacctaatgtcacgacataatataaataagttttttttaaaagaacgaaaacataaaaaaaatgtaatgttgcgcagctacttattgaaggtcacctactccgtctcatcataaaatggtgcgatacgatctgccacacattatatgacgagcacttttggccattccttggtctctcacccctcggctgcagctagcaaacggaggtacggctggtctgtctacccataccctactaggctggctgctgaaggatttaatcgtgatctcgtgaaaagaatgaaagaaatgaaagtgattctattcagactcagctcagcacctcaagccaccggctatgcttctcggaggcctaggagagatgtccagttgtacaccacgcatatgtttggccccggtgcaacgggtgcaaataacacctctagtctctagaaaaaattattgttctaaaaagagggtctctacaaaaaagacgtttgggcagacctttgttacttgtagcccatatatgagtcgtaccattgttcgccggccccatgaggcccacatggtaggtggagctacgtagaacaagcatcgtgttttcttgtagaagtactacacaacactagaaattctacaaaaccaggtgaagaaaaaatattctacaaaccagactaattgtgtaagtagataattcaacgcaattcaaattgttggagtttcaatttcgagatactgtaagctattttggcacttttacagttatctttcaaattgaccaacactcttcagtaccttctaccactaatggtagtagggtgcatgagtagaatttaaatcaaaccatagatttcttatgggcatttaaaatattttatccaaagctttgttaaggtagctttatcaatttatttattttaacacgatatatgaaacgcattggtaggttttttttaagtaaattgcatattgcactggatagagtgaaccttggtttgctttgcaccggatttaatacatatttttacattgaaataaattgtacctcacactaggtgttgtatcatataattgaagggaaaatattgtaaaatatgtgtaaaactttcaaaacccttttgaatttagacaatatttgaaagggatttattaaaataatgaaatatcatgaaagccctttcatatatatatatatatatatatatatatatatatatatatcttcattattgttcattgaattaaagatttggttttgttttctcattgaatttgaagatttcgttcagatttcggatttaataagttgaagatctttctgactcatctatataaagcggatgaaacaggctagcaaaagacacacaaaacacgatacctcttccctccccacttctaacatggagaacgtttttactcaatctgcactactctgtgtgttgtttcttagtagttcaatagttggaggttgctctcctacaatggaagaagaggtacttctcttgagctatatatattgttataattcaaattcgattttattcaactgaaacatagaagtgatagctagtctatattgatttgttccccttttcccaaacaattaaccaggtccaaaagaattggcgaacattgatggcccctctacttcatgtgaatttctcttcatcggatcatatatcaactcaagctgacccagtatattatgtgagtgtcatatactccttccgtccaaatataaaacatagttagaaatttgttccaaaataatgcaactcatatcttcttacctatcatcgatgaataaatcgataaatttctttcaatatcccatcaccgtacctactaatataactttcctattaatttggggcattttggttctttgtctcctttcttaactccaccataggaagctaaaatttgagtttttttggggagtatgttttttttccctagatctaaaagatgcacttgtactcatgatcatgattttcatgaccaaatacgtactttggcagtttgcagcatatggatcgattccttcagacgacgctatcaagtattacggattagaggccaccatggacatttatggctttaatctagagcatggacaacaaaccggaggtttcatttggatttacaatacggatgaagcatctgccgtgaataaagttatagctggatggaatgtaagttaaacttatctgcttgatttggaattgtaatttcaagcctacattagcttagctggttgatgctcaacaggttcatgagcttctcactgtcaatcgaagatgtgtcactaaacaagttactttgattaatcatttgctccatgtcttttagttttaacatttagttgtattgtacctcatacaggttgagcctgaatcgtacaatgattcacagacgcacttcagtacttggtttgtaagtttcttcataaacactgcagtttcctatccatcaatttttatttttattttttttgccataataaagattttgtatttattatgtcataactcattctccaattaatgccagattgaaggttctaatgtttgtcctgatatgcgttgtcctggattcgaaagtgtatttagctcagaaatcgttcctggaatggtgattagccctgtttccaccacctctggcaagaaacaatacattacagtcagagtatccaaggtttaattattgtctaattaataacagaacaatcttacattccttttttttatcccttcatatataaaatggaaatagtataatgaatctggacatacccatgtctagcacaacgaatctagatatacctatgtccggattcgttatactaggatatgtcacattccatgctggttgagatattttagcacggagggagtatgcgtcatgacactatattttgatgatttcaggatcaaaattccggtgattggcaaatctactatggctttaatggggatgccaagcttgcaggttactatccaagatctctgtttacaagcttgtcagataaaccagtgacaatattgtttggtggctatgccttgagaaaggatcaaaagccaagtcctccaatgggcagcgggaatgccccgtttaaaaacgccgcatcatttcgtagtatcaagttttttgatgccggtggcaacgcccatccaatcgattttcgtctcggatttatatcaaattgttacactatttctgttattgaaaatgatgggttcttttatgggggacctggcaatatttgctagtagtttgtaatcgagcttcaacttagtgtaatgaatatcctggggactgcacccacagagaaattgagcttcaatagagttcatcacaactgttgtgccactcttagttgataagtatttagcctcatcgtttgacgtattggaggaaaaaacgaaatggcatatttgcaaatgaaaaataatttgtgaataaaacttttatatacatgttctgacgatctaagagtaaagactgaaaaataaactatggaatgaaaaaaaaaactcaaaatcagctccaaattccaaatttaagattaaaaaattaaattttggctgataagcataagtggaaagatcaagatacaagattctaatatactccctccatttcgaaaatataagcagataaggagaggaaagggaaaaagaaaaagaagccgaagagaattacatatgcgtcatggttccttgcttttagtttcactttcacttttacccagggtatttacatactcactccgatttgataattcatgtcatatagacagcgacacattctccaaaacctatctttgaatataattttctattataatataaaaaccttaataagtactccctctattttatattataagttgtttaacttttttcttagtcaaacttcttagagtttgaccaagtttgtagaaaaatatactaatatttttaatataaaacaaatatattattaaaatatattcaatgttcaatttaatgaaactaatttggtgttatagatgttgctaatttttttataaatgtggtcaaacctaaagaactttaactaagaaaaattaacgacttataatataaaacggagggagtatctaatttaatttgattttttaagtctcatctacacatgttgtcccagtgccttaaaattaatatttcaaaagttgctaattgtcaaagttataaaagtttgacatcacccttataaaagaatgataggaattataaaaacaaaaggagtatgtgacattatctttcggatactttcatcgtaagtgatccctcggagtggatactttcatcagaagtgatctctcaaaaagagagaagaggaggtgtacacttggcatggttgcataaggtaaaattcatatcttgccttttgcttggtcgagctagctagcccatgtcaagccagctcgtatcacaccgtagaaaattaaaccctactgtcacatagattatgagaaaatatatatagagagctatagaaatatagaatctagaaaataaataaaaaccatatttttttttatagattctcacaagctatttctcataatccatagtttcctaaacaataccaaaacatctaggtacttcaacgcgcaatatatatgcaaaggaaactactccttcgtgatgattaaaaaaaaatagggtcatcgaggccaatgtcatgggctcacggcgacattaggatggagtgccgccgcaaccttcttccggccctacgcaaggaggcaggtgccactgtcgccgtcgtccgccttaacctcgagaagcaatttcctccttctgcctctaccccgggaggctgccgtcatcatcgacttggatgccgggaggccaccatcaccatccacctcaacttcgtgaggccgtagccgtcgtctgcccccaggaggcacccaccactgcccccatctactaactccaaagagaacaccgccgtcggctgcttctagcatttcaggtgcctactactcctacgtatctttttagttcatatattggttacttaaggacagtggcggatccaagatgatgaactacttgcag

SEQ ID NO: 22254 - DNA, 5614 bp, Oryza sativa
tgtgaagtgaaatatatgtgataaaaaggtaacaaggcacattacccggtataaagtgtaatttacccaatttacaaagctttaaatgaactgtcgtggggatgattaaatttattaaggccataggccgtgtttagatttaatattttttcttgccaaaaacgtcatatcgaatgtttggacccatatataaagtattaaacgtggacgaaaaaaaaccaattgcacagtttgcatgtaaattatgagatgaatcttttgagcctaattacgtcatgatttgacaatgtgatgctacaataagcatttactaatgatgaataaattaggcttaataaattcgcctctagtttacaggcggaatctataatttattttattattaatctatgtttaatactttaaatgtgtgtgcgtatactttaaaaaaaattggccaaggaagccatactccacatttcttgtgctatcgccagaagtgaagcaaattactcctaacacgttatgttggtagacaagttcattattgtgtctttcaagcttactgaaaagaaaagctttgtttaatggctgatagtgacctgaaccctctggtgctggcgaaggtgccaagggtacgggtgtacaactcacttcatctccgggtgtgatccacatgtggattgttggacgtccatcttactaacagtcctaattaattacccagaaaaaagacgcttttttcatctataatttggggtgtcctggtaatggggatcagacagctgcctattactggttgtgatttgtgtgaacagcagagccaattcaattaaaaatttgccaactttacgtacaaatggtcttgtcacgaagtgagattacggatgccgcttatgggtaggatggatttggcgaatggctatcacgtagggagtgggctgctttgggaaaaaaaaacaaacttgcttttttgctgaaaagataaacatgtgaagagagagaaataaatatagaacgataattggaaatcagtaacaaactaaaaatgaaagaaattgttgagagtaacaaaaaaaagtggaaatcaaacgggtggttttcatgattcctcacgaaaacatgtatttaaggccgtaccgatgtgtatgatgatgatggataagatgtgtattcaaggctttacttcaaatcaggaaaatcgtacctaatcagccatgacaatgaaaatcacgaattaaagcacgcggtttagaagcttcattctcaaggagaaacaaacaacgggctcaccggagttaacccctgaaacaaggatcccaacttcccactaccggtaacacggatgaccacaagcaacccatcttgactcccatccctccgttccccccagaagagtaggcacgcgcgcgcgtatagtacgtatcacatgaaaacgaggtccctttgatgaaaaataacgactcccatccctccgttcccccagaacagtagtagcagcatcaccgcatcacctccatgcccttgctcgtgcgcatgtatcaacacagtcacacagctactcaccacgagtccaagcttctgtttgaaagagtttaaaattctatgaacacacaaatatatctaaaaattcttttaattttgggaaaaaaaactcgagctggtataaagctgaagcatccctaaaaacaagcccaagacgaaatgacgaatgcgttacgacatgggcggagacggagggagatcagggtcgcgagtacaggggcgttggcttcaccgatcgatcgattgggcgatgggatctcgccttatccccccgcgcgcggcgtcgcccgtcgtctcactgtccgcgcggcccggccatatttatgcgcgcaaccaccccgctgtcctcgctgcgacgctgcctgcatgtccgtgtcccggccggtgcggggcgtggcgccacgcatggccgtccgcgtcaacgtacgcctcagcgtactacacccccatctttcgtgcgtttctcgcacacgccgcagatcgaattatccgttgtgtttttgtttccgtgcggctgcagagagaaaggaagtgactggctctctctgtctgtgccggaacaaggttaattacaactgccgtgattgttcgcgctttgggatgggacgaagtggaggggcccggatcgatcgaaccttgccgtaatttcaaaggtgcgggcaaatgcatgcagcatcgatctttatttagagactttctttcgtgtcacattaggtccaaatcccgggtagatcatcacctttagcactacccgctaaagatagaaaaaatataggatgacccccggaggaaaaggagatgcgctgataaattaattaaccggacacatattcttgccccacaatccaagcaaaggaaggagagactgaaggaaaagaaggatgattttttatacatggtctgcttcccaaatttggcgacgcaaacgcaggacaaaacgacgctgattttttggctcaagtttctgtgcgccgtaggccgtagctggcttgcatgcatgaattcttttggtcatgcgtggaaaattacgggttgtacatgcaggctgctcgattttagcactgacgagtgttttaccggcggcgctttggcttttagtactcccacagaagtggctcctccaggcggaacacgccggcggcggcggcaccggcgccggagattaagcccacttcgtcttcccaagacgacgcgcacgagaggcccgagctgggcgggccgtatctgaggtcgaggaggaggtcggggaggtcgaacagcgcgtcgtcagcggcgtccggcggcgggggcggcgaggcggaccggcgctcgcgtcgtccgatccgtcggggttattgctggcgcccgcattggcggaggaggccgggaagcggcggcggcggcgagcgcggctgcggcctggacgtccttgggcgccgcggtggccgggcgcggcagctcgtgggcgaggtccggaaagttgaggtgcgcggcccggcccttgatggcgagcgcggcaacgtcgtgcgcgcgcgcggccatctcggcggtggcgaaggtgcccagccagatgcgcgacttcttccgcggctccctgatctccgacacccacttgccccagctccgcatgcgcaccccgcggtacgtcgggtggtgcccgtccttgcgcggccgcttcttcttgccgccggcgccgtctgaggacgacgacgcggtggacggcggggaggccggcgcctccccgcccgaggaggacgtggtcggctcggaaccgaacgacgagtcgtccatggcgccgcgcgctgtggtggactggtggtggtggtggagttggttggaagaggagagcgagtgagcgagctgtgagctagctagagcgggcgagcgagcgactgtgcgaggcgaggcgagtggcgtggtgtgtggtgaggtgggagggaaagcagtgggagtggtgggtttttatgatgagcggatggggcgcagaggcctctcgcgacgtggaaagagggaaacaaggcggggaatagtgcggggagaatgcgaatgggtgagagcgactgggtgagaatcaccacgggttttgaggacctctgcagccgcgttgtttttttgcgattgaactgcctcgatgttagtggcaggtttcattgcaagtctgcgatgaactcttgggactcaattcatgggtgtgcgggtttgtcatcaatatgggacatctggaaaacgcacttgtttgtgaattgtttttcatcgaatctgttcattaaagccaatgcactaagctattgctaaatactactttctaaatattcgacgccgttgattattttaaatatgtttgaccgttcgtcttatttaaaaaatttaagtaattattaattcttttcctatcatttgatttattattaaatacttttatgtatacatatagtttttcatatttcacaaaagttttttcttataagatgaatggtcaaacatgtgctaaaaagtcaacggtatcaaatatttagaaacggagggagtataagagattttgaagggatataacacttcctagtactagcaaatactatcacatccatgtaaaatttcttttttgagacagatgaggtactatatttgttatactccgtctctcttggaatgactacatgtttaactctgatggctttcttggtgacgagttgcctttgagcgtctaggtgagaacacttccggtacattagtgatcgattgaaaaaatgatttataattcgttcaaaaaaaatgatttataggaaagcacaatgcacacctttagcaccttgatggaattattgatgcatgatttcattccactccgggagttgggattcgcaattttgatattggatcaaaacctctcacgagtggtatctttggattttgtaaaaacagttgataacaaaaagaaaatgaaatcaagataaatcatgtcaaaacttaaaattcagtttgaaaatttttgaactagaccgaaaaccaagcggtttgtgttttcaacaagccggaaaatattgaaatttggaccggtttccaccaagacaaatgcaacatactacatttaaaggattttgcatttcactccattactaaaattgcatttaggttcttgagagatattcaatcatcaatgcataataaacaagtataaaaaacgatcctcaaaagaaaatataaaatttgcggatcatgcataaaacaaataaagggaaagattatcttttcacccacctactaaccgtgggttgacataaccccaatggaaattacaaacaaaggataaaagctgcggaaatgcttgtcgccgggcgaccggcgcggggggagccggatcgggcgctccccccgcacgcgcccctcccccacgtgggtccactacttcttccccctttttccataaaaagatgtttcacctagtgtatttacaatgtttcactatttatagatctaatgttgcaataaattaaaatacttttttgcaacaaaaaaccacatattttggaaactctctattaaggaaatttggtttattttttgttccatcaaaaatgtttcacctagtgtactcacaatgtttcactatgtatagatctaatgttgcagtgagcgaaatattccattacaacaaaaaaacccacatattttagaaaccccctattaagggaatttggtttattttttgttccaccgaaaaatgtttcacctagtgtagtcataatgttttactatgtatagtcgttatttgctaaaacattgtttttatataaggtgaaacaacacccgatttaaacgagtgaaatattttcgatctacttagtgagacaattccgatatacttggtgaaacatcgagcaacatttaaaaaaaatcaataataagttaattttttttcgtcggaatatatccatatgtggtcttgttttgaagatttaattgcaacgaatttaatggtgcaatcggatcatgatttggataagtaatttaggagaaaaatcggtttaaattagttttgcacgtaaatcgggcgctgacgtcccaaattttcttgaaattgtcgggcgcccgagccttaggagccccgttt

SEQ ID NO: 22255 - DNA, 1162 bp, Oryza sativa
cacatccgcccccgccgccccgaggcagcgggtagtcacgtgcgatgaggtcccggtcaaggaggttgccttgggcgacggcccgtccaagaccacacggatcggtggtcttctggacggcaaataggaagacgcgctcgtctctttcctgcgggcaaacgctgacgtcttcgcatggagaccggcggatatgcccggggtccccagggaggtgattgagcaccgtctcgccgtacggccgggcgcgaggccggtccggcagaaagtgctgcgccaggccccggaacgtcaagcctttatccgcgaggaggtggcgcgacttctggaggccggattcatccgcgaggtcatccatccggagtggctggcgaacccggtggtcgtccccaaggcgaacggcaagcttcggatgtgcatcgactacaccgaccttaacaaggcatgtcctaaggatccttaccccctgcctcgcatagatcagattgtcgactccatagcggggtgcgaccttttgtgttttctagatgcatactctggttaccatcagattcgcatggctagggaggatgaggaaaaaactgcgttcattacccccatagaaacttattgttatacaacaatgcccttcgggttaaagaatgcaggtcctacttttcaacgtactactcgaatttctttgggtagccaattaggacgtaatgttgaggcttatgtcgatgacttggttgtaaagacgcgcaaccaggaaacgttactttcagatctagcggaaacttttgagagcctccgctccgcccgcataaaactgaaccccgataaatgcgtgttcggtgtacctgcgggcaagcttctcgggttcttggtctctgcccgaggcatcgaggccaaccccgagaagatacgagctatagagcggatgcgcccccccagcaagcttagggatgtgcaatgcgtcaccagttgcatggccgccctaagtcgcttcatatcaaggctgggagagaaggcgctacccttatttaagctcctcaaacactccgggccgtttacttggacggaggaagctgaacgtgccctcactcagttgaaggcgtatctcagctctcccccagttctggtcgccccggagccaaatgaacccttgctactctacttagcggcg

SEQ ID NO: 22256 - DNA, 5524 bp, Oryza sativa
ctttctgagtttgatttgcactttgaacgcacgccacgctatcaagagccaagccctcgccgattttgtggcagagtagaccccggctcccgagcccgtctcgatccccgaggccagctcggacccctcgcagttgcctcacaccgctcactgggtaatgcagttcgacggctccctgtctcttcaaggcgccggtgcgggggtcacgttgacctctccgagtggagacgtcctcagatacttggtccgcctcgactttcgagcgaccaataatatggcaaagtacgagggactccttgccgggctcagagtggcagctggactggggatccgccgcctcctggtgttaggcgactcccagctggtcgttaaccaagtctgtaaggagtaccggtgctctgacccgcagatggacgcctacgtgcgccaagtacggcgtatggagcgccattttgacgggattgagcttcggcacgttcccagacgggataacatgatggccgacgagctctcacggctcgcgtcctcgcgagcccagaccccaccgggcgcctttgaagaaaggcttgcccagccgtcggcgcgacctaaccccttaggggagacggatgcgcctgaccggcccccgaggcccgtcggagtccaggcctcgggacccgaggggagtgctcccagctcccttagattgatcgcttggatcgctgagatccaagcatacctcacagataagactctacccgaggaccgcgaagggagtgaacgcgtccatcgcatctccaaacgctacgtgctggtagaagggaccctctatcggcgcgcggctaatggaatcctcctgaagtgcattcctcgggaacaaggcgttgtgcttcttgccgatatccatgaaggcgaatgcggagcccactccgcctcgcgcaccttggttggtaaagctttccgccagggtttttattggccgacagctctcaatgatgcggtcgacctggtccggcgatgtaaagcgtgtcaattccacgccaagcaaatccatcagccggcccaggccctgcagaccataccactttcgtggccatttgctgtctggggactcaatatcctgggaccgtttaggcgggccccgggcgggtttgagtatctgtatgtcgcgatcgacaagttcactaagtggcccgaggcttatccggtcgtcaagatcgataagcactccgcacttaaattcattaagggcatcacagcccggtttggagtgcctaaccgtattattacggataatggcacccaattcactagtgaactcttcggcgactactgcgaagacatgggcatcaagctctgcttcgcctcacctgcccaccccaaaagcaatggccaagtggagcgcgccaatgcggaaatcctcaaaggccttaaaaccaagaccttcaacatactcaagaagcacggcgattcatggatcgaggagttgccagcagtgctctgggcaaaccgaactacaccaagccgagcaaccggggaaacgcctttcttcctcgtctacggcgcggaagcggttctcccatccgagctcaccctgaggtctcctcgggccaccatgtactgcgaggctgatcaagatcagcttcgtagagatgacctcgactacttggaagagcgaaggcggcgcgcggccctccgagccgcgcgctaccagcagagcctgcggcgctaccatcatcgtcgccttcaggcccgatcactctgcgtcgacgacctcgtcctacgccgcgtccaaacgcgtgctggattgagcaagctctcaccaatgtgggagggtccgtatcaagtggtaggcgtcccccggccgggctccatacggctggccacgggcgacggcactgagctgcctaacccgtggaacatcgaacaccttcgtcgcttctacccctgagggggggtcgggtgtcaggtttcgggctcgggccaaccccgcaccccctcgggcgtgcagggttggccgggggctgccacacatgcactttcttatttctcttatttcaatatttcaataaagacagtttcaatttcctaaaggctgtgtctgtgctgttttttccttttgaagaatcttgacttgaaataggtcactcgtgctcaatcctgccctcgggggctcgggtcggctaaaatcgccaaacggggcccagaaccgagccgtgccccggggcgtggtgaactccgggggggaatcggcaaaaacccacaatcgggttacccataaccctcggtcaccacgttcccggcctggccagtctcgacatgtggatctccccaggcactagccccgacccgcgccttttgaggactgggacctgggcacgaacccttaatcaagctaagacacaaaaggaccacggcacagatcatcctcatctcatactcacagcaagatgaaattaacacaaaaatttcttcatttttgattacagattaagttgatctatacaaaaaagaggcccgaaggccttagaaaaaagaaaagaagaaaaaactgaagaatggcgggggtctgggggctcaatccgatgcgcccggaccgccggcctcgacgtcactgtcgtctgcaccaccggcattgccctcctcgtcggagttgggggcaaacgcaagccgaggggccgagccctcgaagctgtcgacgatatggtcggcggcatcccggacctcggtcccaggagggaactcatccagcgccatccatggagagaaattggggtccctggcctggtaactcgccaggacgagctccaccgctccttgggcgaggtccctcgaggatgacttaattgtcttctcgagctcctcggggagccgttggagagccccggccatcttcgagaggcgctgggcgaggcctccctggttgtcggcgtactttacggtccgccctctccagaggcccacttgccgaccggcgcaatctaggcgggagacggcgtcccaaagcatgccgggcccaacctcgcctgccaagcggagggcttcgacctccccggcggacgagtccagcgcgccttgcagatcggcgatggtgtgttcggcagctgcgaggcgggcggctacgtcgctttcgcccgcggccgccccgccgctgcgcgcccttgcgtccagctccttcgcccgcgcctcgagctcagcggcccattggttcagtgcggccctctcggcgcgggcaccttccagatcacggcgcgcctgctcctcctgcgctgcctcgcggagggacaggctgtccgccagctgttgcgccgcggcctcggcccccgcgagagctcgctcccgctcggtgagcgcgtcctcgcggaggcggagcacgagctcttcttcggcgcaggcagcctcgtgcgccgccagcgttgcttcccggatggtgacggcggcctcgcggtccgccagatccctctccacgacgcaggcgcgctcttccagcgccatggcgcgcgcctcaagggcctcttcgcgctgccgggacgccgcttccgtctccgccgcccgctgttctcgggcagcggcagcgtcaagcaccccctgggcggcgtcgggcttcttccctagctccgcctcccaactcccgtattgaaggcggagggtgtcctgcgcctcgttcatcacggtggtggcgataagggcagcctcccgctcctcctccacctccttggcgatctccgccagcaccttcttacgggtttcaagctccgagacatgccggcggtgagccttacggcccacctccaccatggcctccaccgagcgtcgcccctcttcgacacgcgcccacgcggcgtcgagctccgcccgctctgcctgcagggcctccacctgggcacttaacccatccaacatcgtggtgtttgcggcggccaaggcctgcagaaggggctctgtgttcagtggggcgatagaaggcgtggggaagagccgccttggagaggatgccacgtggctcgggccgccgatggaagtgccggactcggggatgtctcccggacccggttggtcctaagcgtcgcccgagggagtgggcccaagcgacgcgcccgcagcctgtcgccagctgccccggaagttgtcgcctgagcgtcgcccgagggagtgggcccaagcgacgcgtcccggcctcgtcgcgagctgcctcggaagtcgccaacatctagtcctggcgggctcgggcggcctcctcccaaacggcttcctcggcctggcgggcccgggcggcctcctcccgagcgatttcctcggcctggcgagcccgggcagcctcctgggcggcctcctcggcttcccgtaggcgatccgcggcctctcgccggtcagattcccgcccgcgggcctctgcggccgccggatcctcagcctcccaccccccggacttggaatggcgggagggacgcgacgggatctcgctgaaacaaaagaaaagaccagaagacgaacgagatgggtgagtaaaaactcgcgttgagagaatgaatacaaccacgatgggcgagagacgaacctgcgagggggtcggttaaacgaccactttggaggggaaatgaggtttccccgagatggttctgtctcccccatcttgcggggccacttcttcttgcgctccccctcgggctgcgatgttggcgcggccccctccgggcgcctgctgctggcacgcgccgccccgccccctcggggaggagatgggggaggtgttcctccctgcttcctcttcccccgggcatcggcagggcggctgctccccgggcccctgtcgcgggacccagaagcacgaccccctctcgggatagattgttccccccggcggctcccgcctgtgccgtcgtggccctttggagctcgctcctctgaggccccgaccgccatcataatggtcaggatggaggcgcggtctggatcgctgcagagggggaggattccttgaggaatgagggccgcctccacggagttgagattcagcacccgttggaccaatatcttgaagtcctcaggagcccagtcccatctcactccctggtgagtcctcatgaagtcttcggacccggtgtactcccaggcgccccgagcgcgccgctggagcggcgcaatccgacgacggaggtagtcgccgtacaccatggctcttgtgagcccctgggatcgcaggcccgccaggcggtcgaggacggcgtcatagccatcccccagatctaccggcgcccgccagctggaggcctgagccgggggctggctcggaagtcggaggcgcacttcgtcggcaaggggggtgtagaaccagtcgctcttccagtcgtcccacttcttgcggagggcgcaggggatgtagcggttcagcaccggcccccgtggctggaagtagcagccaccgactaccgatggcggcgacaccgactgcacggtgaagaaccaccggaacagccgaagagatgggcgcaccccaatgaacatctcgcacagatgcgcgaagatggccaatgtcatcaccgcg

SEQ ID NO: 22257 - DNA, 903 bp, Oryza sativa
gacgaagacaagggaaataatggcgaaaggagggaaacaaatcccttcatcagtgcctttatactcttgccaacgctgtcccggctcctcgcttctcgcgcccactgtttcgccccctcgtttctcgcgcccatgcttccactaatcccattcgcccgcttgcggcgcatgaggtggatatgcggttgtggcagtcgagatagatcatatcgtgcgcgcggtaattacgctcgccgaccaaagcgacgttaccatatctccaaacgaaacgaatcgccatgtccagattcgtgtgctactcgagtaatgtggcagtcttgaagagaccgctcattattgacagccgagttaccactgccgatgtgcgtgatttgtgaccgttgggtttctgcccaattgtggagaccggtcccacctgtcaccaggccttaggagtggcgtcacgcccgaccgcttcccttaaagagggcgatcgccctggcataacgccgggggctactgtcggtgacatgggatcaggagtatcatgactagaggtttgaggcagacgcaatcgcccacgtggcctggcaccctcgggggacgtcgggcccgagggtgatgtgttcgccctcctcctagtccccccgagggggtcgggctgcacccccctcggccccgagggccgaggcgccccgacccctcgtgggttttttgctccgcgtgtatgggttaggtgagcacagtggggctcacctaccacatttattgcggtttgactgagcgtgtcacgccgcatgcaacgtagtgcagtgcactcgtttatccggtctgtgaccagtcacagaccggtcagatcgcgggttaggtggccacaggcgatctgacacacgcctcgccccatcccgtcaggacgagggcttc

SEQ ID NO: 22258 - DNA, 18015 bp, Oryza sativa
ctttttttttttgatgaattgaggtcaattgagtaagacatctggtttctgcaggcacatgacttgctagttcttgaaagattttaccaggagcttgctgttttgcttcacaatcatcgagaatgagtgccttaacatgtcaaattgtaatcaagactagcgttatgttttttaagctagaatcttagctgcctatgttgaggggcaacatgatggaataaagtaacatcattttacatgttttgcgtaatagttggctgtttgcccaagtctatttgtctgtgagatatttaatacaatctacgtaattttcctatggcatttgcaattttttcctagacttttcctgtttgcatggatgcatgctcgtttgattttttctttcaacaaagaattttataacatggttgccattttagtttacaatatgatcattcttctcttctcagatgaaagtgatggtacgtgaaacatttacgcaatgtcttaaaggtggtgcttggctgttatggcaatgctgcacatgtattactgcgacatccgccttagtcatagaatttatggttttgacactccggattttgtaaaagttattttggtagtgtcagggataaacatcaatgctgtatgcttccacacttataaagttataatgaagcaattgagatattcaaagttctgatgtatgctttatttgtgtttatatagagatgggtcagtctgtcccaaggtgataaatgctggaagacctgctcatgtcgtgctatcagacaattgattttgtagagtgaactaaattggtttctgtgttgcctgattttacccctcctagaactgtggttctgttggacctttcaaagtttttgagataatgccccttgatatcatttgttaaaaacaatcaaggacataatgcaaaagcccgagctgtatttcttagttacaattctgggtgtctttcctgtgataataatgataaatgagatgcaatttacaagtactcaattgttgctatgttgtttcgatgtatttttctttttatactgttgtgaaatgtcaatgtgatgtgtgcaaagctgaaccttagtagttacgaggttcaggagtcaaggacactccagtggtgactgaaccatagtttggccgaatatgtcatctgtttgatgtttgaattatccttgactcacagtgtcttggatgttgtctcaattcagcatttgaattctcaatgcggcattatgcttggaaaattgaactgtaaaattatgggaggtgacgggagccatcagtcgtggcacttttgacagtttgtagcattgtattcctgatgaattttgtgtggtctgtcttgccgcattgcagttcgaaggtggtgcgacgtgaagtgctagtgtcagctaaagattgtaaaagtcctatacactagaaatagaagaaaagaaacgaaatgtgaaaatgctttgctttcaagtcaacctatgagaacagattaatcaaactcagttcgttaattctaacacaagaaatagcaatccttcagttttcccagtaaccctcctattctcctaggcatgaggagcagagaaaccctgcttggtcactcacggtctcacgccagtaaaggcagtaacctcttcgagcaagccatgctcacttactcatgggttcgcgcctgcttgccaccgttgtgtgtctgtttgcctttgctgccggctgctgccgctgctgttgttgttggcttgttgccgctctcccgcctgcagcgcctcgtgcgacgacgacgactgcggcggcggtcgctgctcctgcacataggacggcgtacccggcctgaactgaccctgcccctgcctctcgccgatgttgccaccgccttgctgcggtggaaatcgcgggagattttggtgttgagcaccaacctgagcctgatgtgcgtcccacccttgctctctccggttgccctgctgccgcgccaccggacgagaagagcatgccatggcggcggcgagagtcccagacgccgggtgaccgtgccccgcaggccagccgttgggcgccacgtgcggctgccccggcgtctccagcattcgaccggctgctgacaagccgacggcgccgcctctgctcgagccgggacggccgccgcagtttggctgctgcggccgcggcatcctcgcgaggttgcattgtgtgcgctgtgccatcgccgtcgcggggagaggcaccgcgagcggtgtcgacggcatcgcgcgtggcgtggcctctgcatgcggcaccggcactgcaaccgctcggtgtcggtgacctcctgaacacgatgagttgccgcaccggtggccgccggcggactcgttggcttgccgccacagcttacggcacagtgccaggtgatgattgacccggtcgatctgccttttcagcgacactttcaacatgaacagctcgaagaactcctcgttttgcgaacgtaactccttgtacactacaattcatagtttcatacatacatgtgcgcacggtcaggatgaactgaatttagtttatctcaactagctcgatcgattttgcagatgtgaacgttcatcctaccagcgtagtagattaccggatcgatcttgctcctgcgaaattgtcggaacatttgtcccttggacagccgtgcttccaggcacctcgcaatcacgtccttcacctgcattgatcgtcaatttatcacacatttgcgaggtcgatagcatcatcggcggctcggccaggggcgggtctacagtgtaacggccggtgtcaagcgacaccgacgaattttggcaaaacgtatagttaaattgcttatccatatattatagcactatgatttaagcataattagcatactatgacaccagtagatacgttatgacaccaacgaatcaattttctggatccaccactggctcggcgagccgtcagcgcaaacaacatatatttgtaaatgaaaaaaaaaaatatgtgaataaaacttgtatatacgtattcttaacaatctaaaaataaagactacgatgaaaagaaatcctaaaaattaaatttaatttttggctaataaacttaagcataagtgaaaagatatctcttattcttgccttgcttacatgttggagaatttcttccgtatcgtctacaggtgccgtggcatcatcttccgccggattttgatccgcgccgcttgcgcttggcatcgccgtcgccggttattcgctgcagcggtggacacaacgcagtgcattcgttaccccacgatgttacaccttctagcttaattagctagccgaagatggcgctccggtggaaggagggcggcttcgttcccagcgccggagaagagagagaggcctcgctcgcggcggagcttgttggagttgggattctggaacggagagaccgcgaggcgagatgagcgctatcgcgtcttctttaacatgtcaagagcgctcgtgcagagacgggtcatcacgcgcgcgggagtcggtagcacacgtctacggctgcaacacgagtggcctccccgaatattctggtactgtggtctgacggttactagtagaatatttcacaatctttaatagattataaacgcgtaatttatctctgaacggagtattctttttttcttctggacttgcaaacctgagcgcattggaatagttgataatgcactggaattgttctggttgcagttacttggacaaacaaatacttctagaaaccttgtaaaaaaaaagtcgcatcactgtaaacaaatcattaaatcaaacaacgaacaggaattaacagcatggaaaaggagagcatatagggattatcagatcataccaaaacaagaaacttgtcagtttgccactgtacatgtacatccaaatcctactggggaaataatgttgtgcctgagaacagtacttgaaaccacaacagaagggaaagtactataatttggccctgactgttcgtgtcatgtttaagaacagtgttcaaatgccaatcaggtatacagcctgaaacttctatcatctaaggacgacaaaccactgctattatatacaacaaattttctgatttcagtagttggcactgcttctgagtactgacagcatgtgcgctcattttagtctctccgtgctggcatctcggcaagaggtttcaaaacaatcggcttgcttggatctaccacaagtgaagaactcgtttacagaaaagccagtgaccaggggagctttcctgtcctagacatcttcaccattgctctctcaacactagctatctgattgtcggttgctgcatgctccttgattttcttcttatcagctttcttttgtgcatcttttattgccttttgcatcttctctgctgctctcgctctcttcttctccaacttgatctgtttccagttgaggcacaaaaccaacaaagtgtcaaacgacaactctgactatatcccaaattaaaataaaagataatcaatgcagtgggcatacgaagcatacctcaattcttttcatcttctcctttgcctgtgtaacctgattcatctgccattcatcgatatcggcctctttccttctcagcctaatcgaattaaataacatcataactcaatgagttcgaaatataaccttacgggcacaaacaaatctaaatgtcatataaacttaatcaatgacagcattttgtaggctatggattatgaagatcgaatattcaataaactagacaatcacaactcacaagcattcatgtttgcagtagtaattgataatggcttcaattctaatataaggctcaagagatataatgctacattttaatcagctaataagcaataattttctacaagtgtcagtccagaagttatgactgagagatcagaagatgtggattacttgtctatgagcttttcaatctccgcattcttccaggcaaccaacttggcgtggacaaaattttccttatgttttaccgcagaaccctggggccatctccccattctttgcactgcaactgggctattttcgccatctgaatggttaaacgcaccgccattatgatcacttccctcataggcaccaccagcctcaaagttccaatcacgagctgcagatgaaagaattgtcataaaaaatatttttcagaactgacgagactcatgagatttagatcagtacctgaggatatacgagaagacagagtatcagcctgccaatccgtttgatccactgcttcatcctcttcttcactgactttgggcaatctccattcattgatagcatccattgcccccaaacgcctacggtaattatgtgaggagcgagctcggcgcatcaatctagctggcgtggccttgtggatgaatcttggtggcactggattagttctctcaactgcatgttttcaagcgcattcaataaatgatgcgatgcaagaaaaagtcaagttaatctatggagggaggcagcagaagtaatcacatctcctatccagaagggaaggttgtctgggcgtttgcagtctgatgtgtcgtggtgtggtagacggatttatgaaatctcctctgtttggcagcctttcttggtcttcttcctgcagatgattggcttcttaacatttccaaatcacgtatgggaaatgaaaaaatcaaaccggcagatagtacaactaaatggatacaaccaaaagctacttgtaataattctatatggacccagacagagaattatccaaatttagtttgatcgtgtggaaaacatgtaataacataacaaacaaaatgactgagctaagaattctctagtttttggctatttcaagattcagaaagcagaaatgtaacagcaaaccaagattgtcaatacccttactgctttgatatttgaatcgatcaaaggtcacaaatcaaatccaggaacattgataaatcttgcattgaggcactagaccaatggttaaactggaggcgtttgttcctgtaaaccatgcaagaaactgaacaacctcatccaagaaaccaccttcctccaaagaactaacgcaagaagtcggcgaagttttccacaattcaatagttacaagctacgcaagaatgggaaattaagaccaaaggcagcaaaaaaatcaagaaccttcaggactgcgcctccccctggaaaaagaacacggaaactaaccagccgtggcgtgacgaacgaggaggcgtcatcaccgtcgcggcagccctcccctccattgctgctcacggggctgcagattggggacggcgaggcggggcggtggtcggtgagcgacccggcgctccacgcggcgcagctgccgtaggaagacgccgggcggcggccgtagggccccccgcggccgcccatggcggccatcgcgagcagcatctgcgtgctcctcccgacggacgcctccggctcggcctcggtgtcggcggcgtagaacgcggcgccctcggaggcgtcggagcgggcgggggacgagcccggcgagacgcggaacgccgcggtgggctccgcgacgcaggggatcgggatcgggatcgcggcggcgaccgccatcttctcgccgttcttcttgccctcttccggtggcggtgccctccccttgatttctagagaggaagcaaacgttagtcgcggagcgcgcgaggaagttgtgtatttagacttgagagttgagagagaggggatgccttctgactggtgggccaggttcttgtactaaccttcactgacatgcgggcccggttcgtagatagctgtgcaccggcatcagttcgctgcccttttcccttcatctcccgttctcttaactgaaccagcactaaaattagaagcaccacatgaacattcaagaagcaggatatcatctgacaatatgaatacatcatttgcgatggtatgtgcagcgaacacaaattttctgttggctctactgttagtcaggaactaacaagttctgccataacttatgaaacaatattccgtgccatgtgtggcttttagcttgctacaactccggcgcaaagacaaatttgcacctcaattgagttttcatactgtaaacttgtgggtataggggaattggcaaggcgccttttgccctaagttggaagaatttgtaacaacttctaagatcaagaatattccaggagcacgcagagcttctggacttgcaatcctactaagcagcaacacctgttgaatagttcagcatcgtccctttgactcgttgatggcctggtaagatctgctgcaagaaaagttcaatccatagacagatgaagcgcagctcaggggaatggagcaccaaggtgatcagacttcatacccttttgcaaagcaccctgcccttctttcccattccagtgccagcgaggcttgcagcgagacgtgacttgttgtcaggtctccacttaagctctttgaaagtggagaaaagctctgagagggcagggctgatttcctcatctttgattttatcacaagagacaacttttaggctctgcagatcactccatgaggttatcaccgattctagacctcgagttgtcagttgtgagcaaccttctaaggagaggaacttaactctcctgaaaaacaaagagaacgcagcagacataagtcaagatcctgaattaagccaagaaacactttccacgaaaaatgtaggttgtggaccatatctaggtatgtaaaatggctcaccatttccagaagaacaaaacattattacaatactattgccagtgaaaatatatagtaagtatttgctaaagcgttttgagaggaaactattgaaatatccagatgaaaatttgagatggtcgtcgtgctactgtggaagtgtggatgaaggtaaaacatggttttagcctgtaggtaatctgatgtcaactctaagaattccagttacacgaatgcatctgatttagagctttagaggttattcgttcattttattccactaattcattgcagtagattgctgccatattcacacaaaaaatgataatatgccacaatcgatggcatataagcaaataatgggtcagaagaaactgaaaattattccacgtatataaagaaactacctaccctagttagccctggcacttccaatgcaaatcttggcattgatcagtactagtaacagttataagactctagtccagggaaaaacaaatacagggaagtgtaggcggataacatttacgcatcataaataactacatttagtagcccaaagaactacatcaaaagactctaccgagacactgtcaatttgttggcccttttagaacaagtaatcctttactgcatagtttggcagaagatccatgagcaaaaatgcaaatatcctccaacgaatattccataacatcaatccacggtttgtgatggaagaatcggcatggcaataggtggtagtggtttatggtgaatctgacaccaccccaccactgcctattgtctgtgaagaaaaaaaacgtagagagcatggcatggggcaaaaggatatgtcaacaataatttatttctactacatacattgcaatttttttttttaattccataacaaagtatgggcactcagctagtctttactgaatccatttgctcaggtagtggtgcacggtttgtgttcgaagaattgaagcgacctacatctttatgaaatccatcgctcagacatctaagtcatggtttgcatttttaccagtcacaattatctggacacaaaaggagaaagtgcacgaggggctagataacgcacatcctaaaatggcaatatagtgaataacacaaacagcatgtgacttgctcaacacaagaggaagaataaaagtgattatgacaaacaatataacgcaaatacacaattatggaatactttcacttgaacacatctgtaataaataattgcatcttttccaagcaatcatatgctaaaacaaccaaaaatgacaatgttagccaaacatgcagtatactgaacagaggttgactagattatggagcttatcaaagctcacacagacataatcagtagacaaaaggaataatgatggaggctatctaagtgaggtttttacgacactaccgaataataaattttgcgccctcaagtcccatgataactgttatttaattaattaccacagaagcaatagtggcatactgactccaaacatggaggggtccatgcattgcaatttgcaagcattatatctcctgacactaaaccagggtcagaacaaccaatcatcagttacctacgactacttcaattggcagcaagtcactatcacagtctgacagatcaaatataaagcaggaataactaaacaatcaaagttcaaatacacaatctgcccacattgtgcgatcattgtaatatatcaacaacctagattgaaaaatgagattggtgattactatacctgcacagtcctgccatggcaaacatgtcatcttcaaggccccagcaattctggaccaataactcacgggcaccctcacaaaccaaaaggagagcatggagggcacgacggtcacgcagctggcactgctgaagctgcaggctctcaagcgtgaggcaggcaccaagatgctccgcaggcccaggatcgtcatcaatcctgcaacatccttgcaaccttagggttttgaggttgccgcagaaagcgagcgcagcaagccacccattgtccatcttgtggttggcgatggtgagctcctcaagcatcgcacagcaccgccccacagccgcgatgccgtcatagcttccctcgcaaccaacaagctccagcttcactaatctcttgcatccatgagcaaggatggtgaggccgatgtcggtgacaccaccatcttcactggtgccatataacgcagaggaggctgcgacaaggcggaggatctgaagatgcgcaaaggcggagactgggcggagggcgaggtcggtgcatcggtggagctcgagctcttgcaaagttgcgcagccgccagcgatatccatcagacccccggactccgaggcggctgtggctgagaggcggcggaggttggggaaactggcggcaacggcaacaaggcccctgtcgagcacgtcatctgcgaggaaacggcaggcgacgagcggcgggtccgcgccggtgtctagggttagcgacacctcggcgcaagtgaggagaggggaggtcggggacggcacggccggagcgacaatggacgccgggaacaggtcgaggtccgccagttcggggaagcggtggtgtaggcggtgggtcacaaaggcccagtccctgacgacgaggcggcggcgcaggcgccccgcgaggcgcatccacctcctgcagaccagcgacgcggcgcccgtgaggtggggctccgggaggcaggcgaagacgcggaggaggagcccgtccgagaactctagggtttggtccggcggcgccaccggcgcgggccgcgcctgctgctgctgcttctccaccggcggcggcggcggagtcgtcatcttcttcccggacagcgaccgcaggtcaggccaccccttgagaccgtcgcggtgcaggccccggccatcgaggacgcagacctcgggctcaggcattcaccgcgaacggcggcgcagggccccgcgtagccccggccgcgccgcgagaggagaagcccccgcagtgcggccgggcgcggcgtcggtccgattcgggagagattccggcgtggtagtgcggccgtgaggggatctgaggactttccttttttttttttcaaaatttttgggggggtttgggatttggaaatttgcctcgcccctcgctgctggaggagcgggataagagagagggtggagcggaggagccgtggggccgagcggtggtgggggcaaacgctttgaaatcctttccttgtctccgtgtgcaaggtagtatagcgttcgttttggctccttgcgccgttgcgcggccccgctgtgcacggtggaggattttctcgagagttttccttttttttgcttgtgtcttggcggagagttttgatggctcgtttgtttcttctgttcttgagcgacgtgatccgggttgttttactcggcacggtttcgtctctgcgtgagggatgaacagttccgttttaatggaggcacgtacggtacgtgaggtttgttgggtgtcccgtgtaccgcgtcattaggttgtgttctctttacgtagaaaagaggctcggatcatttacctaggctcttaagtgtttctgtaataatggatcgaaggacaattaacgccgtctgggcggatccgtccaaaaccaggctgttgcctttgcctgaactaattggcggatcccattgtgaacctccatcaaaatacagtaatgtaggatgaaattagatcacgttaatactataaatagataaaggtatattcatatttgtagtattacgatggatttctattgcatcttgtagttttcgctgtttcataacattttttttaagagcaatgctacacgtactaaatttttcttactaaatttttactaacaatcatctcaaccatttgatttaagtagatggaagttacaaaaaatctagatgcactcatagcatgacacatcagtgttagtaagaatttagtaagaaaaagttagtatgtatagccttttcctttttttaattatttgtacatcattgtaggataaagtttggtactactgtttgcaatatcgatggtcatttgtatatattttttgtgcgtctagaatgttacaaggtctactgctgtttatacatattaccattgccttgtaaccgataaagatctcatagcatttctaaaagtctcctcaaatcttgctcttcaaatatctatatatcaagatagccaaaacgatagatttctaaatttcatacgtactcaacagtttttccatattctactctccaaaattcataggtttcatatgttagtgtctcttgtcccctccttcactctcttttgttaggcatttgtaggcattctcatcctttggtaggtgtggagcccaccaagagccaaccactatgatttaccaagttcggccaacaagagaagacatttggcattttgacaagttaaatggtttatcaagcaatatgttttttttatttgctacaaatttagcaaagagagctaaatggtaaagctcttggagatgatcctagacatctatggtatgtgaaacatacacgaatgtaccatagctaaaattaatgctcaaggagacgggaaataatctctaaaaatgagaataaagtgataaacctaaatgaggttgaacgagtgggccggttaaaaattattccgttagataagccctttatctatccgcgcatactacttgggaataagtccacttactggctagcctcgagctcccgccgccatcgtcaaagctccacctcaaagctctaggaagtcctcccctccgcgtggtgacccatttgcttccccgttggtctcccctctttgcctcctggcgctccaccagcccttgtcgacgtatgacaccctacgaccctcatcgatgccatcggcccctctcaacgtcgtcacggcattggcatgccggctgccctcaccaagctccgactccaactccgttgtgggaggccatgtagaggagggagagagaaagggaagggggagtgaggatgccaccacgtggaggtcgcttttatttttgccacgcaaatgcctagtcaatacgagtagattgggttaacttgtcacgttagcaaaatcaaccatctatactattgtcacgccccggactagtaccgaccggaactagcccgtgacgctccaaataacctgttaatcgataccagtcccaggaaacagtgctggtatcacaggaagacagattatcacagcaacagaggtctctttattatagagtagaggtacagtcatgttgggctgtggacagatcccgagctcacaattgcattacaaaagggaaacggaagccaggacttggaccaaacaacacaggcgcgacttgggaactaggccgaaaccctaaaactcatcgtagccggcttgctcctggaagaactcctcatcagcaggatccgcttcatcttcttcagcaactggggggggattatttatatagagcaagggtgagtacgggagtactcagcaagccatgggaaataagtgtttaatgcaggcttcaaggaaaggctgttgtttttgcaattgattttatttgaactcttttctaaaaacaactaggtgagtgcttctcaaacgacacggatgagacagtgcgtctcgtccggtcggagtatgtgcaatgcatcagtctttagaattgattcaaggttggcacccggccaacagcttttcaaacggccacccgggccaacaactttcaaacggccacccgggcctagctgatcccgtcagctgcagatttttcaaacatcgaacccctttccacaacagcaatttcacaagcagtagtcaaacaaaactacgctaggaatcacctcacatccgcccatgaccatgggcacggctgttcgaacagtttgttaacctctgcagagggggtacactttacccacacgacattactaacccggatcacccagcccgtggggatcagccacgttgggagacctccaagctttcatgacaaggcatttcgaaagccgacacaggtttaccatatgccgacgagaggggtcccagaccaacaacaggttaggtcccagaccatactgtgccaggaagcccaggggtcctccccgacaccaccccggcgaatccacatgtctctcggcatcaaggctcccctgataagctagttactcagccaggggtgtcccattccacccatgtggtcgtacttgtcttatgtttggatgaaattccaaggaaacggtccttaggtgcaagagcgggaaaccgtacacccggtacgttccccggtccgcggttttggaaattcatttagttcgcaagcaccgacccaggtgtcgggttttccaagtcttttgtaaaacccaagttttacccaagaggtttttcagattttaagtttgaaggcgcccgtcaatactcgcacagggtgcacgaatatcgagacgcgactagatggttacaaggggacacgatataacaattatcaaaggaaggatcaaatgcaacaaattaggtaggtccgccaatctgccttgcagacgggacaacagattaagtgcgatcctatcaatgcataatatttttcaagcaacataattaaatttcaaatataggctcaagatgttcaaaggtggcttgccttgctcgagatctagagcttgatcctcgaaatcctcgcactgcggttcttcgggctccgaaactatacgcaaaacgggacaactcaacaaacggcgaaaataaagccctattaatgacctctaagcgtgccattagagagatctcgagatttgaggaattttggaagttgaacggagtcaaacggatttacggttgggaagatattgaatttctaagattactggatttttggtctaaaggaaaaggatttaattaaatcctttttgaaaaagaaaagaaaagaaaagaaaagaaaagaaaagagggagggaaattagacttttcctcgggcggctagggcgcggcctgagagaaaaggggcggctcggccgagctaaatgggccggccggcccaaggcggcccaaggcacgcgcgcgcgggaggggaggagagagagagccggtggaccgggctcaccacgcgcggtcccgggtgggacccgcttgtcggtgacacggttcaccgtgcggagcgagcacgcggcgcacgcgcgcgggcggggagggacgcggtgtacgcacgcggttcgcggtggacgcggatgcggcgggcccacgcgcagcctcacggctcgcggtggaacgcgcgcacggggagggactgaccggggtcggctcgacccggtcttggccgagctggcgccgacgtggcgcctacgtggctgccatgcgggccggcgggaggtagacgacgacgccggccggaacggacggcggacgacagcggcgagcggcggagcgaaccacggcgatacaggcggaagcgagcacaccgggtggttgcacgagacgaggggagacgagccaactgctcggattcaccggagggagcttgacggcggcgaattgcggtggcggcaaccggcggcgggagaagggggaaacggcgacgaggttactaggggccgattcccggcggcgagagcatctacgcggctacgggaattcgatgctagcgttggattaggaggaaacgcatcgagggaggccggcgacgagaggcgcttccgagctcgggcggcgacggcggcgagcacacggtgagtgacggcaacggtcagggcggcgccggctagctacgaggaggctactcaagctactacccgagtctaaggggaggagatggagcgaggagggagaacggggagatgcactaccgtgcgggacggggcgcagtgacgagaggccggcggcgcgggagtaatctctccggccttgggccggggaagaggaaggagagggcgcgcccggagtccccttccgcgtccttgctcgtgccggctcctccgaaacgcgcaacgacgaacgacgacggcaaacagagcacgggaggcggcggcaatggcgtggaggcgagtgggagaggaagggaaagggggagctcgggtttataggatggcaatgtcggtttgggaaccgacttagggcggtcaaaggagagggctggcgctcggtggtcgcggccaaagcggcgacagggaggagggaggaggatgacgccggtgggaggaaaaagggaaaagagggagagaaaagggggcttgcccccttgcctcttcgcgaaaaggaggagggagcgggagcgacgcggcagagggaggaggagctctgcctccgtcccttggaggctagcacgcggagtggcggggccgggcgatgacgacggcgatgacggcgggggcggtgtggagcggagcggcgacacgggcgacaggcgcgggcaggcgcggcagaggctgacggcggcagcgaccaggcggtcggccaacacggcacgcgcgcgcgggatgcaacgggaggcgcgtcggattgagcggcgcggctcgggcgcgcgcactggctcgcggggccgagcggctgcgcggcagggcagcggggccgggcggcgcaaacggcgcaggcgcggcacgggcgacgaccacgcgggcgcgcgcgcacgcgaacaatggcgcgcgggcagagcgagggagcggagagggagggctcgactcggcgcagctcacgcgctcgcgcgcgcggcgcgcgggcagagcggcgaagagggagagagagagagagagagcgccggggagggagggggagatgggccgagagagattcggcccattgaccccgggggaggcaaaatagacttttgcggagggatttgatttggaaggatttggattcggaaatgagctcgacgatagatcggggatttgagatctgaggtggcacggacactagactacaagaaaagaaacaaatttcgcaattagggtttttaagagataattttcccgctaggcgcgacgacggaacgggcgctacaactatattatgaggatctaatttaattcggttttacaagttggagcttaaaatttctggtattgtaatttaggaatgtcaattaaactcaatgtttagatgacaaacgacaagtagacttaagctgctcatttacgctgctgcaatgaaggcccgaatttcatcaaagggcctcatagactgatcttgggttcaatacaaaaggcccatgtggagactgaaacccaacgtagccggaggcgcacgcacgccgtggccggagctgcatgagacgactggtgatctgaatgaatgccggctatttaagtcaacaaatctgctattcaagtccacaaattaacaacctgtcatgcaaatgatcaccaaatccgtaattatgtccaaaaacacacctcgtatcacggaaatcaccaaatatatgctactagtactattcaagtcccagctgtagattttgaacagtaacttaaattccacattcgtctttgcctctcgcgggtaccgagcccgacaaataaaagcagaaggaatttaatctttcctttgtaccactgtgccgtcgacctgccagccacaggttgcagctgcctataaaatagacagacggcaagttgtacacacatatccaggggcgcgcacagtgaaggccgcggccgcgctgctgttcgatacacacaatcggcggcgacatggcattggcagccaagctcctcccgtccatcgtcgcgttcgtggctctcgcctgctgcgtcctccgctcatccgtcgcgtccgtcgaccaccaccggaagctctccggctggtccatcggcggcgcgacgtggtatggccctgccaacggctctggaaccgatggtacatctacctcacggactcgatcgatcatcaccagaggatggaccatatatgcgagcggcctgcaggcttaattagtactgacgaggcgtgctgcatgttgatgtaggtggcgcgtgtgggtaccagggagacgtcgggcagccgcctttcaactccatgatcgccgccggcagcccgtccatctatgagtccggcaagggctgcggctcttgttaccaggttcgatcgttcaattcgtctcgccagctgatatatcttttaatactcttttgttgctttccaagaataagacagtcaactctaacgtttactcgtttgtttgctactcctactgccaatttgggaattaaattctgcaggtgaagtgcagcggcaacccctcttgctccggcaagcctgtgaccgtcgtcctcaccgacctgtgccccggcggcgcg

SEQ ID NO: 22259 - DNA, 979 bp, Oryza sativa
aaatggcagggggtggacatcgcgttccgggtggacgccggctccaaccagtactacctcgccgtgctggtcgaggacgaggacggcgacggcgacctgtcggcggtggacctcatgcagagcggcggcagcgcggcggcggatcttgggcggcgatgcagcagtcgtggggcgcggtgtggaagtacaactccgggccggcgccgctgcaggcgccgatgtccatccgcctcacgtccggctccggccggacgctcgtcgccagcaacgtcatccccgccgggtggcagcccggcggcacgtaccggtccatcgtgaacttcaggagggaggattgatgagatgatatgtaggggatatgtagggtggtggtcgcacgcgcgcgcatgcacggtacaacggccggcggcgtacgtggcgctagcttagtttaattatgcttggagctatgtatatcagggcacaagtggtttgtgtgcgccattgttgcgcgtggagtgatggagctctctgtcagctcgatcgactgtggtagaagaataaacagatccttcagctaagctatttgccacagttgggcacttgggcgttggctccggtccatgtaccgatcagccagcgtggtccggggctccgggccgtcgcgggggataacgcgacttgtgctggcttccgcggttccacctacgcacttcgttcggtggaaaaagtcctttttatttttctcaactaaagttttagtttgattcgcatccatggacagcaaaatcagatagagaggctaccttaacaatcaaaattgactcattttatcttttcgagtgatttaggtaacggttttttcctacatgacacattgaactagagaaatttaaaatgatctatgaaggaaatcatgaccgccatggtggcagcgccacggcaatcgagctcgagataggagaaatgatgccacgggtggattgagtgtccaatggct

SEQ ID NO: 22260 - DNA, 12550 bp, Oryza sativa
ttcatagtcgcatcgaagtatcaagtatcgaacccaacttctagtttagtttgttgagcagatgacgaactccttttaatggtatcagtgaacaggtagtttcaggaatcaacagaggtagctgcagcgttagctctgtaccgtgttgtacagggcggcagttgctgcctgcatgtggtgttgaggtcatgaggaccttctgcttctcactgattgtgtttcatcaagagaaaaaaaggtatcagttcccaccttgattaattgagtgtgatgaaagtctctctttagaggaaaatggacagcacatttgaaggtgggcctctaggaaatggacagcacagtggtggccttggttggtgctttacaaatgctctgctgggcgcgcgcctgggccttgtgaggcttttgtggcttggcaatagtacacttgcctccctaaactgttttaccgaagcaatcaactgcaacgacctccaactactaaagcaggttcactttcacctctagaaatatttttgtttccctaaatactggttgcgatttcaccttgacttttttagggtaatatattgcaccatatacagtggagaacacaactttaaaatatagatggggcgaagaacggagatgttcactcgataagagcaatcgaacacaacagatgtggtagttatagttcaattgcataattacctcgatcattatttgtggcctgcatgtgttgtgaagagacaaactaattattagatgttcacaccttattatatctaattttgatggcctataactactataaggggtagtgggtcttggaggtgtggggtgatacgggtagtagctgggacggtcgacccactctgactaatgggtaaatccacccctgatcatatactaggtgtgtttggtaatttttgggaaggggagatagagtttagagaggggagttgatgatgtgattgatcatatgtgtttgctattttactctaagtctcttgtttgccgaaacaaactttggtcgttgatagttttttttatggaaattgtattttaagtgacgatggacgtcttaaaacttaactagcttcgctcatgagggaatctcctctcaattttcactcattataagtgagaatcacctataagcatttgatatccctaaagaaaaggtatgctccctctctttcaatataaatgcaacttagcatagacatgacatatctcagaaatacgaatctagacagtattgggacaaagggaggaggagggagtattgtctataagcatgcggacatgggctttgagcctttgaacaagggacaaatttctgatatcaaaatgcattatatgtacacaccaataaaggatggtgtttggaattttcctctatatccagagcaggtgccatattggaataagccaaatcccccttgcaaaaaaaaggactaacctaaaatccatgtatctcgtgcgtggaaaatagattcctagatgccaaaaccattctctattattaaaccccccacaacaatcaaaacaccaaacgggaatcatgatcaacttgcgaggtcaacacacccaatgatccatctcaggaaaataaagaatttagagcaaaaaaacaaagaaagcgtcggcagaggcagcagctttatcacaaatatgcatgtactacgtatatcagctatcttatcgccattcgccaataataatctcgttcgttattcccgtatttcccctcgttgttttctcggggaaacaggcgtcgtgcgcgcgtgggacgtgggcgccatctgcagcacccacccaccagcaggaagtcgtccaccggcgtggaacgctccaggtttcggctgggcgacgcacgccgcggagccaaaaaaaccaacgcgcgcgccgcgcgcctgctggggagtacggcggcaaggcgtgagaccacgcgcggggcgatgagaactttcggcccgggtttcggctgccgcgcgcggcgacgaacgggcgagtttagccggtagagcctgacccctgtcggtggacggtggtgaggcaccgggtacacgtgccggcgccagcgccaagatcggcggggagctactacccctgattattcctcgattcacggcttggacatgggctttgtcaaccgtcaacaagtgatgactcatgatcactggccttttttgagcttctagtaaattaaaaaggctcactgaggcgtgcgtaacagcgacagtgcaccgtgatttatagctttggctactgtggacgcgtgtgatttaaatagaccgacttgcggcgatgtttggatcccatgtgcaattggtccggcattcgtattaagaacttcagtacagtagtaagttcagtagcgtctaggaatgcgagcaccatagcgcttcactttctgccaaaaacacactactccagattttagggagaaacgatcagataatatatgccgatggacgtcggtggccgggttcgagtccggggccgattaaatcaactgcaactaacgtgcttccgagtcagagattacggacggaggagaagtactactaatcagcgtgctccgacacgatcgaactgaagaaaagaagagagaacgcagaggagccccatgtgccactgcttaaacaagcaggcgcccctacatacacgtgtctcggatcggacaccaactgacaaccccacggctagctccacgaggcacacgatcctgcccgtctactcgtcagagactagtaacgtgggccccacgccaacggtcaactaattaacggccggttcggttttctttactgtgtttgccacttgctcctgcgtgtgttcctcccttattttagcagaaagatcacctgctccagtaggataaaaagaagaggttcgattagaccctagacaggcatgattgatgattccaaccttgtttgccaataaaaaaactgcgtgattgcataaaagctagtagccaatttaatttcttggataaattgaacagtttagtttgtttaaaaccattgaaaaaaaatcaataattcctagtttcggtcactatgtgtttccaaatatcaaaagatagagatagccatttaggacgatgctagaaaaattgatagcctaagaacaaatcaatgtattttagttagacataattttctctctcacaaaatattcatataattttaaaggatttgaaggggatttttggagtcagcctaggactaagccctaatttccctagcttgtagctccacccttagagatcaccaaggaagatgtcgttgccttttcacatcctgcatttcagtgtcctcgctagtgttgaagtaaagaagacatggttttcatgttgctaagggctgatttagtttgaagacaaaacttgccataccaaaatattggcattttaaacgtaattttgttaatgtttagtttgctacgaatacttgtcaataccacacaaatgttgccaaaatattggcattggcaaaaaacttccacatgatttggcattgccaatagtttggtatggttgcaaactaaacaagccctaaatctctatcagtgtctaccgtattcttaaggtactcaatgaagacttacgaagtattttctatcaagttattcatgataattagcggtgatgaccgatcagtagtatttggtagttagtacaagtcactaatttgttgtgtgatattggtatacgtgatgaaaagttaagaggaacgatgatggtggcaatgctcgttttttattaatattataagtgcgggagttgattaatatcgtgtttacgctcgtctatttatatctcttatggtatggtgttttagaatatagagttcttttctatttcgatagatctttcatatttcttagttgtaggaatagagttgttattacttctcttgttgtatatataggccccgttcgtttcctctgaaaagaatggataaagttttggattttcgtggcacgtttttcaaactgctaaacggtgcgtttcgtgcgaaaattttctatatgaaagttgttctaaaatatcatattaatttattttcaagtttgtaataattaaaactcaattaatcacacgttattactacctcgttttgcgtgaaacacttgtttaggagattcaaacaccatcataatctatcatagtggaaaaagtaaaaaaaaataatcaaagtttgtaacgactaaatacgaacaggagcaattgaaacgagctactgcaactgccgccttttctgtaagaataccgcaactgctgtcgtcttccgtttagcaacaaccgttttaattcaaatttacctttttccgagaacagctcgaaagcacatagcgtatcggcggttgcttgatactcacaaagtcacaagtacagccacatttcggctacagaatctgatccaaaggcagatacagagcgtatgcacgtatgcgtgcatgtggctgtggggtcgcctcaactactaagaaatcgaaaggtgtggatgattagagctctctccattattacaggattagctatttcatccactaattaattgctcttatttgacgcgcacacgtagaagttcagaaggtcagaatacaattagtttctgaacatctcttgttcttctgaagtctgaactgtactgctcatgcgtgcacataatgcagcttcttcccccaaacacctcaaaagctctgtttaactatgcagcacgatatatatgattatgctctttgccacgaaaaggggtgcgtcgcatcgaccggtcacatggcacaggacgacagggatcaaattattcggcaaatggcggcagtgcaaagctcaaaacgcagcaatccgaaaaaacattctcctgtgcaggctggcacaggaatggatgaatgatcgatcgttgcattttgggggtcacatcgctcgtgcatgacaggtaaggtgtggtggtaaggccggccatcctgcatgatcagcagagagagagagagagagagagagagagagagagagagagagagagagagagagagagagagagagagagagagagagctaaagattgatgaacatttgggaaaggaatggattcgaagatgatgttcagtagacagtaaaccaattgttaaatcgtgtgcgtttgagaaaggtttgggccagagatgttcgccaattcttggtttttttttatgcgtgctatcctaaccgccgagggcaactacctcgtgagatttcgttttctttatcatgatttgggcgttggagaacgtgatcacctacattatcaaagaggatggcctctgactccttccattttgtgttatactactaaccggtagcaacaatatgatcatgcatatgggattatcctatcgcccaaaagaaaatcatgagaccgatcgaccgatcaatcctccccaaattcgtcctcaaatcgcgtgtgatttacttcattgttgttttgtttacttcgcttttttgtttttaaaactaaagcttgatctgacattgatgacattagtgatctccggggccgtaaataaataaactcggagattcaactcatgatacacctgaactattagcagttagcttcctgacttctagcacttccatcatttgagtttgtttacttaagtctttgtgtagaggtcttgcacaaattgccatcactctcactcttaactttttttatttttttagaaaagttttaaaataaataaagtcaacaaagtaattatataatctccaaatgcacccctgaaagattcttacataattcttacaaacaaactcttaattgttggatgtaattatatgggagttaaattaaatctagattttagtcgatgtatagagatcacatcattgtttgtaaggtttttgtaagaaaaaacattgtacatatagccttttccttacatataattttgttaatattatgtacgcattccttaattagaaattaacatatgtacataaaacaacaactttaggatactatccctaataccctataacaattttattttattcatttattcacatttgacaactagaattataccagtgggtaaagaccaatgatataatagctattaggagctccgataaattgaaacattaggatcgctatatacatcataattgaaaagttaatgaaaaattcttccttggttttgggccaaatactattcattccttcctttctagccccaacctagtacactaccacccttcgctcggtctgtctcttttcgatccagcaggcccaacttgcacaaccggctaataaatatatttaatgtaattgtgctgcgtgtgcgtgtggtggatcgaatcagaaaaaaaaaatcagaagcctaaaaaaactggacggacagaaaaaccccgaaaactttatgtatcttttaattagttatattatagatgtaagaaatggttatctttcatgcagcttgtgtaatgacttgtatctctttcatgagagatgactcctcatatttctcttacatctcgtcatttgaatcaacatggcagtcttggaactaatacttactcgccactccatcgtgggcacttaattagccaaaatgaccacttttaaaataagttttagatgcattttttttctaaaaaaagttttagaaatggaaatttgcctgcataccttgagatttgggatagcttaagtccctggcaaacgcaggaaatttaaccaaaaaacaatatcatgccaacttcgggagcaacgtactactgtacatagatcaattctttacttatgaatggtatatataaaattgaactaggcgagatgcatggtttcagatttgactgttcttgaaaccgatcagacttgactgttagttgtgaagttttccctgtgttccaattacaagtagacactagctaatctaatactaacagtagcatccctcttggttgttctgtagtgtactgaaaactaatacaacaatgctactagtgcctgataagttgatcttcgaacaatgtgcgcttatagcaggtacatactctgagattgaatttctcaacttgtgttatcccaattgtacttcaccaatccacttccttacaagaaattcagctcgccttattttgtaggtactggatactgatcgaaaatcaacaacagttcgtttagcctttttccctacaccaacttgtcacgttctcaccaataattctcgaccggcagaatccctaaatttcttgccacgtacgtctgcatccctccaaaaattccctataaataccccttctcggccactccctgcaactcacccaagaacacactcgagctgagcacgtctagctagctatatctctcaacatcttccgagctactactagtagctagctagctagaggaagcagcagcaatggcgaaatcttgcaccttggtactactacttgtcgcactggtcgggctctcacttcttgtgagccccattgcttgctcccgcaagctcagcaagccgaaacccaagccgaagccgagcatgagaagccggtggtccgggctcacaacaactacaccggtagcccgtcggtgacggtcaccaccggctgggccgccgccggcgccacgtactacggcgcccccaacggcgacggcagcgacggttagtgctcgcttgctttcgctttcgagcttacagtacttgcattgcacggcattggtcgagctggaactgaaattaaaatggaatcgggggaaaacttgcaggcggcgcttgcggctaccagaccgccgtcgggcagcggccgttctcgtcgatgatcgccgccgggagcccgtcgctgtacaagggaggcaaggggtgcggcgcgtgctatgaggtcagcacacacacacgacactgacacatgtacacacagcagtgtgtggtcacacgggcgagctagctattactgctgcgagagctttcgtgtagctccattaatggcggaaagtggtcggctgatcccaactcaatgcgttcatgtggccgtgtacgcaggttaaatgcacgaccaacgcagcttgctccggccagccagccaccgtcgtcatcaccgacgagtgccccgggggcatctgcctcgccggcgccgcgcacttcgacatgagcggcacttccatgggcgccatggccaagcccggcatggccgacaagctccgcgccgccggtatcctccaggtccagtacagaaggtatatgcacattcgcatcagtgcagaatcacgaatcaatggcgccggcaagctgtagtataattagctaaccttggtgcttaattccgttaatctctcgtagggtgccatgcaagtacagcggcgtgaacatcgcgttcagggttgaccagggggcaaacccgttctacttcgaggtgctcatcgagttcgaggacggcgacggcgacctcaacgccgtcgacctgatggaggccggctgcggctggacgccgatggtgcagaactggggcgcgctctggcggtacaactccaacaccggcaaggccctgaaggcgccattctcgctccgcctcacctccgactccggcaaggtgctcgtcgcaaacaacgtcatcccggcgagctggaagcccggcgtgacgtaccgctccctggtgaactactcctaaattaattacagctctctccacatctcctgcaagaagctgcagtgcagagttgcggtaaattggtaattacagatttataattagcctcgggttaattatatggcgggaaatgtgcgtccgggtgttgcgagaggcggtgtcagaagaggaggaaaggaggtttaagaatcgtgttcttccctccacggtctctgcattcccctagtgatgtgactgtgtcgtcgtcgatttgtctgtaaaattttatttttcttagttatatcttcctctgttattgtcatgttgagggagaagcttgagctgcaactaatgttgcatgccgatgtatcaagtttgtgtgtgtgtgttttttttgtaccacgcaaatctttcagataaatggattagtactgtcagaagatttctgtacttcactggaactcatgcattgttgtcgttctgtctcaagttcaattctcgcttttaggctgtgtttggttcctttcaaggttggaagtttggattgaaattggtacgatattactgaaaagttgtgtgtgtatgattggttgatgtgatgaaaaaagttgaaagtttgtatccaaagtttggatctaaacacagccttactgagcagggtctgtgatctctgaagtactgctccctccgtccaaaaaaaactcaatcctagatttgaaactgaacacattggtttttttttttaacggagggagtatgtcctagttgcagttcgaatccctgaacaatcaaccagtaatttgaactggagtagcacaagatagatgctgtacaaagaaaatactggacgtgcattttggtgtaaatcatcagcgcgctgtttctgtgtcctcctttttttcttttcgctgaaacctaatactcccaaacagcataaactccaatgctgcattatccgcccgcacattgcaaagtactactgtagtataagttgtgctataaattttgctctcctgttatgctgggttcctgccgacgaagacacatgcagttctcatcgaaagtagacaaaagtgcagagtcttgaatgttacacacactgattgtactcaattattagtagtttaagacacgaactggttttcaatggaattattaatgcatggagtacacttgtgctcctctacataccggagcttcgcttgtcctcggcattatgaactggaaactgagaaaagtcgtctagtttgtcatgtgggtctgacaaatgaagattatatataccaggagcgacgaccatggatttcgattcagaaagtttttttttctaaaaaaaactctgcctatttctgcacgagtgtgcagattaatattgtacagtacccgccgtcatatggatacagatttttattttaccacttagtttatgtcatttgatctacttaattccactagcattcaatttcttatttgaaacgtgccgctggttgcatggattaaaaataaatctcaaaattcaactagcaaccaattgcctgccccagatttaccggaaagggatacccacatgttagtgctcaactgcacatccagttttaccatgatctctacgtagtagaaattactttaaaccattatctttttttttctgatacaatgaaacgtatatttggtactagcatcttgactttttggttgtagaatatctttttccacaagcactgataatagaactaataaatcaataattgagtttgcttttaatcgtgacaatattagtagagaacaccgtaaaaataagtatgtaaaaaatagataaatttcgataacatacgtgtgtcgtggatatggattttcataccttgatgggatctccacccgttacttgtatgtcacctaaatatttatcaaaaaattgaaaaacattgataacatatgttaatatgaaatatatcagtgcacaaacatacaataccaaatttgacttctacaagttaaagcaaaaaaaaaaaggtttaaccaaaaatagttatcatacattcgcagctatatttgttatttttcttacatcttacagaaattgaattgtaatatatttaatattaatctatcttgtcaatttattttaaatctgtaatgactatttaaatagcatttacggaactagaggatatcacctatcctcttgaagaataaatacactttcccgtgtgttgttggtatatttctgctcgcagaatgcaaaccacatccgatgctaacaaccaatcacggcctaacaaactagtagtgcggagtacgtgccaacattttgatatggcatagtctcagccagcaagcaaaaaatctgcgcttgtctcctttttctcgttttaatgcatcacatggcagaaagtgaccgtgcgtaaatcattcataactaggagtaggctatttcaagaccttcaattgctcacagtacaacgatctagcggcggtgatacgaaagagaccaccatctatggcacatagctctctttcccaagaagaagaacatgctgcagacctgacctgcaacctgcattcaggtgcggctcgcgcgagtggtcgatgtcaaaagacgctacctagtcactgtcaggatccatcgcgatcctccatggctgcgctccatgtgcccgccaagcgcacacgacaacgatctggatgaaaataataatcgctctcgaaacggcacagtgtacgagcggaaaaccgatcgagagctcccccatgctctgaccgctcgcatgttccgctcccccgttctgtctcccttcccctcccccctgctaataatctcggcgtcgatggatcgatcggttggtctgtgcgtttcacagtccgtgtagccgcctccggccaccaccaccatcaccaaccaaccaaccaaacaaccgagcgagcgatcgtgcaggcggcgtagcgtgaggtgaggtgagcagcgcgcgcgcgcgcgcgcgcgttccccaccgtgtcagtcgcgggcgcatgtggagagattctccggtgacgggagggtgaaagactgaaagcaacgggcgcacatggcggtggtgctgtgcatgcatgcgacgcgcgcgcgaccccgcccgcggccacggttcggctgattttgttgggtattcgcccctattcgaccaggggtggtcaaaactcaaaaccccgcgaacatgttaattggcagcatcgaaatttctaatctgtcctgtccttccatacatctaccctggattcggatcaggccactttggcagtacccaatcatccagccatccagcacacgagagatggcccagatttaaccgtgtcatacatcattttagctatttgaacaagcatagaacagtttcagttcagattttgcctgcaatttctctccctttgatctgaattttcttgaactttaagacaacccaaatattgttaaagaaaagtagacacatacttcatttcattatattgaacttcataatatcttgcacgcataattgacaaaatgagctagagtttaagcccttgtttagtttccaaaatattttttccaaaaacgtcacatcgaatctttggaaacatgtatgacgtattaaatatagataaataaaaaaaagtaattgcacagtttacatagaaattgcgagacgaatcttttgagcttatctttgatcttatttttctattataatatataaaataaataaatgtatatttacttttattatggtgttttgaaagacaaatttatatatgttgtcctttaaactaaatatttttaaaattattgatggtcaaagttataaaagtttggcctcaaccttatctaaaacgtcaaataatatggaaccggatggagtacatgatagctataagtgatacagtaacccatatgtgctaatcacggattaattaggcttaataaat

SEQ ID NO: 22261 - DNA, 918 bp, Oryza sativa
ctcctcaccctccaccaaacgaatctgatgatacccagctcgaaggtccaacttagaaaagaaacgggctcctgagagttcatcaagcaattcatcaatgacaggcataggaaacttccatttaactgtgatagcatttaattacctgtaatcgatgcacaaacgccatgtaccatcttttttcttaaccaatagtgcaggtgaagagaaaacactggaactaggctgaatcaccccagcaagcaacatctctttgacctgcctctctatttcatctttttgagcaggattatatctgtaaggccgaatgaaaactggtttagaattgggcaggagagggatctgatggtcacaagctcgtttaggacgcagtccctagggctcctcaaagatagactgaaattcctgcaaaagctggccaatatcaggaggaagaggcacttctgtgacagacaaaatttcctgcaattgtaagacatgcataacagaccccatcttcagcatgccttgaagttgttcaccaggaatacccaaacagtggttggtttgaacctgaatacccaacaattgcacttgacaaccagccctctagaaagacatccatttagcagtccaatccacactcattggacccagttgcatcagccaatccatacccaaaatgacatcataagtaccaaggggaagaaatttgaattcagtgtggaaaacataaccttgagtgcaccattcacaatgaggtataaactgagagcaagacaaaagaccaccatctgcaaccttcactgatacagtgttaggtagctgttgtaccccttgtactgctgagaaagagcactgtccacgaaggaatgagaactaccagagtcaattaacataaggacttccacaccctgaacccatcccctgatcctgaaa

SEQ ID NO: 22262 - DNA, 10131 bp, Oryza sativa
ccatctgaggactatctccattgaactgaggacagctcatcggcggaacatgaccactaattcccatggaacccccaagcgaaacagaattatcagtggttggagaagaaggggacgaggaggggggtgatttcataccatcaggcgacttaaccagcgcttgaattttatccacctgctcctgcagctccagaacagaatcttgaagcagatccacgcgcttctccatctctggaaaacgagattcaactacaaccttgagcaccaagaactccgcacgactcttctctgtagattgctcacgacgcttctcgctctcctcctgcttgcactctgcgtcctccatcttcttcaggagcaaatcaagtttgctgtcctgatccaagaccttggccgccattttagtcacgtagcggggtttctcgtattcagccatggctgaagctttcctcaagaacttgcgtacccgattgagggagccgaagcttttgcgggatcaggtcgccgaagcaacaatccccacctcgctcaggatttaccacaagaaccgagaggaaaaaattttgggtggtggctctgataccagattgttagctacctaacgccaatccaacaatcaaaaggaattcactcaagaacacaagaatttttccgccagatccaaccggatcggcgccgccgccgccttcaccgccaacttctttcctacttgtttctcaaataagaacagtattagtacatataggagtcaattccctcacgctaccgattcggacagctggagctggtgctcatttggcctagtccagtctgattacacgataattggtcttgcgcacacgaatgggccttgctagacgagtatgtacttcctcccttgcaacttcagtcttctgtagtaaatctgggacgctgacatactcccttctaattctattgccatccactaaatcaaaattttcatagatgacatcggtcaacaaagataaagatagcaatcgattgagtaacaaatggttcaaataccaagaagactaaagggggaggaggagacaccatggagatatacaaaagaaatctaagaacctattagtgattattgattcaatggattttgctaactgccattcgacagaaatttaggggaacaatcttactacttttgtgacttctgattaacttgaaaattcatgcaatggcttccttctcctcaagtttcagcgacccccaacaactccagtaaccctccaacaaggacacggctaccatcccactgggttaggtttttcatggtcagattaggaggagtaatgggttttgaggctagggcgtgatagcctggtagtgcgcgatggtgtcgggaaggcgttgaggcaatggggcactgctgaagctatgagaatggaggagcatgatggaggtggcacggaaatcaagaatatgttgataagtgacgattaatctactcgtgggagccaccgaaaacatagaaagatgatgtgggttggtgaggaatatgatgaaggagagggaacaatgatgtagagaggtggagggaggaagccggtggtggtgttgtggctggccaacgggtttggcctgcgttggaggcgacaccggagaggcagatggatagcgcctctgagccggggaaagaggtgggaggtggcggtggcagtaggcaagtcgagttcgagttaatggggattagggatgagtgcacttgagattataagagtgtgggtaatttgtgaggcattgaattttaatctagtgggtagaaaatcgtattattagtttggggaatttcttagacatgctgtatatggtagtccggttcaaacaaaaatataatttgttacaagcaattgtggttggaagagtactaatagtagatatgctttgttgtggtcttgttgtaatgtcgtggataaaagggacatcatgatcgtcttgcacggtataacatcggttctactaccgtacgtgctcgatcgaggtcctaaaccttcagcgaaaatgagcagacggccggcaaaactgacaataacgataaggagagtcgaaacgcacgatgaacttaagaagtggggggaaatcaattagacgcgtcgtcatttcgttcgtctgtactaatccagtacgaggcaaacttacacaactttgctatgaacctagctacagctcacgggtgctactccctccgtttatttttatttatccactgaattaagccgtgattaacatcaagaaaatgccatctgcgtcagacgtactgtcaccgtgcaagtacgtagacaaccgctcgcttttaattcggtgcgctctgaagctttctctagcttatctacctatatctcctcctgtttaattttgccacgtacttttcctggtcgtgggtcaccatatgacccgatcccagcggacaaactcacatgattacccccactaactatttactgcccgtttgtgtatggttcgcctcgccgtgcggcactggtgcgacgacggctgggccaggggcattagtacgttccgattggagcatttgcttctgccgatccgctgcgtcacctgcaaaaacggccaaagacgacatgcggctgcatctgcatgcacgtacaggaggcagccgtttcagttgcgctactgcgaggtgcgaccgatgagtagcatgttgatgcatgccggtcttattggactcccgaaggagtaaacttgaagagatttcggattacttattaggttttgattggtctgagttacgggttgataagtccttaaaaaattaacaaactaacaaaaataattcacaatttaaaagccagtatgaacaaagaaacttataaataactctaaaattaagttttaaaatttaaattttggattcggcaaataagagaagcatacaatgagaggcttaatttttctctactttttcataccatgccaacttttgtgattcatctattgatggaaaaaaaaaagaacaatctgttttatttctagtcaatgtcttccatcattttccctgcaaattgcccctactatatatactacctcagtgtagaaattggacgggaaaactgcataagggcattcacgatggaagctacttctaagaatggccttagggagaaagaatgtggaatgtagattgaagttatatcttataatacccttctcacaatgtatggtggctttgactagggcctgaaataattcagttcataaacttagctaatatatgttttacattaaataaatatgcagaacaacctttagaatcatcaacaaaagttacatcataaccattggcctacttgtcaaccactaattatattcgttttgcctatcaacacatcttcccactctaggcaccacagctcctcccactccagccaccacaacttcactattgtggatcgaaggcagccccacgactttccccctctccaactgacgtcaccaagacctatgcaaggtggatcgaaggtggtttagatcaacgggctactccactgtctagtcctggctgccgccatccttcttcacctcaaatccagccatgttgagggcagctctacccaacaagttcggcggcaaaaggcagtgacttggtcgatgacatctcctggtcgcggtgatggcaatggtgacagggtcctaatagtatgcagtgctactcttagccacgttcctcctctatctatatctgaccctctccactagttgcggacttgtcggtcgtatctctagccattgcctctttgctttccaaccgacattgtcagtactcgcaacattgaggtctgtgcaaccacgcggaaggagggggcatattgtggggcgatggccttaccgacgtggcttgcatgctttagctacacttgcaagtgtcccatcctaatgagacaattgtgccctctgcaaaggcacaagaagccttgtgaaggaactatctcattagatatatcaccacggctctgacatggtgagcccaagcactcaccctgatgaggcaaccgtgccctgacgacgcacgagaagcctcacgaggacacatctatggctgatatgccatcataactctgatgtagtgagcctgaatcactcgttaggtactcacactatgtatggcctaagtgtatgtgtaatgttgaccttttatctcttttagggtcaaatatctagttctcccaaccatgcatacagctgacggttctttcacggttcaactcaacccttttctaatattctaactcaaacatgtatataaattttaacccaacccttttatttattcctaaatctttagaatttataaagttatttatagactaaaggtttagatcccattctcggtcactctatatgaagagtgggtgacaattattgaattactagtacttgaatgaaaggatccaaacaaactcttggcgtgtggatggctgctcggcctcggattgtctaggctcgccgcattttacgccttggagagagttggtgattgactgtgtgcagtggagtactggatggccagaaaagattaattaggtcctggatttgctttttcatttacagaccttttactgttgcatcaaatccccgtgtatgtttggtcatgtgactgtggtgtgcagtgaatatcagttaggtcacacaccaacactaatatactactcccttcatcccataatataagggattttaagtttttcttacactctttgaccactcattttatttaaaaaaattatgcaaatataaaaaacgaaaagttgtgcttaaagtactttaaataataaattaagtcaaaaaaataataattctaaatttttttaataagatgagtggtcaaactgtgcaaataaaaactcaaaatcccttagagtaccaaacggctgggcttaaatcagctcatctcagcatgcttaatttacagttgacatcagccgtctgcatctatgcatggtttaggctggactattgagtttcctccctccggtgcctagagcgtttgatgttggccaagtgacactgacggtccataggtaggccgtaggcaagtactactcctagaattttgtcagtcaaaatatagctagtggcaatcggtcccttgacacagaattccgcagctaatgggtgttcattccttatagtaatccgtatactcaccagtggcatgcacaccgagaatccgagataggcggcagggagcggaaagccggaaagtgtactacatgcacgattagtcctaaagacatttcatcagcaactggtgagagtatgtggtggcgtagtggtggcaggctattcagctttgccttcacggttagtcctaaaaacggggcaaaatgaggtcaaaccgtgcaagtgaagtgggcactcggcactttgggtttagcaagacagccagcaaccgcatgcaaggctgcattttgcatggagtttttttttctccgaacacaccaagagattgcacgtcaatatatttaaaagaaaagagtgtttgatacacaccataatcagtcagaccgacttatgtcaagaaaagagagaaaaaataaaaacaaaaaccgagaaaaaggaagagactactacaacagctaaacacactccaaatagcgggaagaaggcagagtcacactaccctcccaagaaaaccccaaaagtagcaatgccaggtcgccagctaacgaccatagatggccttctgagaggatgactctagaacccctgagaccgaagagaccgcagagtcaaaaactctggagtttcgttccttccacagctgccaagagactagtaggaccagagagtcgaaaccggcatgaagatgctcaggtaagtatgccctagaaaatggccaccagtcctagagccaattaccacagggtggagagagggcagcccaaccagaagacgacagcacacggagccagacttgccaagcgaacacgcagtcgagcagaatgtggttcgtcatctcaagctcctgagcacaaaaggaacagaccgggtgactatcgatgccacgcttctggagaagatcagtcatccagtagcgctgctaaaatgcaaatcagaggaagaacttgcatttagcatgacccttcatgtgccagagaagatcagaacaggcaaaggaacgctagccatagaaaaacgcgcctggtatgccaaacacgccgagtagcgctggtcacttgtccaacgccaaacaagcaccgtgacagtctcctctcctgcgtgtcacaacatgtctggcgatgtgaacttctacgtatcgcaaccaaaaaaaatttttaagtgtgaatatttaatttgttttttattacaatattgtaggtttatgaagtgatatatcacatattaatatatatatcttcttaattttttttaaaaaaatcataacaattcgagtgacacatagattaaaatagtttccactttagaaactgtctaggaatgcagcccgtcgtcattggaattccatttcagtgattcttgcagcgagaagaagaacgaattaaaattcaatatattcattagagacatttcattttccatttactatatccgttgtagtctagctggttaggatacttggctctcacccaagagacccgggttcgagtcccggcaacggaaagtactttttgctggcagtatattttaaactgcaaataattgtctccattagcgtgtttaaactgcaattaattgtcttcattagcgtgttttgcctgcaattagcttgataactgcgaaaattctaattaggcgtttttcgataggatttttaagtcttcaattatcctcacaccgtgtatacattagcgtgttttgtcttgcaattagcttgatgactgcgaaaatcttaattagatttaatagtaatctaattaatacatggtcccatctgtcatacacacactgcgtcttggagtccgagctacagctggctacaaatctgtagcccgctgctcttctctctccttatttatctccttaaaatatgcctcccctatgtcgattaggcatgctcctcccctgcgcaacgcagccacgtggttcacacggagagggggtggcacagtttttttaattcgtacgtatataaacttcatatatatgtatatttttcataagtcaatatttttatacgtagaattttttatgtatacatacataaactttgtattgatataatacatatttacatatgtataaagtttatacgtgtatatacatatacatgctatatgtatcgggcgcccgcatgacctatttacatgcaccatcgaactggattggtaacgaacctcagcgagcttctccaccatggagatatgaattgaaaatttgacgtccctcatgtcccgcaggatagtaccacctccatctttaaatattttttacgtgaaatttgttaagtattatttattttattgtgatttaatttgttattaaatgtattttaagaataacttatatatttgcatatctgcagtgaaattaactatgtaagtacctttttttttacttattttatcattaaatttactttaaacattatttttttatctttactaatttatattattaaagatcctttacatctggctttttacaataatatgttcctagatgttgcctcaaacctttaggaacacatgaattgaccctacttgtaaaactactataaatacttacattggatgcatatacacaaacatatatcccgatcacataaagcaagtacacctacaatatgtatactagatggtaccccgcgcattgttgcgggatacatgaataaagtaaaaaatggcacgtttggcaggatccttaataaaaaaggattcagtaaccaacataagaatatttaaataataataaagtagctatgggtgattgcttcttggtgaacgaattatgttggatacagctgagtagacccacgctgtttatgaattacaatcgatcatcacgtcaatgaacttggatgaaacagttcaaatagaagaaaaaggtatagtttgcaaggtaacacacttgcaaattgcagaaattccccaagttaagtaagacaacaacagtgttaaaatgtaatgaaaaatcaaccatgctgatactgatgtgctccaccatgctgaaactgatgcacttgccccccgagctaatattgttgttcctccattaaattctccaccgtgaccatgatcttggcattgacttcttcttcagacatgtggatataaaattcgtggtcccactaggcgtgccaatctgtgttgacgaaaaaaatcgaacacaccggcctaggagatctgcttagctcctgtgcaggaccaaagattgatgagatgcgggcgtgccagtcagtttgctcctgcaactgacaagatatgcaaatagtagatctaaacagccgatcggctgacaagccgatggagtagttccagccgatagctgataatagccgataccgataccagccgatagcgatagggtttaagcaatcggctataagtccaatgtggataatgatataaaggcaatcggctgatgataatataatatagcaatataatccagtagaaaccaatcggctaacaatatgaaatagtagaacaaatattgatccgaaggttaaagcacacatcagctggaggtccgatgtcataagatccacaagattagattaaacattgaaacctttgttgccatcggctaaatctaacttatatgttgtgcaatccctacaagccgatgcaacgtccagataacttatcggctagcaccccgataaaacattagcatgaacctatcgacttaacaagacttatattatcaacaacaatctagtagatcgaacctaaccgatgcagcacgagattgtatatgataatctaatactcgatgagccgatagatctgtctaatgtgatggatataacaaatctatttagaacattataattgtagagatatatcggctaagacaggagatcagacctaaccgagacagtcccaactaaaccgatgcatctctaaacacaatgcaattagagatagaattgagatatcaggtaggcaaatatatcaaccaaaccagagcgatccaagagatcgaatcgatgcagccttgaacaacaccaacgtagtcgacagattcaccagggcccgacagaacataggacttaccccttcgctggagatcgaaagccgatgcagccctgcgtcaggtgccaaagttccgccggaagataagtaaaaaccttagggaagagggtggcgatgcgccgagagtattattgatcgatagattgatagattacaatgaccccgggtgtacatatttatacccatagggagatactagtccttgtcggacaagaaagaaactaaaaaggaaaagataaagtccttatcggacactaaacacactttcctaaagataaaagaaaactaataaactatgcctaattaatagataactgtcatgtcgcatccttcttgaactcgaactcttctagataagcttcctttgattgatccaactccaccaagaacacgacatcgtggcgacttgactcccatcggctgattctcgaactttgaagccgatactgactctaaaccgatggtaactttgggattaccaaatttcactgttaacacatgcccccaaattttggagtatgaggacttatgcttcaaaattatcttctgtctcgccttgataactccaaaaccgatcttcatttgcttcttgcaatcggctttcatgagctgatactgatgtgctccaccatgctaaaactgatgcacttgccccccgagccaatattgttgttcctccattaaattctccaccgtgactatgatcttagcattgacttcttcttcagacatgtggatataaaatttgtggtcccaccaggcgtgctaatatgtgttgacgaaaaaaatcgaacacaccggcctacgagatctgcttagctcctgtgcaggtacaaagattgatgagatgcgggcgtgccagtcagtttgatcctgcaactgacaagatatgcaaatagtagatctaaacagccgatcggctgacaagccgatggag

SEQ ID NO: 22263 - DNA, 5833 bp, Oryza sativa
acaagtatacatatacatatacaaagtttttatacgaatatatatttttatacataaaaaatacatatacataaaatttatattatacatatacgttgtctatacgtatatatacactttatatacatattataagtatcgggcgcctgcccgacctatttacatgcaccatcgaactggactggtaacgaacatcagcaagcttctccaccgtggcgatatgaataaaaaaattgacgttcctcacctcccgcagaatagtaccacctccatttttgaatatatctttttgacatgaaatttgttaagtattatttattttattgtgatttgatttgttaagaatggcttatacatttgcatatctgcagtaaaattagctatgaagtaagtttcatttattttgctttaacttattttatcattcagtttactttaaacattatttttttatctttactaatttgcattattaaagatcctttatatctggcgtgatttttttatgtttacaataaatttaaataaaacgtatagctaaatattatgtttaaaagttaagaacgtcgtatatttagagtaatatatagtgtagaaatgcaagaaaaaaacatatataggcacacatatagcttgtctaattgcagtgaacacaaggacaaaatcaacttgcatatatacattttggaagcagcaaattaaataatcggttagttacaaaatagaaaaaataaaaggaaaaaaataaaaataaaaagcaaggctcctcaaagaatcgtacagtaaggaaaccttttagaatcaagcttgctagcctattaatttacagtcccccaagcaatacgtccctagatgttgcctcaaacctttaggaacacatgaattgaccctacttgtaaatacttacattggatgtatatacacatacatatatcccgatcacataaagcattgatatagtacgtacacctacaatatgtatatatatatatggattagattagcactaattaattaattaattaatttcttagttcattagtcggcatgacctccttgtcatgaccaggtcactcttgagtgttcttttctttgctctctgatgaaattccgatgccaacctgcagccagggcaacgactcccctgccactttcatgtccttgaggtcgccgatcttggctctcttggcgctcgtgctgtccgcttcatcgtcctccgtggtcacgccgccggccgcgtcgttgatgcggctgctcgtcgcggtggtcttgttcacgtggctcccgttgctgtgccctgtccaggactgcaggtacaccgacgccgccgcgttgaggcagagtgcgccgtcgttgagagcggcgacctgctgctgctgctgctgcctggccgcgaccgcttctgccagtgggttcgtcggcacgttaaggtctagtatccgctggtcggtagggtcgaatattgggcgcccgagcgtgagctggtggcacatggcggccatcatggcgtggtcttgggcgacgggctggagcttcgtgagcgggtccgttgcgcccgacgtcagccagtggcatcgcttgtggccgccgagcgcttgccccgacgtgaacacccggtggcagatggagcactcgtgcaccttccccttcttcttgaacggtgagacggcggatggcgccaacggtgtcggcgcgaagtcctcgaccgacatcatcatggccatatccgtcgacgaagctccggcgaggacaatttcacctgcgccaacgccgcttgccgctgccttgccgtcagcatcagcactggcaccgatcgtgtttgcatccatgctgatatcgctggtgatgacatgagaggtggtggccctggtattgtcatgaggagcggctgagacgtgttgctgctgagtctgagtctgactagtctcgttgcggctgctctcgagcttcgcggcgaagcatcctttcaccttcttgtggctggcacggtgcccgccaagagcctggtgcgatgtaaacaccttcttgcatgccttgcactcgaacatgccacgtggcacggtcgagatgtgctgtggcaccacttgcggagcgatcactgtcatctgagccatcatgggggctgccatcgagattggctgcggcacaagaacctgttcctctcctcgtccttgctacctgatgcgcaggactcttggtccgcgtcgtcgacgacgatggctggctgtgcaacacgcgacgatgatgacgaagaagaagagagcatcacgagaaagttggcgaggtcttcctcttcggtagacggagccggcagctgtagctcggacacggagccggtcccgacggccatcactttagcacggcgcgagcgcttccctttcgaccacccgcccgcagccagtgtgaggtcgtccccctcctcctcctcctcgccgtcgttttcgtcgccaccgtcgtgaagcggcggcgaacggagcgagacgtcgaggcgaccgtcctcctcgtcaaggccgcacctgccatgatccagcaacgtcttccacgacgtgaactccttcccgcagttctcgcatgtcctgcagttccttggccgcccgggattggtccgcagcgcgtacatacgtttcgtcgtcgtcgtcgtcgggctcccggctgcctccgacggctcgccaccaccatcgcacggtgacagcgaatgatcatcatcgcggccgtcgtcgtcgtccatcgtgtcgttgtcgtcgccgatgccgtgcgccctcatgtggccgccgagcgcgcgaccgcacatgaaccccttcttgcacaccttgcagtggtgcctgtacgtcagaggaggaggaggaggctgcggcggcggtggcgggaccagccgcagcgactgcggcggcggcggcggccgatggctccccgcgacgaccatcgccatgatcgcgcgcggtcgatcgacgacgctttatttgggcagtgggcaggcatgcggggccggtgcggtcgagatcgatcgctgaaatccaaatggagacggcgagggacgttatatatgggagcccgacacggcgctactaaagatagtggcagtggagcactagaataggcatgcgtccgtggagctaaaccagctacttgaacgggatgccgtggtttcgatcagttgttaccactgcatgcggggccaccactctaatctgtttgctttcttgcgaacgcatcttttgaacccgacagttgcggctggcccgtgaccccgtgtcactcctctccacatgcagataacatggtcaaactttttagatttttaacggcaaagttattccctccgtaccattttaaatgtaatcttgagtctccgtattcaactttaatcatttgtcttatttaattttttaaaaaaattgaaaaacatgggtcacttataaagtactattcatgtgttattatactagtagctgtggacagaagtactatttaaatgtaatctggagtttccgtgttcaactttaattatccgtcttatttaatttttttagaaaaattaaaaaacataagccacttataaagtactattcatgtgttattatactggctgggatgttatattccattatctaaaaaaaatgtgttattatactagtagctgtggacaaaagtactacttctcccccctaatataagtgattttaacatttttcttgcactgtttgaccattcgtcttattaaaaaaattagaattattatttgttttatttgtgacttactttattatccaaattactttaattacaactcttcgtttttttatatttgcataaattttttaataagacaagtgaccaaactattgatgtaaaatgtcaaaatctattattttagactacggagggagtaccataccagtacgataaagtacggtaaagtactactaccagctgtggacagaagaaaataagatgaccaaaatgcggtatgcagaaacacacagagggtagttctgggccaaaattgagggtagttttggcccagataaacctcctccaagaaaaccaagtccagcagcccatatttctcatatcggcccatgaagctagatccagacgcttagtcgagccttcgatcctctcgggtgggtctacggcgcgttcgttctctctccatccattcacgcgattgacgcgagcgagggacgacgactccgacgatcttactccggcgaggcgagacgacggcgactgccgaccggcgagttcgctccatcttccccagagaaccccctcattctccctccggcgagctttcttcgacggagaagacgagacgcggacgagcgacctccctccggcgacgacaacagcctactccggcgagccccctcctccctacggtgagtccccttctcctccctccggtgagccgctaccgcctcgccgcgcgcccttgtccgccgcccaccgccggtccgccgcctcccagaccatccctctaagccccgatcccccacttccccctcccaagcgccaccctccccccacccccacatccccttcgcactcacgcgcagcgcccgttgaccgcgccgctgtcaattcgccgccctcggctgtcgcggggtcgcgcggtcgcgggatcgcgccaccgcccttggccgtcgcggggtcgagccgctgccgtcggccgtcgagctaccccgagaggccgagaaaccctaaggtaattgttgtttgcttcagtggtgctgtgatttaggattattgggaacatcttttccatttgaagccatggatggttgattgattgattgccagtgaatccagttgtagtaaatgtagatcgaaagggcatcactagggaacaatagaaattataaccatatgtttcaccaattgaactttgatttttgaaccttgtgaagctttgtacaattgttcttttgtataattatagtgcatatgtttttaagaaagtatgaaatgactagtactgaatttagatcctccactatatattatccaactagtagtttagaactacatgaaattaaacatattaggctttgggttataaaaaaaaaatcaccccttcccatttcgaatacccaacctcaaaatcctgggtatgccccacctctaacccacaagccacaggcgtagggtgccggccggtggccaccacacgcacgcccagccccagccctgtgatcgaatcaactatggttgtgatttgtgcatgtgaacaacttggtagtttaatgttaaatgttgttgccattgtagaattggtaggacttgatgaatcatttggctttatttttagggcacacttgatgttgatgatttgtcattggatgtacaaatgatctgtctctcagtctttgcaaagcagaccacatgttatttcatggttcatatatggttcatggtcccaatgaaatgattggtgagcttgtcaaagtaaatgtaagaccatcgagagtattgactgatagtttgatgctatgcttcttttttttttttttgctactgtaccagtcacttattttgctatcttttgtgaaagggtacaagcacaactagaatagcttatctgttgatttttttttcctatttgcactataatctagcccatttcttcgtatttttggtaacaaatcttgtcttagtcagtgaatgtctgtgatggtccattcagatattaggatggataaggtgactcaagctgttgagaacctaaaggaggaatggaatcaagctgttgcacagcttgaagggtgcattgctgcaattgaatcatgtgggaagatgggaaaggggacagaggaagcaagttcacttccta

SEQ ID NO: 22264 - DNA, 2134 bp, Oryza sativa
tcacggcttgcctgacatccctccttttaatcgtcattaggattctatttcatgttttattaacaatttttatatgtcgtatcaaccgccaccactctactcctttataggcatgttacttaatttatctcgtcatgtgttttagatggttttttctttcaatagtctttatttttatcacaaattttagttatttataaattgtattcctaattgaaatcttatttttctttttctaatttcagaatttatttttttaaaaaaatagttaataccgtattgtgttcttttaatgtttttattttttattttcaatttcagttgtttcaaaattgtatttctacctgaactctcttttattttttttttctaatttttgatattattttatttttattctaaattttaattaatctcgtattgggttcttatatggattcttctttcaatattgtttatttttaattccgaattttagctaattttaaattgtatttctacttgaactcttattttattttctttttataattttggatttatttttatttcaaattttgattaatctcgtattgggttcttatatggaaacttctctaaatattccttattttaaattccgaatttcaactatttttaaattgtacttctacttggactctccttttcctttttttctttttctccgattaatatgggaatttttagcctccacagcgaacgtggtgcctcctttcaaaactgttttaataatataactagctggatggcccgcgcaattgcgcggctagcacctaaacaaaatcatatattttttatatgattttacttaaaatttattagatagctatcttattgtcttaagactttgaaagaccaacccttattatcctcgtgtttctaattatatagtttttaaaagtcacaccagttgctaccccttatgtcatctcgttctttatttgcttgctcaatataccactatttctttttattcttcttggaacctttaaaaattggattttatagtttctagggtttattgtcatgttgggtttcatttttataatttctagatgtcccgtcaaacgttgccattatactcctctacggcccgtctaatgcctcttctctttattgtcattgagattttaaaaatcgaacataattattgtctgggttcaattttactttctagaagttccgccaaaccgtctatggctttgccattgtactcctctatagctcgcctgctgcctgctgccttccttctttattttcattgagattttaaaatcgaacatgattattagtggtttttttttttactttttagaagtttcgaacctttaaaaattggacttgtagttccattttttataatttttagaagtcccatcaaacgatgccactatgcccctctatagcccgtttgccgtctactgtttattgtcattgtgattctaaaaatcgaacatcaatatcgttggaattcattttttattttctagaagtcctgtcagccgtcggcggctctgcaactatactcttatgtaccccgcccgctgcttctcctttttattgtctttgagatttaaaaatcgaatatgattatcaatggggtttgtttttttttactttctagaagtcccggtaaccgccttactcgtttgcttcatggcctgcctgacgtccctccttttaattgtcattaggattctatttggtgttttattaataatttttatatgtcgtatcaaccgccaccactctactcttttatatgcatgttacttaatttatctcgtcatgtgttttagatggtcttttatttcaataatatttatttttatcaaaaattttagttatttataaattgtattcctaattgaaatcttatttttctttttctaatttcagaatttttttttaaaaaaattagttattaccgtattgtgttcttttaatgtttttattttttattttcaatttcagttgtttcaaaattgtattcctacttgaactctcttttaaattttctaattttggatattattttattttttatcctaaattttaattaatctcgtattgggttcttatatggattcttctttaaatattgcttattttt

SEQ ID NO: 22265 - DNA, 722 bp, Oryza sativa
atatccgcgccccggtgagggagcggacttgcacgcagtacagcgaagggatgatgagtcacttcgctagtacattcagcggttctgtcaagtccgtaataccataccatgcatccctgcacacgcggtgatttacgcgttcagggggggtgtgcggcacaaccgcatgctcgaaaagatcgcctccaaagagccccagactaccgcggagctttttcagctcgcggaccgagtggctcgtaaggaggaggcatggacctggaacccctccggttccggtgtggcagcttcggccgcccccggatccgccgctcagacagggcggcgtgataggaggaggaagaagaggtcagcccataccgacgacgagggtcatgtcctcgccgtcgagggcgctccgcgggccacccgaaaggggaggcctgcgggtgacaaaaagaaagaggccggcgctcccagcagggagcgcccaaccggcaagtggtgcaccgtccacaacacttcccttcatgacctcgcggactgccgtgtagtcaaaagtttggctgagcggacgaggaagtgggaggaggagaggaggcaggagcgccgagagggaaagtccccggcggttccttccggcaatcggcgaagtgaggccaagcagaaggcccccgccgaggacatcgatgatggcgatgatgacctaggtttccaagagcctggggctgatgagctactgt

SEQ ID NO: 22266 - DNA, 628 bp, Oryza sativa
ctctcttgctcaaaaaggatgttccctttgtttggtcatctgaagcagatcaggcctttcaatccttaaaaatggcattagtatcagcaccagtattggcccttcctgacttttctcaaccttttatagtggagacaaatgcttgtgatgttggcattggactgttctttcccagcaaggccaccctattgcttacattagcatagcattgagtttgaaaaatagaggcctctctacctatgaaaaggaatacctcgccattttattggcagttgaccattggcgctcttatctccagcaggctaaattcattattttgacagaccatcacagccttatgcacttgaatgagcagaggatacacacaccttggtagcacaaagcgtttaccaagttgttggggcttcaatttaaaatttgttaccgcaagggcagtactaatgcgactgctgatgctctttctaggaagtattctgaggactcctctaaactgaatgctgtctacagtttgtacccctgtttggctccaagaagtaagtgatggctacctttcagacccttactctgctcagttattgtctgatctggccctctgccttactgccagaccattgttttctctgtgtag

SEQ ID NO: 22267 - DNA, 7487 bp, Oryza sativa
caagtatagagataaaagattgtgttgttttaacctcgaaatctcgtgttcaatctcttacatgtttataattttttcttaaaaatatttggaaggacttcaaatctctaggtagtctttcatttgagttgcttctctcctcccctcccctgcatgagccttctagctactactactatagtaccaccactaccactacggctatgaccactgtgcgttgatgcgtgtgtcctaagtgctttcactttactaatactcctactactactactactaattaaggtaggagtagtctttataagcgtacgtgcttgcctgattgggcagcttagttttgcatatcctcccaaattggggaatatatcgatcgactgtttctatacttgtttctaccaccaaatgtgcttagtgtgtgcttactacctgttggcgccaaccgtactacatggcggttttggcttcgaatgagggatatacgtagtacgatgtaaagtatacttatatatctatatgcctttttttcattagaagcaacccgtcgtcttcttccctgcagccaccggtttcatctcagctcggagattattccgatgaaccggaaagtgatcaagcgcccatgctggcctgccattttaatttgtatcttttctgttggttaatttagttaagaacattgttagtgggacggtgaaggacgtacgtctccctctctctgtcaacattggacgtacgtaattaagattgtcaacaacttagttgatttgttgaatgccatctcggttgatatgaccatgacatgtcaccttccgatctgcccggatatacacatctttatgtacggtacatcgagattttcattgccgaaagacgacgacgacgacaacaaaaagcatccacgcgcggctactaacttctcaatagtatatactttctttcgtcccatacagatatgacacacctgtataatattctctattagatttatttttttttgaaacggagagtatggtcgatggagagagtatggtcctatgtacatatgttatcgactatatacaaaaatcttccgctcatggctactagcttctcattaatatacactttcttcataaaaaaacataatacggaaatgtgacacagttgatatttatgtcacgtcccgtatttaagtttgttttttatgggatagagagagtatacatggtcctatgttgctgtcctctatttctcattcagagtcaaagatacgatctggcatgacatggtgattgttgcacactggcacacataaccgatgacacaaccttaattgagatgtggtaactgttaacatgtagtagtagtatatgccaaaagacctgtcgttgatctgttttctactccatgaaacgacttgactccttttctccagcatctatgaaagatcatgcatcagagaggtcaacgaaattattcctgttttatttgtacgtagcggcttggctgggtttgcataacacttatagctcgtactgactactgtagtacagtatctatttgagccaaaccgaacagttgaaagtgctactccctccatcctataatataagggattttaagtttttgtttacactgtttgaccactcgtcttattaaaaaaattgtgttaatataaaaaacgaaaaattatgcttaaagtactttggataataaagtaagtcaaaaaaataataattccattttttaaataagacgagtggtcaaacagtgaaaaaaaaaactcaaaatccgttgtagtacagtggcagcagtacgtcgtctgttgcctctggtcaactgtaccgttatatataaagtgtcactcactttgagagaaaaagaggcatcatgaacacgggcaccaccatttgtatggatacgtaactaccatccatatatatgcatatcagtgtcgaatgcaatcagctcatctcgatccagtctccaatttcaaaagagaagatgtttgaaattttaacattttggtttcttttttgaaaatttactacacaaatatacttcttaaaaaaactaattctatatacctcgcctcaaaaaaaatctctaaattgatttgtctgctcaagctagtctctttttaaaaaaagaataagacaactccattgttcagatagcccaacacagttgaattgctagctactccctccatcccataatataagagattttgagtttttacttgcaacgtttgatcactcgtcttattcaaatttttttgaaactattatttattttatttgtgacttactttattatctacagaactttaagcacaacttttcgtcttttatatttgcaaaaaaaaaattgaatgagacgagtagttaaacgttgcaatcaaaaactcaaaatctcttatattgtgggacggagggagtaccaaattacaaacaatgtctgggaatccttcaagccaaacaaagtgactttgtagacctagagatgcgtcaattttagcaagctcatgtgtaacacgattatgttctctaggacaattcataacttgatagacaaaaaaaaatcattgtaagcgcataaatttggcctatctaatgataacaacttttactcttgatcagacagcaagagttttttttattgacaaaatttaggcatattatctgaaaaccccaggtggccgcgtgtggccgcgcgcgtccgcggcgtgcttcttctgaatgctcacaatgacgccatcctcatcagccgctgcggagcactccaccaaggtcagcatcctcgacgcacaggcgcagcgtacgtctcatgcatgcatcctttatcgtacaagaactattactccatccggtttcatattcctaacattttaaacaaggttaaggacgttaaggtctcttttagaattttgcactatcaataactacaccagcggcatacatagattactcttaaaaagcactatcaataaagtaaatatttatttattcactgtatatatattataatagaaaactataactaaagaaatgttttggcaatcgtgcatgtggaaaatataatttgttgtattctgttgtattgtagtgactctctcacagatatatatagagtatatgtgagatagagatttagagtacaatacaaattttaaaacaaatttatttctagaactacatttatctataataatattctatctctagaattttatcttatctctataatttatatttaaactttcctccgaacatttattttaagaagaaattattagcgtattgggaattgaacgcgggatttttagggttgaaaccacatacctcttgtcactgcactatcaaatgcatatcagagcactgcagcatgatcactaaactccctctccccctaacgactgcaaggcgccgcgtcctccaacccacagtgtgggtgatcgcccttcacattccagagcgccctctccccccctataaataccccactgccagcctcatcttcctccacagcatccatcgcaaaatccacctcagctagctacccaagcgcacgcgccaccgcccgcgcgcgagctgagctagcgatcaacaccggtcgaacacctagcgagcatcaccaccatcatcaccatgcaggcgtacatggcggtcgccgccgctccggcgccaccggcctcgctgacgctgctgccgcgcaccaccaccgtcatcagggacagggagcgcttcgacgcggccgtcccggtggcgccgctcgtgctgaggcatggcgccggcgtcaagcacaaggccgtcgtggtgatgggcgccacgggcaccgggaagtcacgcctcgccgtcgacctcgccctgcggttcggcggcgaggtcatcaactccgataagatgcagatacattccgggttggatgtggtgacgaacaaggtgaccgaggaggagtgcgccggcgtgccgcaccacctgatcagcgtggcgcgccccgacgacgagttcacggccgccgacttccgccgcgaggcggcgcgcgccgcggcgggggcggttgagagggggaggttgcccatcatcgccggggggtccaactcctacgtcgaggagctcgtcgaaggcgacggccgcgcgttccgggagcggtacgagtgctgcttcctctgggtcgacgtagatctcgaggtgctccgcggtttcgtcgcccgccgcgtcgacgagatgtgccggcgaggcctcgtccgggaggtggccgcagcgttcgacccgcgccgcaccgactactccaggggcatctggcgcgccatcggcgtgccggagctcgacgcgtacctccgctcccgcggcgacggcgccgacgaggaggagcgggcgcgcatgctcgccgcggccgtcgcggagatcaagttgaacacgttccggctcgcgtgccgccagcaccgcaagatcgagaggctggaccgcatgtggcgcgcccgccgcgtcgacgccacggaggtgttcaggaggcgcggccacgccgccgacgacgcgtggcagcggctcgtcgccgcgccgtgcatcgacgccgtccggtcattcctcttcgaggaccaagaacgcagcagcatcgccgccggcaaacctcccctcttcgccgccggcaaggccacttcaggcaacatctccgtcttcgcctccgcggccgccgccatggcggcggccgctgcaatctgagaagcgcaggcgccaacctacttacatacacatacatgaccaaacacaaaaacgcagagcaccatgccactctcaagacattcaggctgctgccaatcgccattgccgatcaaattcagagctcgtcagtcggatcaaacgatgaaggctgctgcttctgcggtcaacatctcgactgacctgccaattgcaatgcaaagcaagattgttcatatactggtaactggttgactcctttttgtttttgctgtgtttctttgtgatatgaggagattgatgaattgcgcgcgagagtgtaacttatgagttttgagttttttttttctttttggtttctcctctgattttgggtgtgtaacagtaggagtaaaaactaaaaagtattgacttggatgttaattgggggattgatgtaatagcctctccttgtaacatagaaatcatgagctgaaataattaaatcgttgagaccttgcaaagaaaaagggggaaaaacaaaataaggaatcttgtgaaaggggaatatttggcagtctttatcataatatatcaactttttcaaggtcttcactgagctttgctattgagaatctcacttgccgcgcacttcaatagtctatgactatgctctacactgtccttgttcttaattcgagaccgcatactttgagtgacatgttgtgggtatgagtaaaactcggtggcgcgcaatactaatttttctttacatgaaaacttataattcgcgcaattttgtgtcaaaaaaaaaattcgcgcaatccttttgcgcattccctataaaaacttataaattgtctgtatttataatttttattttcttactttctctatttcattcagaaaactcctggccaatcaacatgacaggtgatacatgcaacatttggcctggaaaactagtggcagtcagccagtcattcctcttgtgcaatgtgtggctctatgctgtatctgtctgtggatacaagttggcatctgcatcagttctggttgcttctttgacatcatattcccaagtcttgtttcttggtcatggagacactctcgtgcatgattgggaactgggtattagttagggcagtgcttgcatgtcaaaggtcaagcccatcatcttcttgttcaaagtcaacttcacattctgaatgcatatgcacatttttacaaggataagcttgatttaacacatattttagagttcacttgaacattgtcaaactctttcgtagaatgcagtggtgatctctctggatagtatggagaccagaagactcagcaatcatcggttcagaatattatataagattcagaaggtcaacatgaacaaatatttatatgaaatagtaaaattggtcaggtaaatgataactttgacttaatcctactacagttagacagtcaaaatggcatttcttgatgctacattttttttctacatggattaacaaaaacgaatgaacgaatcagagttatttgaccaatttatcaaattatgtcaagtggatgatcagagaataagatctgaatatcgcgataggaatgaaatctttggtcaagggtcaatgtgcagttcctgcatttccttccccaaatcaaacctagaactggttgacacttgacagagaatgcaacgactctgtttttgttttcatttttttggaagattcttctatgaacactggctctttgaccaactgcctacatatctctactgatacatgagtgatcagtaataatttctgttgtacaatgttttctatagcattctgatttgccaataataattaacaaagtcaaaagcttttttttttctgaaggagaaagtcaaactgttcttctcaaatacagagtccaacttgcaacatggtgaacaaaacaaaaggaggaaaatacgaaaggaatcagcaaatagctaacaagctgatcattgagcaatgagaaaaatatcacatttaataaaggtttaaagtcaacatttagagcttgcaaaacttttaggggaatgggtttatttatttcatagtacaccaccaaattataattaagtttagaaaaaaaaaactgcatcaagtggcataagccgaataaccacttaacaattgggccctagcgtcttttgcaataaatattatattaataatattattagttagatggcactaatatttgtgattagagctccaaaatgactaatagcacacagatcaaccaaaaccagtcaacagttttatcatttgccaaacaacttatgttcagttacatcaatgcatttgggtgctttactttatctctttccttttgctttttttgttgaaaagagattatgatatttgttaatgacttgtataaatatggttaccacgaatttcatatatttcctttcatgcaacagtcagccaatcattagctcctccacatcttatctgtttatattatataattgttgagttgttgcccaaaagcttttacctcttcttttcaaagagaaaattcagaatgcctgcaagaaaaccagctgacgtcaactttcaaccctagtccactaatcatttgactgaaggcagtaacttactttagcaatccatggtaagcatatcttagttttgtcttttgtaactgtaataaaggtagttgttctgttcactgaacttatctttcaatggtgatattaaccatgcatgccattgttcatcttccaaggtttgatccttgcttacatctaaactacccaaggaaaattccaagtggaacaattgagtaagttaagct

SEQ ID NO: 22268 - DNA, 4337 bp, Oryza sativa
gagggggcctagctagctagaaatgctagagagagctggagtcctagcgcatcaagcaaggaattgtgcttgcaattattcaagtgaaagatacgcttaagggggctaatcatgatcggtcacgagaaagtcgtttataattgggaaaacatgctgatctttcggcggatttcgatggaaaattaaaaaaaacaattaaaggtaacaggaatttttcttgcgctagctttcgcatcatatccacagttgttttttgttttccttcgtacgtaggacggtcgatcgattatcatgagcgaaagaacttaatcatgattcgtcaaatgtctccttttcggccttctaaggacatgcatgcttaagaacataagtagtacttataaaggaccatgcatatgccatatatgattattgatgtgacatcatatatatcttgcatgttttatatatgcaagtgcaagtagtggcagtgtacaacaaaactacatatactgatgatgcatgcgaagaacatattcaaaggatggcttgacctatcgatcttccaaggtacaagtctagattattgtggcagcagtaaattaaaatgtgcgtaccttacatacttaagcacccttcttttgcaaaagaacaaaataataataataataataataatgtgccgtctttcgatttgcatggagactcctacgtctctcttttagtgtgtgttaagaggatgaggtgtgatagtgtatttcaacaaccttgtttgttataaaatgttgggttaattagattcatatcattatattttttatggttttgaaatatattattactattcagctatttagagagatgttattataatttcacaactattggatatgtgccactacttacatcttctagttattttctaaattttaccttatctcaatcttaataaaattagtccgggcttttctttctcaacgatccgacaaaaaaatataatcataaaataatttacctaatatattggcgtgcaattcttttacgcgttcatgaaaaaaaaagtaaaataatttacacactagtaagtacagcggtatagttgcatacatggattcctttgcgtttttcaatatatttcacttgcaaatttgtcatagtccaaacatggagaatggacagattgtaccaaaaaaaattaagaacaatggtacatgctgatgcagagaccattagcacacaaaggggtggtggcgcagttggctagcgcgtaggtctcatagctaaaataagcgagtgatcctgaggtcgagagttcgagcctctctcaccccaccaatttggagcagtgattaatatttgctacgtaatcggttgggtcagtcacatttgcctgatctcttgattagtccatagcacatgatgagctcttccttttcagccagtggatgatactgtactaatacctgatctgacaattgatgcatgacaaattaaaatcaaaagtacttcttttttcccctttcctcagctagcgcccttgtgtggatgctactaactgatatgacaattgatggatgacaaattaaatcagattctactctccaatttgtttttaagggtctcacaattgattacacttaatggcactgattaatagcaaagataaaacaataatggtcagtatgattaaggcgctggatgccaaatgtatagccaccgtggctcattcgagccaagaaataccttttgatttcaggtgtggtcaagttaatacatagcgtatgcagctccgtaatctggagcagtgacgtacaaaatgctcaccaggataaagtaattgagcttgataggtggtgagggaacaatagacacgagaattgacacttaaaagttgtgagaattcccgtcttcgatgagatatactacgctagatagcaatgaagggtcaaagaccacctactagtatcagaacaagtgtacattgtattattgcattctgcaaagttggagcctagggagagttaaaagaagataaacaaaaccagaactcctgtggatgccttctgcaactagagagagtcatagttggtgtcgccaccgccacctttgctccagttgtcatgccagtcagagaagccagtaagcaaagcctcttgcatccactgataccggcactgcgacgtggcttcaggaactgtcaaccaggtcctcctgcgggtgctctgctcaggccatgagtccagctcttccttcacatgcagcgcaaacaccgcggctctgcacataccctcggggcagcacgcatcttgatgcgtcttgcttttgaagtcgtagaaacccagaaattgctggtccagagaaacaatagcattataagctgaagcaaaataaatgccttttgtgatgtatgcatttcacaaccatgtattatcggcagaacaaaatacacaagtgaaacaatttataagcatgtattttcttaattatcaagcagtgataggacaaggaaaacattatctacgctgaagaaacatgttttagagatatttaataaccctcctagaaaagctataatcattctaatttcatagtgcaacaatgttattttgattttggtatccaacactataaaatgctgaacacgttagttgcaactgattcttgactaaaagagtaccaagtcagagaaatcaaagcacataccatattaaactcaaacgatggaaacaacataaccaactaaaccaatgaactagctgcgcatcacatcttatgacccaccaaagcactactaaaatttgcatcttatggtttttccactatgaaagtatgactagtttgcacatcttcataaaatctatgatgatactaattacacacaatgcaaaccaaacaagtatccttttaaccacaagatagtttgtttctcagttgcgccatgtctgtactccgcagtacatgtcacacagcattaacaattagcacctactacaatacttggtgcggatggtgtgtcttgtgagtacaacatatgtcaatgcagcagcaaactaaaaacaatattgtgagtgtggttgtgctctgactaataccgtgaatcacgtgaacaacaatattccaatgcaagtgatatgcaacccaagaaaaaatgatcaagaaaataaatttgatgggttctgaggataatgcataagaactgtagctgccagttcctaagtaattgaattccccccatccattgtttcaaattggatgttaataactaagatggtttgttgcagacagacatctcacgatagccatgaactcaatatttcaggaaaaagcaggttccaaaagagggaggctggttgatctacattagcagtttagaagaatcaagcttaggctcggcttactaagcatatattgaagaagataaatcaaacacagtgaatacgagtctgcatcacaatccaaaacatacggtaccagtttgacggttatgtaagagaaaaacacatgcaaatatgtttctgacacttggcaagcctgaagtagataaaatacatatgtaaaagtagtagaaatttaaaaacaccatctctgatgtatcttaccactatatctccacgaactccagcttcttctacagcctctcgagcagctgcctgctcaacagtttcatcattctcccatcctccctgaaacaagaagacacagataacaaaatttccacctagtactatggtaatgtaacatttatccaacaaacaaaatctgatgttatgcagaatctagaaaagtaggtgaaagaaatttctcagacatactttatgtatgcattgccagcttatcaagctaaatcagtaaaaagtacaaaacataatttgcaatggactttggtatttcttaatatgcaatgtttacacctgcatctcatttcattcaaacttcatatggattcatctgagaggcagaaagaacatgataaatgccaagagcgacactcttccacctatgggctaactgaaatatcaatatgttgctcatagtatagggtatatagtgcagtagcgcttcagtgtagcatgtcaaaacaggcaatttttgtaaatttatagcaattcatatcaagtaaaggccaatccaaatttagatcataaatcatcaaaatttatattcgattttttttcttgcaatttcatgtaaactaaccgcccataaagagtttggcaaacttatgcgtacacaatttataaacatttttttcatcatcatgtatttcttgattctaattcagatgggaacattacctttggaaacaggagacctggaccactttgagagtttatcatgagaacttcaacaattttctt

SEQ ID NO: 22269 - DNA, 8620 bp, Oryza sativa
atagataactgtataatatggcataaatgttatcaagttgtatattaaaccgtctattaatctttgcaggaaaaatcatctgtttataaaaagtccaacaattaattaatcatctgtttaaccgtttattaatctctcatctttctctctcctcaaaaaagcccaacaaagcatcatggcattctttctcttgtcaggctggcatccctgcctattcaatctcatacttcaattccagtgcaataaaagggaaatgagtctctatccttaaattgctcgaatgtataataacaaggataagccaaatttgttagagttgatatattatactctttctgatatccaagttgagcaaaagcgaaagctaaagctctttcgaaatgaaggtttttcaaatcattcaacctcgatcgttttcagatgatggcaagtaatactccttccgtcccataatataacagattttgagtttttgtttgcactgtttgattactcgtcttattaaaaaaaattatgcaaatataaaaaccaaacaattatgcttaaagtactttgaataataaagtaagtaaaaataaataaataataattctaaaaaagttttgaataagacgagtggtcaaacagtgcaagtaaaaactcaaaatcccttatattataggacgaagggagtactagattaaacaatgcccagtcgtgacgataaagaagaacattaattccaagttgtcttttactaccttctctagaagaaatacagtaaccgcccgggccgtttgtatgatatcgccggccgttggagggagtcactggccggtcgcatgaaattctgataaggcagtactccatggtccgtactattaaatgaaatcgttttggacagcgacacggtctccaaaacataactttaacttcttgtttctataaaaatatttattaaaaagtgatatatgtatacttttataaaagtatttttcaagacaaatatattcatatattttttacatttttaaattcagcaacttgagagttattcatgatttatattcctaagatttgatttaaatattaccctaaataactttctttacgagtacggagggattactacctaccaataaaaattgaacgcagctatatataactaacggttttgacgacgaattgatgatgataatgatacactaccacgcgagcgagctgttgccctgttaccggcagtaggagctaggagtagtaaacggcacaaaaattctccactataccaacattgtttttataaaaaataatatcgttttcgatcgtttttatcccaatgatatgccaaatatcctcgttgatgttgttgctactcgtaaatgaggcgaaagagcaaaaccatggacggggttgggcgccggccggacgtacggccgttgttttgatgggccgtgcgtgcgtgcgtgcagcaaccaagggccgttttggattgaagccaaaacgtgaccctacaaaattttgataactttaatagtaaatatgctagtttagattgtagccaaacaattgatagtgcacacgttcaatttagctatattctagaatcttctttactctcatactaaattttgactttatatcggtattaaaccaaacatagactagctaactttgccttaccaaaaaaattggtagtgccaaaatttacctagattttagcactaccaattaattagtagggtagagaaccaaatagaccccaagtgccaaacttgttcttcccctgctacctaataagctacagttgtagagtacctgttacagagaaatcgattgcgaaatactgtgacgtcgtttataagaaaccgttagttttcaatttttttctttaaacttttaacttttttatcacatcgaaacttttctacacacataaacttttaatttttttatcgcatcgttttaattttaatcaaacttttaattttaaggtgaactgaacacaccctgtaatgtgacgtttcttgcgcaagatcgcatcctcatcgtcgtcgtcacctctgatgcaacagcaacggagaggttgatgggatccgcgaattaaccggtgatttcgtgggataagcccagtgaggcccacgtcaagcccaaactatccacgcggcctgcctgatttgaggggacttttcgcagtgaggcctcctgttttggagcgctacaaatacacaaataatcccttcgtattttaatatatgacgccgttgactttttgactaacatttgactattcgttttattcaaaatttttgtgaaaatgtgaaaatatttatgtcatgcttaaagaacatttaatgatgaatcaagtcacaataaaataaataataattgcataaattttttgaataagatgaatggcaaacgttggacaaaaattcaactacgtccctgtttaattcggaccgcttttgccggcaacagttagccaaggccaaaagattctatactactctctcattttgggtagctgatatttagattctgcagtttgcatgcctacataatcaccatcccacgtcagaggagcttcttcccatagccgtaataaatctaaattttgcttcagtaatataggcgattggtttaaagccattttttcccccaaactatacaatctacactatgttctttttttaaaaaaaaatagcacggttttactagttggagaaggctgggaaagcacccccttcttaattcttaattacgtggtggcttctcctcctccggtgagacggcctcttcttggtgctcgtcggtgacagccaaacacaaactagctctggctgatcaatctctggatatgtgtcatgtgcatttgcctgctctgaatcttcgcaaatcctcacatgttgctgcacggattgtatcacacacacgacatactgtcacaggcatggcgatagctaatgtttttctcttcttatttttttaatcaaacaatcaacgagcatactcctcctatgctgctaagctacttcattcacattgcgtggtgggcactaactgtgctaccgggtcataattccacaattaatgaagtatcatcatcatcatcatcatctcggatcacgccacacataatctcttcgtcttataagagcagatacaatagcatactattagccagctataaacatattttaataagataaaaaataagagagaagagaagcgggctataaatctgtagcccgctgcagcacggactccaagacacagtatgtatgactagtgagaccacatattaatagtatagtaagcaactattgtatgaattggctattagattggctataaataaattggagctagtagtaggctatactattaaacttgctctaaaaacctaaagtatatgataggatatgacataatctactatacaaatctagacaggtactccataaaaacctaatctaaaataggatatgtgctaattcagtacttatgtacatctcgtcctattcattactccatccatttcaaattgacctgtatatttcatagggacaccaagaccaagaaaaactaataactctctcatactatatttactctagcaacaaactctatgcatacactatccccactatttcctagccaatagcaaatcaagatattgcacgtggcatcactgtccatttactccaatgcacaaataacgaatagacttaataaatgaacacaaatatgtagattatttaggaataacctaaaaaaaactatatgtagatcaatttggaatggagggagtatattagattatattatattttatttgtaagttgtttttttaagacggagtgagtatatgtattcttgaatcttcctggggcaatcaattattaattgattaattccatgaatagcacaccatatacggtacatggatcaaacggggtagagaaagttgacaagtaattactcagctgcccctattaaaccccatcttattcaagcaataatattaatacagccggattgattgcgtagctgtgtgcaaggctgggcgatttagataaaatcaaagcctcgaaaggttgttgcttccggggctttgcaattatcagagattattctttttcttgttattgtttcgtatcggccattctcgtgaaaaagggagaaaggcgcgattatcgttttcgcccatttaatcccgtccccatccgagcgacagcagcaaccgccgtgatcttccccggatcacgccggccgcgcggatctcgtggcctacacaaccaccgttcttgctggtccatgcactgaatcgccggagttctcggcgacgacgaggagagaggcggcggcggcggcggcggtggcgggatgtcaatgccgtgggcgatggcggtgtcggtggtggacaaggtgtgggcggtgctggcggcgtgggtgtcgtcgtgcctgacggcggcgaccgccgtcgcgcgagcgctcagggcgggggacatcggagtcctccacgtcggctgatggcggggtccgtcgtcggagtcctccacgtcaggtcagagcttggagatggttaggtttcttgcgggggatgcaaagctttagttctgagcttttctttttttttttttttttgtgatgtgttatgcaactatccatgaagatttatgtgatgggaggtgcttggggttagtgtttcacctgtaattaacatttgttttaggtctctgtattctttggtcttatcagaaaaagatggtttgtgtataaagttttatggctctttctagaaaagaaattgttagctccctcgtcgaggaaggtaaagttggataagatgttcatcagttcataccattgctgaaggcccttcgatttcatttttccgttgcatactttatcctcatccgcaaaatgggtttgagatgaagttcgcggtatgctccatactccacatttgagagagaattgttatgtgctcaggacaagcagattggccacatttcagtttggtctaattagattctgttgagagggaaccttaccgcattttattagattacgtgaagcccgcaaatctattgaagagtttttgcttatgtttggatagaactacgtcctgcattttatttaatctgttcgtatcaagcgttattgcgtttacacagcatagaagctctggtcctatccatcctcaatgccagagccaaaagacaatttggcagattatccctttttttttcacgaacacaatttggcagattatcctcaatgcaaaaattcaaattcatgtttgttataatccaaaattcaagtaaaatttgagtaaaaagacaatctgacatatcattctcaatgccaaaagaatccagggccattaattaaaaaaagaaccgagacatgatatagtaacagcacatttgctaaaagaacaaaattgtacggcagtactaatgttttgccagagctagtttagtcatagcagtttatcagctacataattatagccgcaaaatgcgaaatccaatacgcagaacgattgattgctgaaaacacatctgtacataaaagggttctctggacaaagtttcacgttatgaagctcagaagtaaaaaattatctgaaaagatccggttgatgggcagtgaaaggaggaaagcactttatttcagcactgtccaggagagcttcaagacgatgtgttcttcctagctgcatagactcggtaagcagctattcccacaactgcaacggcagctccaactgcaaattattagtacagtatcagttgagttagaactcgaaggaaatttacactattttatagttttggaaataacttataaaatcatgatcgactgtgcacatgttgctagactgacaacaataaacctttacgtaaacctcttctttcatattgtcatgaactttctagtagccttgttgaacaggtatatctattgctatactaataccagacttcttgctattatagatttatagaatatatttgtacaatacaatgcagtataagagcgtaaatgcgacgagagtaaacacaacaggactgtcgagtgtggaactggctttacctgagacaaccataagggaacggttcagaagttgacggtattgtctgcgtgttttcccagcttcagtctctggaatgctcagatgaggctgctgcgcagcatggactattctacagaaaatattgttcaaatctctcaacctcacgctaataggaattggcatttcgattcccatgtcttggctcacctgaaagtacataattttgttgttaattaaccatagaaagacgactaaaagtaatccatagttgcacagagaacagtgagctaagcaaagttgagagaatcacttgcatatacatcacaaaaaaaaaagccagtaacaataaattaaaaaacaaagccagtaacaataaatatttctgaagaaacacccatttaaagttcttgcagcaggactagatatttgcacaataggaatctataagatcatattgcaattgatttgcataagaaataattgcagtaaggctaaaaacttctatcctagaagatttcctagctcttctccaaactgttgttccttgacttggaacaacaccactgttattgggagttactccctccatcgcaaaacaaataaacctagtataggatgtgacacatcctaacacgacgaatctggacagcgttctaggatgtgtcacatcccgtactactgtactaggtttgctttttgagatggagggagtatgctgcatggcagcagaatcaaacatgcattgttgcttgaatatagaactacagtgtatgaaaaaaatagtagaagcatagcggtaagtaatactatatctccggcattcataaaatagtgatcaaaatgtaaagggaaacagcttccaaaactacctgttatccaattcaaatgtctgggcaagaaaaatcaaatattttagtgccaactatgacacagaacagtggcaaatgattttcagagtaaaaatgacaaatcaataacgaacatgtagtaagcttactctcgttgattcctgcagagccaatggagattggtcaagatcatccttagcagcaacaatcagacaaggaacttcatagccagtattttctccatgtgtagccacttccacaagcaaatcccttgttctttgccaagaaaattcatcacagctgccatttaaacaggcataacatttagtgtacagaaaattatatacaatttgcataaaaagatatatccggaaacaagagcaacattgctgttgtgtgtagcttttgagattgcttcattccagaaaatataatagattgcctgtcatattatattttctatcacctttttaatattatttaaaaaaatcatcctgaattgtcaactgtctggagcaaagctaatagagctaacaaacatcggtccttacaactctccaaaaccatgatgtgtgtagaaatagttcattgtccagactaattcaacccatgtctataaaaaagttgagttgctacagctaataggtaaagaatccagttacttcagacaatgcactgaggatttcttggtcataaataaatagaacaatttggcagaattcatacctatcataaacgaatactgctacatcacagggtgccaaggattccctatcagccagtaatggtctgacatcatcttcaggaatctctcgaaatacaagtgtctttctggaccccttcagaaaaataaaattatttaatcagaccaaatgtttaaaaataacccataaatagcaaacaataaatagccaaactgcgaatatttaaatatgctaatattggaaatgacaatgtttgcgactgatgtactagtactgctaacattttttctgtcaaaaaactatcgttgaaagtaatttctgataggccattaagattcctgtctgttgccatcaaaatgcaatattttttttcacatggtatgttggccagtactatgtttcataaagaacgaagtgaatatatcatagaacatttttaaatttgcaagcaagcaaattttgcactcttataagagaatttatcagaatgtttcaatatgttggaagaactcataaccacttacagatagttcaacagtatttgctgcaaaccgttcaccattcataggcagagcatcagaaggttgcctggaacagggaccgcaagcaaatggtaagaaataaacatggtaataaagatataaagcacatagtgtaagatactaagaaatgcatagagcaccttccaaggaatgattgtagcaatgctgtctttccagcacccctgggaccaaaaacatagcactggaaaacattccgttgcgtttgctgctttttacgatcaactcgtcttttcctcatagtggtaaatgctgagccaaaatcacccgaatagccaacatatataaggttggcaaaactatttgctggatctagaagtgtcataagagcccactgcaattgcagaatagttcatcaacaaaggaagatagtataataagaaaatctaacaccaatgcagcatgcttagttctagatagtgctatcgctgcaattgacacagt

SEQ ID NO: 22270 - DNA, 4636 bp, Oryza sativa
  unsure (1)..(4636): unsure at all n locations
ccatgattttcagtaaaataaaactaccagaaaaaagaagttgactagcattcacattacagtaaaataactgtgcaccaatgcgttaaacttacattatctgtgtcaaacatattgaaaattcctctcaagaaatcaatggcttgacctgtcaactccagggtctgtaaggagaaaagttgatattgacactaaattttatataaaaagtaagtatgataaataccgcagataaatgcttgctgatgttaaacaacaaccaacatactattggaatcaacaattcaagaaactgccttagtggttcctaagagtagagctattctactacagtagtaacctagtaatgttagcaatgaagatatcaaacattgcaagaaacaaaagaacaaacagaacaccaaaagagcaatttctgcacttgctggaatagtaatgctatagagaacactatggttgaagaaacatctgacaggcagttttaatatatgaaggaacagcaactcgcatatcatgggtactaaacagcatacataacaaaaaagcacatataaaaataactagcttcaacatgaaataaaatttgaatagtaaaagcactgagcaacacattacttgatcgggcgctcgtttaattgttggaataaggtcatctctaagcttgatttcattatcataaccaaacttccttaggacagtccatgtagtttctagtcgtcctttctcaataaaaagagcatgaagaaaaaggaatccagtcaaggtaaggccattgtcattcacgccttcaggcatcttctcttgaaccactctcttcacgcctgcaatttcagtaggctggagaggagcattgaagcatttgacctataaagcaccagaagaggttctaatcaacaccataaataacagaatggcaataaaaagcactagagcagaaagcaaggtagactaagtgaatacaaacctgaaagtcattgagctccacatcactgagtgctccatccctgtcatggtcacatagaataaaaatccgcttcaaagccctcacacaccgtggctttagagattgcgcctcttgatcaaatagaggtgctgttgggtgaagcaccgccttctgggcatagtagaagacctcgggaacctgaaagcattcataaattatattctagttaacccaaacctagcacaatatctggaattctatcttagtagggcaccaattaagattatcaagtgcatagtacaatagatgcatgatcaactaagggcattttttatgggtttgggaaattgtatcccaccattcaaaggataattttcaatcttagccatcagtttttgccaccacatttcatcttaaccatccactcatttccatttcccaatctcatatctcataacccatcatataaacatgccctaaatttattttcagaataaaacaacataaggatctggttatggactatgtagtcaaccataaaaggatggcaattgggctagtattttgagcatgcccaattcagattgaccaacaagttgtaatcaacaaaaggatggcaattgggctagtattttgagcatgcccaattcagattgaccaacaagttgtaatcaacaaagaactattgagtgcacgcatttaacctggatctggcgaagcgcagagcactcaatgcaggtctcgatctctctgaatgtctgcatgatgggcgccatcacctgctcaaggctgacctgctgctcgtccctaaggtccagcttacaccccacgacaatcacaggtgcctttaactgtgataggcaaacagcaagcaacacgagatcacatcggaccgcccatgaaaccacccattacgaccgatccaaatcctacgccacgaacctggaggcggcggagctcggggagccagaatgtgctgagccgctccagcgtggcgggcctatcgcaggcgtacgtgagcaccaccgcgtccgccgcctggcactcggcgatcagcttcgccctgtgctccggctgcatccacacagaaatggaatcaaccacacagaaatggaatcaatcaccgagacgaacaaggccaaaatcgcaacggagtccatccacaaatctaccgactaagggaacacccccgattcatcgcgggccgcggcgcgatctagcgcgagggaggtgagcggacctggaggaggtgtcgacgatggtgattgggacgcggtcggggaagtagtcggcggggaggcgggtgggcggcatgacgcgggggacgttctccgggaaggcctcggtggcgacggagacgacgaggctggacttgccggtgccagggtcgccgatgacgacgacccgcacgccctgcttgccggccaagttcgccgctgtcgccgcagccgccatggcgcgcctnctctctctctccctccgctcgccgcgctagggttttgggggatttgggcgcggcgctgcggcgagtggtggcgtggcgtggcgtcgcgcgggggtggggggtggggaggaggcgtcagagagtggggccggctcgctctttatatggagtttggttgcaggttgcttcgccttggaagggaagaaagagagtgtgtctgattgaagactcgatccctgtgtgggttgggctttctcacataggccatgattgaggcccatacaaggaggccttacgtgttactgtgtgatgctgcgagccttttatgcacagtgcaaggccctcatctgcaaatcagcacaaccacatctggggagcgtttgttcggggaaatcactgagttacaaaacgagatttttcgatggtacaactgtcgtggtgcctacgtgacgtagctttcgctgaaatttcaagttgactttggtcaaccatcgtgtgacctcccccattgctggtcaccaagaagagaggaagagaggtggacagaggaggggaatagtcactaccatgtgggtcccgtgtgggtcccgcgttgattcagttgtcacgtcacgtgaaataggggacaaaaacaccgaaggatctagagtgacctaggtttttaagttgagggatgccatatatctggttttcggttcaaggataattttgtaactcggcgactaagataagggatctcaggtgtatattttccttcatttggagaagagatctttagtttttcacgcgtacgcttctcaaacttttgaactgtacctttaatataaaaaaaaactatacgaaaattgctttaaaaaatcgtattaatccattttacaaataataattaatattttaattaattatatgctaatggatcgtctcgttttgtctattctcggtcttctccaatcctctcctcacataaacttctttaaggccctgtttgatttagtttaggattattataatctggattattatgagtaagctaaaacaaacatatagcttattatgatagattattacaatctataagctagattactataatctggtaatccactctaaacgtgctttttttagattattgggtagctaacagctaataatatagagaaacaaacaacaaaccgcttattctatgtctgcttattataatctagtttatagtaatctggctcaataatctagattacaataatcttaagctgaaacaaacaaggcctaaaccacacaccaggacttattctatgtcggcttattataatctagtttataataatctggctcaataatctagattacaataatcttaagctgaaacaaacagggcctaaaccacacaccaggaaatctaaagccatgcgatgaaggcactctaacccacagtggtagttgcccaagcctaatagccacaatttaaccaaaaacgtgaacttttgatgctatataaccaattttgcctttatatttccacatatatgttggcctctagccgtgttgtctttctccgtcgatgctatcttgtcgatggtaataggcatttctttttgcctataaaatttgagagcttagactaaaatagagtgagctcaattttcatatatttttggcctagaaatatttaataactaggtacgtagattgtgaaataaaccgtgggctttgacccattaccacctcacaaagtgaattatgcggtgatctagtacgtgatctttggtgaaatgatttgtgctcctttacttgttactgccttaactgtgtgtcattcaggtagtactgatctctatagttacctatctaaattaataaaactacgctcctgattttactagtaagcagtagcaagagacatgtaaatgcagcaaactttgtgacaaccattttcaaccattcaagtagcattcaacagcgctgaattttaaccagtaccaacttcgcattagaaataccatcaatacaaatagtttctttagaagttgcaccgagatagagtttccccacctgaattatcattaagggagagaaagtacaaattgttttaactaaattacattggaatgtagaggaagaaataactactttccaagaatctattacaactctagctaagaaacctttccaacctttccgcccagagggtatagagacaatcttagcgagagagcaagatattccattgaagacaacatcaataccaataa

SEQ ID NO: 22271 - DNA, 4890 bp, Oryza sativa
aagtacttcatcaaaaagccatgaaccaattcgttatcataaccaaacttcctaagtacggcccatgtagtttcctctcatcctttcgcaataaaaacaacatgaaggtaaaggaatccaatgaaggtaataaggccattatcattcacgcatccaatcatatgttgttgaaccaccctcttcatatctgcaatttcagcaggttggagagagaccttgaagcatctaacctgtaaattagcaaaaataaaaaagaagtccaatgattattatctatataaatactcagtcttatttttaggatatataatttgaaaaaggacatcctaaagataattcggttgcaaaataaaatcatatgtgaggatgacatgtggggactagacacatgtcaatagcacatatgatggtattttttataactccacaattttacaataccaaacaaatcggtatatttttacatgaccataaaaacaactatataatttggtataagtgagtacaaaccagaaatgcattcatctccgcatcactaactgcaccatccttgtcacggtcataaagagaaaatatctgttgaaaagccatcatgcaccgtggctttatagatcgcgttgctttatcaaatagaggagttgttgggcgaagcactgccatttgggcacagtagaagacctcatccacctgcaaatattcaaatattcatttatcacgtgaaaacaacaattattacccaatatctagaatctatacatcagtaaattataagtccaaactacaatagatagacaatacggttatgaattgaatttactacgtggccaaccatgcataaaaaaattatggcaatttatgagctagtattataaacacgcctgaccaattcagattaattaattgatcacgaattaacgaacggcgactcgacactgaagtttgaaaatgcatcatcacatataattttaggtgtgtttagttcacgctaaaattaaaagtttggttgaaattggaacgatgtgtcggaaaagttaaaagtttgtgtgtgtaggaaagttttgatgtgatagaaaagttgaaaatttgaaaaaaaaaaagtttggaactaaactcagcctttaccacacattttacctttatccggtgaagcgccgagcactccagatagatctcaacctctctaaatgtacacatgatgaagtccagcacattttcaaggccggcctgctgctgcttgtcacttaggtcgaccttacaccccgcgagaatcaccggcaccttcgactgtgacaggaaaatcacaacagaaaacaccacgaaaccaacatcgatctcggttaattagcccagaaattaaaaccaacgaccaaccatgacggccggccgcgatccaattaatcgcacatatatacacgaagaacctgcaggaggcgccggatcttggggagccagaatgtggtgatccgctccaacgtgttcggcctgtcgcacgcgtaagtgagcaccaccgcgtccgccgtctggcactcggcgatcatcgatcacacgccgaatcgatcaacaccaccaccagcacaaatcaaatcgacacacgacgatgacacacgattaggggagagaagcgacgaagcggctcgatttggggagagaggcgacgacggcggcgaacgtacctggaggaggtgtcgacgatggtgacggggacgcgggcggggaagtagtcgacggggaggcgggcgggtggcaagacgcgggcgacgccgtcgtcctgatcggggaacctcccggtggcgatggtggcgacgaggctggacttgccggtgccatggtcgccgatgacggcgacccgcacgtccagcttggccgccgctcgcgacgaccacgcgacccccatggcgtctcctccctgacgtctcctcccctccgcccgcggtagggtttttttgtggggggtttgggcgcgtcgcgtggtgcggccgccatcgctggcgtcgactaaaatagagagagcgagagacgaatggtgggcatgtatggacttgaaaggcctgttgggctgggcttttcggtgttcctactccatatgcctaagcgaggcccacaggaatgagggctcacgtagtcgtgatgtcatcgttttttaaagataatggactcagttaaatactacaaaatgatacattctaagagtccaccccggtctctgtaaagaatgcacacagcaaaaaaaacaggatctaagaagaccttctcatcacaaaacagaaaccagtcgctatcaacctggctatcaaccaatagactagatcgcgactcatgcttatggataaaaaactcccacctagtccaaacgttgcgataccaccgtagtagtatcccgaagtcccggtttgtgaaggatggcccaagtgcgtagccaccggataactaaagtagtaatctgcaaatgagaagacacatcatacatcggtcagcgtcagccatcgcccaccgcagtgatcgccgtcgccgtcgtggagtcaatgttaaagagtttttttctaaatttttttaaaccttcttaattttaaaaacaaacaattccaaaatttatttttcagtcttactaacccgtctcgcagttagttaaggtgacgtggcaagacaacacccggaaaggtttgttatcaaaattagaaaatttcaaaaaaaagaaggaaaagctccagtaccagcctgagacgctgatggcatcgctgtgaacgaccccgcccccagcctgagattccgtattatcgctctcagatctcagttgttcgtttcttctgattgtttttcattaattgaagaagcttctttgctcatttggtcattttgatcgcgatccactcaagcacccgggctccactataataatgcaggctagtgtagcagcccagcacacacacactagtgcaagcagctcgagcttgagctccacctcgccatcgccggcgacttctcctgtcctgaccggccggagctccgatcttggcggtgaccaagagacctgacgagacgatgtccgccgccgccgccgccgccgcatcctcccccgctccccggtacgtacctggttctggtcgccgtaatccgatctcctctttttttttttcgcacggtcttcaccggcggcgctgtatgttagtttactcgatctcgaatccccgatgcgtcgccgccggtgaaggtcccgggctttcgccgtttgccatggcgaaatcgagggatctgactgactgactgactgtccctatccccttcccagtaagagtgggctgctcaactgataggttttggtgtgagagtgtttggggcttcttcagattgcccagaggaaaccccatatgttcttgaactgaaaagatgaatggggaatctcaatgttagtcaaagggggaattagtttctaattttcccttcaataacatgttagctggtgtgtcaagtcctgtaatttgtgaattgtgagagttcaggctagcaagattaagcttgtattttgttagaaataatgtggttaaaaatcatgtttgggtggttttatgagaaaaaaactgaaaacattgttcgcgaacaagcaagtaaacaactttgcaatggtgcttgcctggtctttcctcaactaggataatgttcttttcaagttaattagctgtcgcaactcactagtagaagtgcctatagaatttaatcaaaacggcggctcacttatccttcctctgccccttcgcaactgcattctggaatcagcttgaaatcccgcagactatcaccagcgcgagcgacctccatgctctgcgcccaaatggccgcctcccaacaaaacacttcaaggttttcttcttgctttgtctctggggattatggaatcatcgttatgatgttgtcttccgtggagaatccccctctctgcatagactagtttctagatgtattgaggatgcaaccttgtgggcagagagactagtttgtgctgacaggatcgttgtaatcctggaaacaaattctttcctccccccttcgcactatgtaatccaaagtcgtgtactcctatctttcaatgaaaattcaggtggggaagctctcccccccggtgaccagtctaaaaaaaataatttaatcaatggttcatgaaacactggtaattctgatactaaatacaatttgcatatttatcagttctttaaatttgatttgggttctttcctctggagaaaaggttggaaagcaaggttgcgctggttaccggtggtgcttcaggtattggtgaagcaattgttcgcctctttagagagcatggtgcaaaggtatgtattgcagatatccaagatgaagcaggtcagaagctccgggactcccttggaggtgaccaagatgtcttatttgtccactgcgatgtttcggtggaagaggatgtagcccgagcggtcgatgcaacagctgaaaagtttggtactcttgacatcatggtcaacaatgctggctttacaggccagaaaatcacagatatccgaaacatcgacttttctgaagtcaggaaggtaatcgacatcaatttagttggtgtattccacgggatgaaacacgcagcgcgcatcatgatccccaataagaaggggtccatcatctcattgggaagtgtttctagtgtcattggagggttgggacctcattcatacacagcaaccaagcatgctgtggtgggtctaaccaagaatgtagctggggaattggggaagcatgggatacgcgtgaactgcgtatctccctatgcagtgcccacggctctctccatgccgtatctgccccagggcgagcgcaaggatgatgccctgaaagacttttcgcctttgttggtggtgaagcaaa

SEQ ID NO: 22272 - DNA, 2410 bp, Oryza sativa
ggatggtggctttacctctgtgaatcacaatttgagagcatttgaagattaacagaagttgttaggcacaattggtactctagtttcagatgctatgtaccattctgattttagaactttgatcaattacctaaagtaagaatgtcaataaggaatgcaatcttgtatctgtggtattgtatagtactatgattgtattgcggtgcttaaggacaatcattgattattatcagcactattatgttacagttctgaaaactggtatgagttcatatagcatcaattattcaggtgtgttaagtaatgcttctatgtcagcatgcctacagtacagagttgcaaaccagtggattttacagttgaataaaattgatgcccattggtgtatataatcactgatgacatgcacaaaactgaattttcctgaattggcactactgtgctcactctaacagaatcattgacttatctgaagaaaaaaaaatctgcagataaaagggattcttctactgatgaaaattgtattggacgaactttcattgggcccgatccatgaaagaagaaactgacagcatgagattaaactggttgtgccacgtctaaatattcagcatacatgtaaagtgcgaaagaatggcagccaactgatttcactaatgcatgtgtgatgcaacaaacaataattttacagtacatgtatacaccaaacataaacatatcattagcataagacgtatatcatcagtcatcaccatctgcgctacagtttctctataaacggagatactatggctttcccgtacaacattgctgtaataaactatcaccggtaatctttcaaactctagcatctattcatcagctgaagaatgttgtgaagtcacagaatcagtatgagcagctgaaagatcgtttgagtcagctgcatctttgttatctccaggacagtcagaagtgtccaaatttgttgtgtccacatatgattcggtttcagcttcgctttcatgctcaccaaacacactctttcttttgacaacattaattagaattccgttagtactcctttctggttgcagcagttctccttcagaaacagcaatgcttgtagaggtagagggttgactagctatattgttgccagtattgcatgaaccagtttcagatgtgtctgtgcttctatctgtaccttgtgcagtaactccagaattattgtttgggcatgaatctttagaaacggtagatcctgatgaattacctgtattgaactcagactctatctcaagattctgaatgaaattgatgaacatgtcagctgatgaagtcctcattagaggtccaccactccgggtccaagaatttaagtcaatggtttctgattcactctcacttccatcattatgaataacgttcggtgtggcaacaacttgaattccttggtgagtagatgaactagtggttgcaaaacaatcttctgagagagatcctgtagaattctctcgactgatgcagctccacgatggtaccctccttggtgttctgattacagaactgcatgtatatccctgggaagcagaagctaccctttccatgcttctctttagtcttcttttatggtttagaacggcaatggactcatccaacgcaagttcaatagcacagtttgttctgatcgcagagatcttctcccatgtgcacctgcgcccctggttggcagccatttgcagctccgcatatgtagggttttgtataatcttcaagtactgaaaattgggaaaatacagcaaagaaaaagaattatgaccaaagaattagcactcgcccatataaccaaaaattaatttatcgacaaaaatacctgggctgctgttgccggcataaccatggtgacatcaccctcccaatcctgagcaaacaatttcgctagtcctcccagtgggaggccaatttctaggatttggttacatctgtacttaacctccatttcagccagacgagcaagctacacaaatgagattaaacacagcacttaggaatcaagattttaaagagaacttgtctgggaacatataacacggcatttgcagagtaggaatctaaattttaaagataattttttgtctagtgttaagggaacataaatcaggtgcatatgtatttataaattaactttatttgcatactgaataaaaccctcgatctaccagatattgcattatttccatgaataatcatgcatgcgcagcagcatgtggaaaattgacgaaataatgccgaagaacatgaaaacaattaactacctacaaggttacctacaggctgcatgctaggataagccatacaagccatgaagctaatgccattaaggtgcctattccatagggtagggttttagacaaacctttccagcgaa

SEQ ID NO: 22273 - DNA, 933 bp, Oryza sativa
aggcaaaagcttgtgctcaaccagtgttttcactacacctacatgaaaagatcccagtgaagcacccccacttaagagtaatgctgtcctcccaaaggcatgcctggtctcttgaacaaaggcaagtttctcttccaaaagcaaatcatcggtatcagattcacataccattttcagctgggcagaaacctcatcaatgtaatcttttataagcttaggaacctgcattacaacaaatcattttttttagacagaatggaaaggagtattttaacatttcatgatagggagtgcgaaaatcccagttgacagcaagcaatccttttatgtgtgcaataccgaaacaaatagtgagagctgtggaaacattttaggaacacatactacaagggaaaaaaaatgagctacatcaattatataatatttgatcaaataagatgcacaagcatattcaagataattatccctggtatgactgaatatgtacatgccatttgcgcgcaatttcagaacctgaccaaataagaagcacaaatgtctccagggcaatcatcatagaatgactaaatatgcatatctatgataaagagggatcagacatataaacctcgatgtaaaatattacactaatataatagcatgaactagtacaagagaaggtttgctaattacctcaagcctgcccttatgaagctcgggattgcacatgttccccaaattcctcacaagatcaccacgcatgcagaacaccacatcccggagcgacccttcctccctccgccttcggagctcctccagcctgttcctgatgagctcctcgtcgtacaaatcgctctcactgacctgctcagacattttgtcgagcaccttggcggcgcgcgcccactcctcgtagctcgccgcgtacctaatcgccttcttgcactgcaaccg

SEQ ID NO: 22274 - DNA, 835 bp, Oryza sativa
ccttgagatataaaaggaggaccttgcccacttaagaagggaggagctggggaaagaggggggagaagacctgagctcgtagaggagagaaagaggaagagggtttctagagtttgaactctcttgctctccagctctttgtaactccttcatacacagatccaccagaacacaggagtagggtattacacttctcagtggcccgaacctgtctacatcgcccgtgtcttgcgcatttgctctctcgcgaaacattccacagatcgagtgcttagaacctcacctagcgcccccggccgaaccggcaaaggggggcccgcgcggtctcccggtgaggagccccacgctccgtcaacacccatcgccgccgccctccggccgccgctagccgccgcaccgagcctcaccgtcgacgccgccgcgttcgccatccggcgagccgccgcgtccgctatccgcccggccaaacccgtcgccggagcccgcatctcctcgcactccggtgagcaccaccactactgccgccttcggccatggtttccgcccgccgtggaccacccctctccctctaatccctcccatcttgttccctaggaggtctcggagctcgtccgcccatcgtcgccgttctccggtcgctcgccgtcgtcttcccccacaccggccaactcgcggtgaggcactcctcccctcttttccccttcctctccctcctagcgctgagccgagccgagccgccgcttcggccgtgcgccgtcgccttcggctgccgccgcctcccgcgccgccgattgccctcgccggcgaccgcatgccgccgccgccagccatggcc

SEQ ID NO: 22275 - DNA, 5719 bp, Oryza sativa
  unsure (1)..(5719): unsure at all n locations
caccgatagagagagagagcgttgtctctctcttccttccctctctcgggcgttctctcgctctctcgttctctttctctctcgcgcgccgacgccgcttcccgccgtcgccgcccaaaacccgccaccgccttcactctctcccgcgctcgcgcgtggccgaccggccggtcgttgccgccgtcagccctgctgcgcctgcgccgcgcagccgcccggttgccgccgcgtcaagccctggcgtcgcctgcgtcgtgcgctgccgctccgccgctccacgccgcacccgtccaagagtgggagaagcagctgctctccctctcctccccctgtctcacacccctctccctcctccttttcccgtttcggcaagggtcaagccctcctttccctcttcctttttccttttgcccgaccaccatcggcgtcaccgcctgccaccgcctgggccacgggcgcgaccgccagctcgccgcccccaccttgaccgcgccagcctgcgctccagcggttcgattccagccgcccgatccaccgccttcgccgctccttgcatcctcggcatccgccgggcttgcatcgcccgtgaccgccggccgagcgctcgaccgctctatgtcggttccccctcccaaaccgacattcctccactataaaaccaagccaccccaaacccctcctctctcgttttcactcgcctcggtcctcacacccaccgcgccattgccgccgaaccaccgtcgccgccttgttgctgctcgtcccgctctcgccgttgccgtccgttgccgagcaccggaggagccggtgcgtgctggacgcgtgacgaggagctccgggcaccacctctccctcccttcttccccggccgcgccctctcggtgccgtgccgcctcggcgtcgcgaccacctcgccgcgacaccgaccgcgccgccaacgctgcctcctcttcgttggtgagctccctaccataatcctcctcctgccgcacgatgcgccgcgcccgccgccgcccgccataggcttgccaccgtcgccgctcgctcccggaggccgccgctcgtcgccagatctccacggcgtcgctctgccccatccgacgccggagatgaactccttgaaccccggagatactcccaccgccttgaattgatccctcgtcgaccgccgccgtttaacccctttgcttgccagcggcgcgcgtcgccgcaatccgccgcctccggcctctttccggcgaatccgagccgtcggctcgcttctctcgtcccttccctcccccggtgcgctttcttttccattgaggtagcgccttgctccggtgaactcggccgccgtccgccgtccattcggccgcgcccccttcttcctcctcccgccggcccgcgtggctgccacgtaggcgccacgtcggcgccacctcggctttgaccgagccgagccggtcagccgcctccttccttcccccctcctcgcgcgcacggtccacggtgcaccaaccggctgcgcgtgggcccgccacatccttggtccatccggtgctcgcgcgtgaaccgcgctcacccgaaacccttgcgccgcacctcgcgtgcgcccatccctccgtgaaccatgtcgcagacatgcgggccccacccgggacctcgcatggtgggttcggtccacccggaccgccccctctcccttccgcgcgtccctaatgggccgcctccttgcgcccgcgccggcccaatggctcggccgagcctccttcaacccattgggccgcgcctcacgctcggcctaaaagtccatatttcctccctccgtccaagtcagtgtccatctctcatgagctacaagtccaaatttgctccctctcaattttattctctctcaccttcttgttgaccccacttgtcaatgagtcaaagatattcttgagaatgtcttttccaatattccacaaatatttctcttttctataaattcaataaatcattttcccctctttcagaaatcaattccttattccaaaattccatgaatcattttccttggtcagtgactgtcaataatattcttgagaatattatttccataaattccgacaaaacatttccttgcccagaaaatccacttagacctccaaaattcatatccctcgattcgcaactccgattgaccccgttccacttccagaattcccgtaaaatcgagatctatttaatggcactattatttagtctaaataggatccttttcttggtcttttgtttaggttttcgattgtttgcgtatagttgcggttaccggattttcgtcgatcgcgggttttctcgaagattcgtgaagcttcgtgaagaccttgagcaaggcaagtcaccctttgaccaattgctcctataattggaaaatcattattattttgtttgcaacttgcattattagaatcacacacttaacttgcttggcctcggtttgcatgccaaaccgacggacctacccagtagtcgcactaatttccgtaggtcgtactactctgattccttgtcgctccacccttgtggtacctcgatattcgtgctctctgagcgcgtataccaaatatcccacatacaccgttgtttgtcgaagacttgggaaatgggtttgtgaagccttcaaaacccgacatgtggtgtcggtgtgtttgaaaaccaaatgaattgtgaaaactcgcgatgcgggggttgtgccgatgtggcactgtcccgtattcgcatataaggaccgattcctgtgggaaactcatcgaacataatcaaagtgcaaccacaaggtggaatgggacaccctggctaagtagtagtcggttcagggaaacctcgcatgccaatagttgggaacgccggggcggggtcggttggagccaaaccgggttcctggtaatgcaagaacgagaagcttgctgaattaccgatcgaggtggttggagtttgatttgtgaacgcctaaaatggcctatgtttatgtgaggatttgatccttctatatggcatgaggtaaccctgggtcggcttgggaaaggcttggtcgcgaacctctgacaccggccagtgtctggagtaagttcgtgtcttgtgggtanagtgtacccctctgcagaggttaactaactgttcgaacagccgtgcccacggttatgggcggatgtgaggtggttcccgttgcgtagatttgtttgcctgtgctttgtgaaaagttgttgtggtgtgggaatcgtaaccagaatcagcctatgtggcagatggatgacctgagtggtcagaaacgaatctgtgtgattcgggatgtctgtgggcatcatagactaggcttcccgagtggaggcggattgctttgctgctgggcagctggactctgggagtccgagaaaatgaaaaaggctctgggagccgattaatcaagtggaatggctctgggagccgagaagtaatgatctgacccgggaggtcggtacattaccaaaggagctgttgaaaaacatctcttaaagtcgaatcgagatgcaagtctcttttcggccccaaacttagaaagaaataaatcacatagtgatttcaaaatgtcttcaaataaaagatttgcaaaacaaccttgcctctcttccaagcttgcattaaacacctaagttcccgtgacttgctgagtacgaaagtactcacccttgctctatataaatatatatatatagttcctccgccctgaagagaagataaagtgaagtgaagattagggtttcgtcctggttcccagccgtcgcctgtggtgttgggtgttagttcgttggttccgctgctgctgctgttgttggtgtttcctcgtccgtgtcgtcggttgcattctcgggttgttctgagctgcaacctaagttaaggtaaataagtcctctatctattttaaggatttgcaatgattcatatttgtcaccgtgggtaccagcactatgtcctgggactggtaccgagatcgcggtttcgtaggaagcgattcgcgccgtttttcctacgacacgctcctatcaggtgccgttgtgcggcggtgccggattggggtgtgacatattctagcaacaaatttgtaaagacaaaaatatacttttttaatatagctatgtgctaaagacgtcttttttaatatatgacgttattactttttaataaacatttgattactcttcttattcaaaacttttatgtaaatataaaaaaattaagccatacttaaatgaacatttgacgataaatcaagtcacaatagaatttaaatgatactaccattatgttggagctataaacattatagttttgtgattaaattgacactaaacctatagttttgtgataaattgtcacctagggctggtttggttngnnnnctanntngnncttaccantttttgtnantgttaaattttgncaacttttggcatggctaattttggcaaaggaaaaattgtgtttggattgaagccgaaatagcctaaattaactgttgaaatggcctattttcttacgcatgccaaaatttggctccaaaccaaatagaaaataaacactattaaaattgccaaatattagtaaggccaatataggctcaaaccaaacccaacccctaatatctatttttgacattatgttttaaatttttagcctttgtaagaaatctcatgttaaatttatagttgtgtgataacacgataattccttaggtcctgtttgtttcagcttaacattattgtaatttagattattgagacagattactataagctggattataataagctgacatataataagttgttagttgtttgtttctctagattattagctggttgttaggtgttagcaacccaataatctaaaaaaaacacttttagagtggattactatattatactaatatgtcttatagattgtaataatctatcaaataagctatatgtatgtttcagtttactcctaaatatcccgattataataatcctaagctaaaacaaacaggggcttagttttgcgataatttgatcaaagcatatgtagttaaatttactcttacaatatattacaattatacttcactcgcattacaattatggtatagttacactaatattatgttatagtcacctaaaaactctgggacagtttttcttaaagcaattatcgtactccctccgtactcgtaaaggaagtcgtttaggacaatgtttaagtcaaaccttgggaatataaataatgggtaactctcaagttgtcgagtttgaaaatataaaaaaattatatgaatagatttgtcctgaaaaatactttcataaaaatatacatatatcacttttcaataaatatttttatataaacaaaaagtcaaagttgtgttttggagaccgtgtcgctgtccaaaacaacttccttttcgagtacggagggagtaatttaattcaattcccaatttcccatgttgacattgaattttgggcgtctttattactctttgacattgaggtttgggtagtactctttaacacaccaatcgggttagggcaagtgctatgatatatgtgactaccacatctaaatttatctattatattcactcatgaactcagaggtaacccatactatgtatcatctctagtacacaaataccaatatactcccttcgttttaaaatgtttgactacgttgacttttt

SEQ ID NO: 22276 - DNA, 6009 bp, Oryza sativa
attgcttggatcactgaaatccaggcatacctcgcagataagactctacccgaggaccgcgaatggagtgaacgcgtccagcgcatctccaagcgctacgtgctggtggaagggaccctctatcggcgcgcggctaacggagtccttctgaagtgcattcctcgggaacaaggtgtcgagcttcttgccgatatccatgaaggcgagtgcggagcccactccgcctcccactccttggttggcaaggcctttcgccagggtttctattggccgacggctctcaacgatgcggttgacctggtccggcggtgcagggcgtgccagttccacgccaagcaaacccatcagccggcccaggccctgcagaccatacctctttcgtggccgtttgctgtctgggggctcgatatcctgggtccattcaggcgggccccgggcgggttcgagtatctgtatgtcgctgtcgacaagttcactaagtggcccgaggcttatccggtcatcaagatcgataagcactccgcgcttaaattcatcaggggcatcactgctcggtttggggtgcctaaccgtatcattacggataacggcacccagttcactagtgagctcttcggtgactactgcgaagacatgggcatcaagctctgcttcgcctcccccgcccaccccagaagcaatggccaagtggagcgcgccaacgcgaaaatcctcaagggcctcaaaaccaaaaccttcaacatcctcaagaagcacggcgactcgtggatcgaggagttgccagcggtgctttgggcgaaccgaaccacgccaagccgagcaaccggggaaacgcctttcttcctcgtctacggcgcggaggcggttctcccatccgagctcaccctgaggtcccctcgggccaccatgtactgcgaggctgatcaagatcagcttcgcagagatgacctcgactacttggaagaacgaaggcggcgcgcggcccttcgagccgcgcgctaccagcagagcctgcggcgctaccatcagcgtcacgtccgggcccgtcactctgcgtcgacgacctcgtcctacgccgcgtctaaacgcgtgctggactgagcaagctctcaccaatgtgggagggtccgtatcgagtgatcggcgtcccccggccgggctccgttcggctggccacgggcgacggcacagagctgcctaatccgtggaacatcgaacaccttcgtcgcttctacccctagtgggggtcgggtgtcaggtctcgggctcgggccaaccccgcgcccccccgggcgtgcagggttggccgggggctaccacatgcatatccttatcttttttctcttccgtatttcagtaaaagcattttcgatttcctgaggattgtgtctgtgccatcgtttccttttgaagaatcttggcttgaattagcacgctcgtgcccgaccctgccctcggtggcccgggccggctaaaatcgccaaacggggcccagaaccgagccgtgccccggggcgtggtgaactccgggggggaatcggcataggcccacaatcgggtcatccataaccctcggtcaccacgctcccgcctggccagtctcgacacgcggatctccccaggcactagccccgacccgcgccacttgaggttgggacctgggcacgagccctcgtttaagccaagacacagaaggaccgcggcacggaccatcctcgtctcatacacacaacaaacttaactgacgcagaaatttcctctttacttgattacagattaaatcagtctatacaagaagggggcccgaaggcctcggaagaagaaggaaaagttattaagattggcgggggcctgggggctcactccgacgcccccgggccgtcggcctcgtcgtcgctgtcgtccgcgccgtcgtcaccgccctcctcgtcggagtcgagcgcgaacgcgagtcgaggggccgtaccctcgaagctgtggacgatgtggtcggcggcgtcccggaccctcgcacgtgcgccatcctcggttctgggagggaactcttccagcgctgcccacggggagaagtcagggtccctggcctggtagcttgccagtacgagctccgccgccccccgggcgaggtccctcgaggatgacttgatcgcctcctcaagctcctcggggagccgctggagggtcccggccatctctgagaggcgctgggcgaggcccccctggttggcggcgtatttcgcggaccgcccgccccagaggcccacctgccgcccggcacggtctagacgggagacggcgtcccgaagcatgccaggccctacctcgcccgccaagcggagggcttcgacctccccggcggacgagtccagcgcgccctgcagctcggtgatggtgtgttcggcggctgcaaggcgggcggctaggtcgccgtcgcccgcggtcgccccgccgctgcgcgctctcgcgtccagctccttcgcccgtgcctcgaattcagcggcccgctgatccagtgcggccctctcggcgcgggcgccttccagattgaggcgcgcctgctcctcccgccgctgcgccgcggcctcggcctcctcgagagctcgctcccgctcagtgagctcgtcctcgcggaggcggagtgcggactcctcttcggcgcaggcggcctcgtgcgccgccagcgttgcctcccggatggcgatggcggcctcgcgacccgccagttccctctccttcgtgtccaaggcgcgggcgcgctcctccagcaccgtggcgcgagcctcaagggcctcttcgcgctgccgggacgcgtcgagcttcttctctagctccgccgcccggctcccgtatgggaggcagaggtcgtcccgcgccgcgttgaacacggcggtggcgatgagggcagtctcccgctcctcctccacctccctggcgatctccgccaggtccctacgacgggcctcgagctctgaggcatgccggcggtgtgccttgcggcccgcctccaccatggcttccaccgagcgccgcccctcttcgacgcgcgcccacgccgcatcgacctccgcccgctctgcctgcaggacctccatctgggcgcttaacccgtccaacaccgtggtgttcgcagcggccaaggcctgcaggaggggttctgcgctcagtggggcagcggaaggcagaggggagagccgcctcggtgtgggcgccgcgcggctcggcccgccgatggacatgccggactcgggggcgttccccgaagctggctcgccccaagcattgcccgaggggtcgggcccgagcggcgcgcccgcggcctcgtcgtgggcggcctcagaagtcgtcgtcgcctcgggcggagtcgggtcgggggctcggcaggccgcccggcgtacacgcgccgcctccgtctcccggacggactcctcggcccggcggagtctggcctcctcccaagcggcttcctcagcctggcgagcccggacggcctcctgggcagcttcttcggcttcccggaggcggtctgcggcttctcgccggtcagctccccgcctccgggcctccgcggtcgccgtctcctcggcctcagaccggccagacttggaatggcgggaagggcgcgacgggatctcgctgaggcagaagaaaaaccagaagacgaaaaacgggtgagtgaaaacttgccttgggagatgggagaatgaatacggccgcagtgggcgcggggacgaacctgcgaggaggtcggctaaacgaccaccttgggggggagatgaggtttccccggcatggttcggtcccccccatcttgcggagccgcttcttttttcgctccccctcgggctgcgacgtcggcacagcaccctccgggcgcctgctgctggcacgcaccgccccgccccctcggggaggagatggggagggggtatcctcctgtttcctcttcccccgggcgtcggcagggcggctgccccccgggcccccgtcacggggcccagaagcacgaccccctcccggggtagattgttcccccctgcggctcccgcccgcgccatcgtggcctcgaggagcccgctcccctgacgccccgaccgcctgcatgatggtcaggatgttggcgcgctctggatcgctgcagagggggaggacaccttgggggatgagggatgcctccaaggagctgagattcagcacccgttggatcaccatcttgaagtcttcagggacccaatcccatttgaccccctggtggatcctcatgtagtcctcggacccggtgtactcccaggcgccccgggcgcgccgctggagcggcgcgatccggcgacgaaggtaatcgccgtacaccatggcccccgtgagcccctgggatcgcaaaccagccaggcggtcaagaacggcgtcgtagccgtctcccagatctaccggcgcccgccagctggaggcctgcgccgggggctggctcggaagtcggaggcgcgcttcgtcggcgagaggggtgtagaaccagtcgctcttccagtcgtcccacgtcttgcgaaggacgcagggaatgtagcggttcagcaccggcccccgcggctggaagtagcagccaccgactaccgacggtggcgacaccggctgtacggtgaagaaccaccggacagccggagagatgggcgtaccccgatgaacatctcgcataggtgcgcgaagatggccaacgtcattaccgcgttaggggtgaggtgcgccatctggagattataaagctccagaacatccatgaagaaagaagagaatggcgggaccagccctgccattgcgaaggaaaggaagaatacggaccgccccgggtagtgtggtgccgggcgtccctcacccagcgcgaccacctcccggccagtggcagattccggcatgaatcggcgcggcagcccggcctgcctctcgctcacgatgcgagaaggcggcagcacgctaccatcgagcggtgcggagccccgtgccatgacgccggcggaggaggggcttgagagcgagtgagtgcggcgaaggtagggcacaggaaacgagaagttagaacgcaagcggcgaaggcaaggggaataatggcgagaggaaggaaacgaatctcttcctcggcgtctttatacccttaccaacgctatgcccggctcctcgcttccctcgcccactatctcgccccctcgtttctcgcgcccactcctccactaatcccgctcgcccgtttgcggcgcacgaggcggatgtgcggccgtggtagtcgagatggcacatatcgtgcgcgcgttaactacgctcgccgaccgatgcaccatcatcacatctccaggcgaaacgaaccggctcgtcccaattcgcgcgctactcaagtaatgtagcggtcttgaagaaagccgctcattattatcggtcggtttttcccttgccgatgcgcgcgatttgcgaccactggattcctgcccgcctgtagagaccggccccacctgtcaccaggcctaaggagtggcgtcacgcccgagcgctttcctcgaggagggcgatcgccctggcataacgccgggggctactgtcggtgacatgggaccgggggtatcttgactataggtttggggcagctgcagtcacccacgtggcctgaccccctcgggggggtcgggcccgagggtgatgtggccgcccctccctctgtctccccgaggggtcgggccgctcccgtttcggccccgagggctggggcgccccgaccccctgtgggtttggcgccacgtgtgtgggttaggtgagcacagcggcgctcacctaaccgcgtttattgcgggttggacgagcgccccacgccgcatttaatgcagcgcaacacactcgttcggtcgtgacaggtccagtgtgtgccggtcacagaccggtcagatcgcgggttaggtggcaacaggcggcctttcgcacgcctcgccccgtcccgtcggaatgatgagagcctctaggcactcgtccctagcc

SEQ ID NO: 22277 - DNA, 7374 bp, Oryza sativa
  unsure (1)..(7374): unsure at all n locations
acccgtgggtcccgcctatcggcgccgcccccattgctgacgtcagccctggggcaatattgcgcaataaatacattaaggcttttctttaatagtaaaaacacagagaatcttctaaaaatcataactaattcatccgagctccgattaagtccattcaagtctcagtaaattcataaaaatgcatagaatccattaaaaatggttttgtttcctgttttcagtagtcttatagcctattttgcttgtgtgctttgtttgtcgcgtagatttcggccgtttcgtcgatctgcggttcctcgaaggcgttgctgtggtctcatcagtgcgagagcaaggcaagtcatgcattacaattgatcatattgtacccaatttacaaatgtcccgcatttctattaaatattgcattattttacaatatcatgtgggatgggtcctattacttagctatatgttgtttcccttatgccattgataacttgggtattgaaatgactagatattggtttaggaaatgcttaaccatgcttagttcaactagtacacaaaaggggaatcacattaatgcatagactttgattattggcatagctttggtttagtgccaccgtaatgatgttggttaattaaaatacactacatggtgggctatgggtgcatggttttgttagtcgtgcccatggcgattaaggaccggttcgcgggaaaccctggaagaattcctcgtacttaccacaagccaacgtgagcaacggctgggcttgtagtgtagctttcctctagctgacgcatccaggcaagggtgggcgtgatggagcggggcgggccttgcgacgacctctgtcgcttccggattcacctaggcacgagaggggactgcccgctgccttgcgaggagtgggggtgaaacctgaggtgtggtgtgcttggttagagagggttatgcgaaaggtcctgtcacggcctctttccggtatgtcgtggtggcatgtcggcgcacagaaacgtgtcgtggggctgtgtcttgtgggtacagttgtacacttctgatcagagtaaaactattcgaatagtcgtgcccgcggttatgggcggtcgaccagattcaccgtgattagtctcacccctagttagctaatgaactagcgtagttcaggtggttggttgagcctgttgcaacatggtgtagcattggacagtgattggttaatactgattaattactacaactgttttactgctttcaactactgcttttaaatgctagctttatgcaaatgagccctttagcctcccttgggtatatcctgcatcatacctcctctttcggtatgacttgctgagtacaatgggtagtactcagtcttgctctcttttcccccacaccagagttgaagtccttctcagctgaagatgtctcaaagaagttggtttcgtcgttgccgtcaaggatgcctgtggaatggagtcgcccgctgcaggagtcaagtctttaggcttagctcgcttttatcttttccgctgcatttgtaatcttttatatttttgtaagacgtggatctgtatgtcaacaattgtcgtttgtgtaccctggctggtcctggacaagggtttaatacacattcagcttagaaattctggttcgggaatttctgggtgtatagggaaataatttattcaaatactaggttaattatcatgaataaatataatttttccagaatttatcttctctgtttaggtctcctaaaaatccaaactagtttccaaagagcccctcttcccctaatttttgagagtaatctatccataatttttaagtgcaaccaaagaaaatggaaactaggtaacttcatctacctctagaaaaatccacgagaatttatcacactcacaaatgaaactatagaactacagagtgagatggagagaaataatcctgaaaattcgtccaaaatcaattaacaccccatcttctacccacctctctcactccagccttgttcccttcgccctggacccacctggaagcctctctgagtcacttcttctctgtccatattctatttctcctccatccaacacagtgacagccgagagagagagactgagggcgccgaccggcactggacggcgtcgacgcgtggcctcgacgtggcagtgccgaaccaaagcttcacctccacccagctgcgtcgccactcttcacccaccatcccagtgccgatccaaccgagggaggaagctccagctctccctctccacctctctttcgtcgccggccgccaagaagagggacatcgccaaccgtcgtcgagccctctccatctctaactcatactcgttccattctcatctcaccatgccgaacaactttggtttttatcccattccatttcatcttctacagcagcgggaacgctgccatgtcatggtcgctctagagcgcgctctgtgcaccgccgcagcgacatcattgccgttcccgcttatctggaccaagccgggccaagctgtcgcgccagcgttttcgcctcgacctcctctccattttccttcaagaatctagaaggatggtactacgagtgcggagatcggctaccgtcttcttcacctccggtcgccgtcgccattgtcgatttcgcctcctccggtgaaccattgtccgattcttcgcgtatacaccatccctgggacctcactaaccccatgaaaacacatgcatgtcaattcgatgagtggatcgagccgttgccgtcttcccggagctctacaccgtcgccggaccatcttcttcaccgttgccgcagtccagactttcccgcgtctcgttcaaggttcggtgagcacccttgagcccataggattgcattcatgcatttcattcacttagaatcgagcaccaactcaacaagcaatagcagcctaagcacagccgccgctcggactcgccgccggcgttactccgatgtccactgaccgataaaagtagaggaatggaatcgcaatagcatgatcttcattttgtcttttggtcgcaccctcaaacgagccaccgtttgccgctggcaaacttgaaatcgagctcagccatggcttgatctgcttcagctcgaaccagggacctcctcacaagaatttaggttaatgtagggtcctttatgcaaaagctcatgacacacagaacaggcataggactgcggtttgatttcctgaaaccctaggggccttttgcatattggcatgagaccgacaggtggaccccataagtttaaaatctgaaaatgtaaaagataatactaaaagcctttactttttaacagcaaaacacctaaacttgtaaaatccatataaaatcaaatataacttattttgagatgattcaaatttctataggttaacaaaactatgaactttaatgtgataacaataagcttggcaccctcagcacagaccttgtctctaaaatgggtctaagataaatcatacataaagcatacacaaacttataaaatacatacaaagtacatctcaactcattttggagcaaactcagtttctacagatccaccaacttatgttctcctataaagcaaaatgaaatagtatacatactatacatcaaatgcctctaaaactattacctttaaatgactagttttagataagctgaattttagaagttcatataaaattcatcttagatcctttttgaataaacccaagttctgtagaatcaccaaaacatgtccttccaagttataaaataaaattacatacttattgtatgataaaagcctctaaatacttatgtaagtaataaccaatatagagcaaccttaaattgtaaaatttgtagaaaattcatctttagtctaaatgaagtgaaccaaatatctatagaaccagcaaacagtgggcttcaacatagtaaaataaaatatggaaccttctgtacaggttatagctctaaactttaaatttataggataggtgctaatcacatagtattgattgagcaatatgtatatatataaatgtatatagaaatacactctagctataaagaaacccaaataaaacttgttagaccagtgaatacatagatccatccccatccaccaaaacttaaggcacttagctcatataataatttctaggttgatataataaattgctagcatggactagagctcccctagtttataaaatatgaaccatgataataaagaccataagcctatgaactaaggttagattagttaactaaaatactcatttttatacatcactagctagatgaggcaagttctggacctaaacctctaaagccatgaacctatagaacactatacacctataacacgttataacttgtaaaatacataaagaattcatattaactctaaaaattatgaaaccaaatgtgttcatcttaaaaacacatatcttcaccccagcaaacataaacttaataagaatcacctacaacagcaattcacaataattcacaatagtacctaagtaaatcctacactataccgacgaaacttctaaaatttataactctcaaatgaaatgagataaaatagaaattctttcacataaattcattttagaccagtacctatccactgtgcacaaatcatgcattttagagcattttggatttttcacatatttcggtgttttaattgcataacgtgtacattgtatagatgattgcttaaacggtgaagaagtgatttaggtgctgactttttccagttacaaggcaagtcctacctccctctctttgatcactttgaacctatgttttggaggttattgaaaatgtttgtaaatcttgcatgtcgatttgtacactaatcaattaaaattttgttaaacttgttagacaaactcctattatttgcattatcaccttaaccccacatatatccatatccctcatacctaaccttaggaacaatatgactataccatttatatacgagttttggtgacactaggttactataatgcttagccatgcttagaatggtcttccttgtcattatgggctcattacaaacatgaaaattgatttttaaataatctgagcagaactttaatacttgtgattttgataaataaaatggtggaaaatatgaattttaggtttgggcctcaagtggtgcacatatggtgattagttatgtaccgatagggggagtgtgcgcccaaaccgacttaaggacttcactcaatgtcagttcattccgtatacagtacaaccacatatgctagtatgggatagcccaagcttagtaagttgtttatggtttagccttacattctggtaggccggtgtgtatgagttcatataattcagaggagcttcctatttaccccgacgtggtagtttaggtgactaagtgtgtccaatacaacggtattgtgccacgtggtgggttcccgttgtgtccgtcaccacggcgttaagtttaaggcgtgggcccaccacttaacggttctaggccatatatcgagtatggcttaggatggagtaacacgtatcgtgctggtgtaaggctaaatcatgaattttggaaaagctttgttgcgggtaataaatcgggtacttatgtatcgcgtgccatgcttttgcatgattattatttcgtatcatgtgggtaaagtgtacaaactctgcaaagttaaaactaatcgattagccgtgctcacggtcatgagcggcgtgtggatatgtattgagtatagacttgtgtttattctcctgaatgctgaaatttaccttcaaattgtgatgagatttgagaatgatctccttgctgccatggatggcaatgaggtggatatttatacatgattaatgcctactttgatgcccatatgttaagtactagcttgctgaaattttatttgaaagcaaatccgttttgaatgcgttttatgcaaataaaacttgctttatgctaaaaagaaccatactatgccttccttgattatatgccttgcaagtagggtgttaggcttgtcttgatgcttgccagtacattattgactcttgctgttgaattaacttttgcttgcaggttttagacttagcctttgagtgatgcgggtgatcgactgcttcttctaggacttgaacttaatggggtaaacccctagtcggtgtgcttgtggattggaaagacaagcttccgctgttctattatttatttggtcggtcggccaatgtaactaaagtagatgtagtttataatcactttcatcttatttgtgtttgctatgtataatcatgcttgagatgaaagtgtgaatctagtgcacatcctgggaattagattcacatgagtatgagttaagaatatttgagatgttgtagatcttaagccatttttgtcaagtctcctaaatgtgtaacatatctggtcaccgccttcgagtggtttaacgggcacatctcaggctgaagttgactggcaggctaaaggcccaacaatatctccaatattactctctcgaggcgtcggatatttcattatgcttgtttgatgacttgaattatttatttcatctcttnnttataatggaagattcggagagcctacgacagataaaaagaattattgcaattatatgcacgcataatcggataaaaagaattattgcaattatatgcacgcataatctctatccttcaacgctctcttcctctactcactcatttaattcctttatctcctaatttttaactaagtaaagaaatatcaataattagaaagctaaatgattataattcttaaattaaatcataattttaacttatttgaatttttgtttttttacaattaaataaaatatttaagatccatattacccatatttcactctataaaaaatgaaaatatgtcatttaagcatagacactgttcctttgcatggtaaccaaatagaaaaaacacggaccataatacaaaatgaaaataagtattatattaccgtaaatcactggacatcctctgagcacactcaaggcgtcatgtgttacgccttaaataaaaatataactttacaaattggaagaaaaaccatcttagcatcagtttccacttaaataggtagatccattattttcaaccaatagatattcttttaagaaaatcttaagcaaccatgtgttacgtcttaagaattagaaaaaaataacataaaatgtgagaaaaaaatatatcattggtttcacttaaatcatttagataaaatagaaaaaaaatacccctccacttcgccatcccccacacatacgcacaacacggcactattcgccccatcccttctcgtcttgagctctccactcta

SEQ ID NO: 22278 - DNA, 3004 bp, Oryza sativa
ttctgtttatatatattcaaacgcaatgtacaatatatgcccgcgcgaatacgcgggctaccttcctagttattctaatataaagttagttgtcgaacttttaaaaagctcaccaaattttatcataaatgatagatatttctgaagggagggagaagcaaatattttaggggagcactacattttttttttctcgatggtgcggtaacactgggaatacaccacaccaatacaggcgtttttttttcttacagggaaagggaattgtattactcagctaataattactcacggtccaatgtaacaaactaaagcattgtactatttctccattttaataaaattcaggtagggaaactgtcccaagtgatcagtctgaaaaaaagacccggtaaagattcggaccaggctttatttgctagggtgtgacttatactattgctgcttttgtgcatagcgattacggagtacatgtgtatccttatacagtatttatctctaaaatgattttcatcattaagatgatgtcaacaatacagggaaaaacaaaactcatgcgtctagcaagtctagggtaaattaccttaaaagaacaatatttgattacctaactatattgttatcgtagattttttgcaccatttttaaagaacatattttttttttcaaaattgtcttctatgaaactagttagagcactttttctaaaatattccttccgtttcacaatgcaagactttctagtattgcccacactcataaggccacactcatccttataagtgtgggcaatgctagaaagtcttgcattgtgaaacagatatttgtttagtttatttcttaaaatagttggtttatccgagataatcgatggtaataatttagcggacaatatgtttcaaacagggtaataggattacgacgagagtgtacggcagtgcaattgttgacaaaacaataatttgtgagtaatagataaaactaccactagcaaaacaaagatatttagtacatcccggttttggggataaagcctgaagataacaacaacttgtagaaactaaatgctttccaacacaaacctacaaaaataaatgcaatggtattattaataatcgataaaagggaaaatagtaaacgtgaatagtcacgtgtaacatgtataaacagagggaaaaaaaaaccacacaaactcgggaattcatagcacaaaaatagcgtcctccggagaggaaaaacaaacaaacaagtcaaaaaaaagggaaaaaaagagcgaaaagaaattaaaacaggagcccgtgtgcgtcgcgaagcattcgccattcggcaccccgcgaagcgaccatggccatccctcccctcgccgtcagcggggtcgccgtcgccaccctcgccgtcctcggcctcgccgtcttcgcctgccggcggtggcggcggggcgcgtcccccgcgcccccacctcccgcttcctcccaggtcggaccccccggaatccctcgattatttttttttcaccaatttatttgatcgccgtatgaaatggaaacattgtcgagtggtgatttgtactttcttgtggtggtggtggatcttggtgatgttcgttacgagggtactgtttcacgagcgatttgatttttgaggtccttggattcgtccatggcgttctctcgttagaatatactacaccaacacagaaccatgagcgaggggaataccgtggcctgctcccagccctagattgtagctgctgccttgcagtgaatgttgcattggtggagattcggcggtagcttttgttttctgttctgatatttaatccagcatgcatatttgattgatgaatttggtgcgtttgttaatttggtcatcgacaaggcaaattgcagcttgataggaggagggggggattattgtcgtattgcccaagctgcaatgttcttagatgcaactggattactggacataagattgttatctttgcttctttaagcttcatttccgactcttggtttgtcaaaagcataaacagtaaatacagcccgatgaaatggatgtgattttctttactttagtcaatgtttttccatttttgtacttcaatcatttttcatgatcttttacttatattatactttgctgttttgtgttaaatgatacattgtgtcccatagtactctcaatcttaaggaaatttggtcggcctaatctttggccggcccggcaagatacgttgcgtcccatatggttggatatgggtagcaaccacttttccttttcctctattaagcttcctggtccactggaacaactggcactaagccaatgaagcccccactgtcttacttttctgctaagagcacggaatgctatgtttaatctaagcgcacttaatttgtttttagaagatatacaagatttttctgtcgtaattcattcacatacgaatgttatcacaaactgtaattaataaaaccatttacagcaagtctgttttatctaatttatattacttgttgcttgcaggatgatgatattaacatgcctctcatatctgacaatttggatgactattcagtctcgagcaatagtagtactgtcgatgaatcaggaattcggattgataggattatcacttcacctaagactcatggcattgttggaaaaggggcaacctatcccactgaatctcatgttattgaaggtgcgtatacatttacacccaaactttcatcattatgttatacagcatcagtcttgttttcatttcctcttttagtaatattcatcttatttactaacaatcgtcataaaattacaaaaataatcaattctttggtttgtgtaggagaaactcatgtaattgatgttacaaacagtaaaacggaagagctctatttgggaaatacgcttaagcgtccagctgtggcaaatgggccaacacctgatgtgaagcacataagaagggattctggagagagtaatcacaatggcaccattcctg

SEQ ID NO: 22279 - DNA, 7081 bp, Oryza sativa
tccaagtcatttggtgttaaaggactcagaggtgtcaggaaagcatgcacagattgactggaatgcaaatgtaagttgtgaagatctaagctgatctaaaaaaaaaattcatatgacctatgtacatacctgcaaatatcttaagccttcttacattcccatccaataaaattattattactcttttattgcagaaactcaaatgggaaattgtggatatgggtagtctaaatggaacatttttgaattcccggtcagttaatcatcctgatgttggatctaggcgttggggtgagcctgctgaacttgcagatggtgatattataacacttgggagttcatcaaaagtatctgtaagttataaccgcttttgtttttcagtgtgtcctttcaagtgtactgaagatttttataactaatttatagtagaattggtcttttattgcttatggtccagcattattattcatctgatggttaatgcttttatgttcacatatcattctgcttgaaatgaaacccctatgcatttttttttcatataatccaactatacctaattcaaattggcaaacatgttaccacactcggcttttctgttttcttgctagctgttgacatttcagttcatatgctggcctatttggttccacatgtctgccatgccatagaaactggagcatatataaaaaagaaaaaaaaactcttcaacatatgtttgaaatttggttgtatctatctttgaagaaagcaattccctgatagcgctaccgtgctaggtccaaattgagctacaaaaccaacaacctgtaggagttggtatagcatctgatccaatgacagcccgtcgaactgggaagaaacttcacatggaggatgtcagctgctgccagtatcctcttatcggtgtggaaaaggtatgtgaatgattagtttttgtgcaaatacttgagtggtttctgatattgatttttacacagtttgggctatttggcatattcgatggccatggaggggatggtgctgcaatagctgccagcaggtaagctatttctgcctatttgtttgatcaagtgcaaatcataatgttatcctagaatttggacattcgtgtattaattactataaccgttcttgattttgagtttgatatgattatatacgtgttgaactgatgaccccctttgttgcctaggattcttccacagaacattgcaaacattttgtctcaacaggaaacaaaagaaagagttctttcatgccatagtgcttcagatgttcttagacatgcctttgcattgactgaagctgcactccatcatcagtatgaggttttccttttatctggatttctcgtgtactatattttttgaactatgttgcttaatttcttgtctggtagtttaataacttgattaaataaatatcatatgtttgttacaaggtttatctatacatttggttggtatagaatttgttggacgaatgttgctacattgtatgtttgttaacttttttgatcaaatgatgtgctactgcaatttcttgtcctttacttgcccctggatgtgtaaaattcatcacttgctgggtttctagatttaaaagtttagttctgattcttaatttggtttctgaaatgtatacatgaagcgaagtctcttgcaatttaaggttcccatgattgccaggaacatatttaccgaaattatgagttgagtctcccattaaaactcctagactccagatagtctttctaaggctatatgctgtacatgaagtgtagtgggtccttggaatcctctgcttcttgaattgccaccttttcagtaggctaaccatgtttttctatcttttacagggctgcacagcaactatccttctgatttggttcgaccagaacgaagattgcttcgcccaatgtgctaatcttggtgactcagcttgtattatgaggtaattagcatcttttctgttctcgaagacactgtactatttggttttctgtagcacttgcttcctcgcaaagaaaaaaaaacccactagcagtcacttgctagtataatgtgaaatacaccataattgaaatttaaatattgccaccctattgtatattaaactgctatacaatagcaataaaaaatgatttataaggtcctctttcatcaagctttgtaatacagcaataatttataaattgttgccagtgtcaacggggaaataattacaatgaccgaggatcatcgagtagtcagtacaacagaacgagcccggatggcaaattcaggacaacccctgaaagacggtgaaagccgtatatgtggtatatgctatattgctatcttacatcagctgcagacttgaacaataatgatgacacgatctcgctgtttatttccacaggactaaatcttggcaggatgcttggggacaagtttttaaaggaacaagattcacggttcagctctgaaccatatgtgagccaggcagttcgcatgacaaaagcatgcttagcctctgcccttattgctaggtatcaaaactccccatctatgatggtcatgcttgctaatgtaatgcattactcatacatttcataacgtgcgcttgtttgctcctttgcagcgacgggctatgggatgttattagcgctaacagggcagcgcagcttgtccttgaggtaactcatcgatcggcttcaacctcatggttattaagtcgtggtgtgctgatcttttatctcatttttcagggtaagcagaagtacagcgagcagaaaacttcagcagaaaagtagcacatcatgtgttaagtgaagctaggaaattgcgaaccaaggacaacacatcagtaatatttgtagacctggacactctgagaagtgatccctgatcctgaatccccaattgcttttgtcaggtccggagatcgtcctacctgctgctcgaacagttgaacaacactatttcttttgtttcactggtagttaatatcctttgtcaaagttgagccaggtgctccggtgttgcagaggatgaatgctacagttctccttgtctgcaaatacccagggagccccttgtgcggttatgcctgtaaattgtgagtgaattggttaaaagaaatgtttatgaactttaaattctggagttccatcacatggttggtcaggaaaagaatctcttttgagcttatcctgtgtaatatgcagaaataccaaatcgcatgcagccaaaaccagaatagcaagactgcatctcctatctatatataccattgtagattgtgctcagtttacaggttccgaatgagtggcaaaatttacagggaacatggacactgttttggcaaaacttgtacatcactatgatatatatccgttgcaaatctgcaatctgtcctcatcacctacacatacaacaattggtactcgagatacagagctcagcattacaatctgtgccatcacctacaggagatcactgatattgcttgacaatccaccatatctcgtcattgcaatctgtttcatcacctaataagtacaagtagtggtcctccagagaccgatcctgtggcagcacatcttgctctcttgacacatgcgaagtggactccttaagtctctgaacacgcagcctgctatatgcgtcaatgttcagatgtgagaccaagaagagctctacctcagcgacaaaccgctccgtttggccaaggaggaacggcctggcagcttccatgagcaagctcttgaattcttccctcctcttctctggtggagccatcttcgaggcatgccccttctcttgccttttcatgaaagactcgatcacaccatggatgtggtagataatagcgtcaacattttcatcctgcaaaacccagtattacaatacattgcagcaagcaacacgatagcagcacgacgattatataacatcgtagaataatcacaaattctcaactctctacgacacttgaaagaataatagaaaccatcatcatgctcccaagtcatgtgcacttgagtgcgtaaatcaaatccaatttgtactaaactataagagtaggtattattcccaagtgtgtgtttcagctatgatccatgagtaatgggtaaaatgagattgtcagataatgcagataagaagagaagccctaattacacacagataagaagataatgcaagtgcgacccttttaagctatggaataaccgtgtgacaatatgcagtactgtatgtatgtacccgtgtaagagcctgtatttcctgtcttagccaggtttgaagccaaatgttcttgcgaagatacttgcgttgcttccagaattgctgaacgctggaagtattgcctataatatctgttcagttgagcacacgtcagtcatataacactagattcatagatagatatctggaacaggttctaaaagtgtgagcacggacataactaaaaaccaacactatacctcgtatactatagaattgtgtaatcaagtcgtgtgcatctgaaagatgtctgcacgaggaggaaaatgagcttaatatacttattgaaacatgtaacaacaatatttaatttacaatgagaagagtggcatgcaaatggtctccatcgcagaaataaaagaaaaatgtctgctcgttaacattaactacaaaaagcgcagcactgcacaaccagatggagggaaggagataactggacctttttctggggtcctgatttatgtagtgccgctcaaatgattcaccattaaaaccatgtataatagacacattcacggtctgcaaatgtcacaagggacatataatcaggattcaggacctcagggcacagtctcaggtgaacaaaaaatttgccgggcggtgaacaaaaaaggggtcaaatttatagatatagttgactgcatcatcaatagataaatgtagcagcaccaaaaagtaatggctggtatggtgtgttctccacatttaagctttcctagaaaaacacccaaagctagcaaattaaacaatattcaatagtggcgtttcatcacgttcaaaagcgtttttttcaatcaacatatgaatggggcataggttcatatggtttctgtcagaattcacttgaagatgataatctatcaagctaagagaaatgtggtgagaatggtatcagacaaacagaatgtcctgttcctttttggaataactattggaaccagagaaaatgagttcaccttgcaaaggggacattgcactgatgataaaggttcggcatgcttggtcgatacaatctttacccactggcatatgcacttgtaacaaaaagaatctgcacaaacattatgactctaagaaaatgaacttgaacagatgaaaggcaagtggtgatttcaaaatacagtagatttctgtcctgattccagcaatgtttctcttgatgaacaaaactgaagcaaattagttagaggccatcaagcaatttcgcagaaacttcacatcttttgccctctacttaagagtcgttcaagattctatccaagataagaattcttacagaattgaagagcttacacataattaattattaaagaccctatgcggagcaatcttaagatccgaaataaaggataattagagagattctgagaggagagactaacggaagcaggtgtcgaggtacgcctcgtctaggaaggaatcgaggcagatggggcaagcacaagcagcgctcgccgccgccatctccccctccgccgtgttgccgccgctaccaccggaggaggatgcggcggagggagaggtcgccgccgccgccatctctgtccggagaagccccccgggtgcgaactagatgcgatctggaccgtcggttaccgatcagagatcagacggctgggctgatccgaccagtgggcccacatgtaagccagcagcttagcagtagttcgcttcgagttaattaacgaaatctcaagggatcattacgcaaatctccctccttaattacggactgtcggccctcgtaatcacgcgctaatccgtcgttaccgcctataaaaccaccacgtcggacgtcgccacttccgcggcgcaaacagtacacgctctcctcctcctcctcgctgtctcccactcccatcccaatggcggcggcggcggaggacgtggagttcgtcgactacgaccgcgacgaggaggaggaggaggacgccatggacgaggacgatcggggcggtggccgcggcgggcgcgcgctacccgtaccccacatcgtctcccagggcgtgatgcgctcgcgcggccgcctcctcggccgcagcacctccgtgctcgcctccaaccgcgaccgcttcgactccctcgccgatgccggcaaccccggccacggcccacagcgctgtgagatctccctttgtacttctattttttttttgggcgtgagctcgagtttgaacttctcggtagggttttgtgcgctatttttggtcggtttgcgtgtgatttaccagttagtgtcgcgcataatccgcgagggatttggtgagctaggatttgtttggtgatatttggctagggtttagggtttttggtacggctgcgcttgcggcttgccgattgccactcgattgcgtgcgcactcctgtttgtggtgcaggcttttgattttattcaggggaattggagccatgtgatgcttaagctaacgatccaaactaaatcgctgccggtggacagttatatgctgatatggttgtgggaaaaaaaaacaaatgtataattgcaattgatactgattttgtggtcctgaatgctgagaaccacatcaggttctacgctgattgagtgagtttccatgctgacaagtgacaactactaccatcagtagaatgattgtataattttgcacgctgtgatctttcgttcttctgtaggtttcgtagttgtgtgcctttggcaggcatgccttttctccccaatgtccttgatggcgttggaggaaattagaccattgtattgaaagttacttgggacaaaaaaaattcattgcagcgaatgcatgacatcaattagtttgagcagcaccatga

SEQ ID NO: 22280 - DNA, 1890 bp, Oryza sativa
  unsure (1)..(1890): unsure at all n locations
actagctcctactgtacaggccgaagcagtgaggaaaatcctgggtattgatattgagaagaaaaaagaggagaggaaacagaaagagcgggatgagaaggtactatgccataagtttttattgttgctacatttctgttcatggtacagtagactcattttacccttcctctcacctttttttccaggaaaagcaagaaaaaacagaagaatatagaaggaactgcatccaatgtgtcatggggccagaaggaactgttgtcacatttcctgataagatgggcctccctagcatatttgactccaagcctatcaggttacatatagtaccccatctgtgcatcttttaagtttttccaagtttacgtcaagcatagaatccatgtattgatccattttgaagttatgcatttacattcaactccatttgctttatccatcttcccagctatccacctccaagggagaaatgtgcaggcccttcatgcacaaatccatacaagtaccgggactcgaagacgaagcttccgctctgcagcctgcagtgctacaaggctgtccagggaagctctgaggctgcccagggaagctctgagacgctaacatgctgatctcagaaattaaaggatggtggtgaggcaatcgtgactgttttgtggaactggagaattgtgctagttccatttgccacctttgctgcttgttcttgtgttgccaatgttaccttttgccattcctaacaatcaaccaaccaacagagggggtgtcgcctgctgctggccatccttttgactcgttgtggatgcagctgcagtgttctcgattaaggattaatttaggtggtagtcagatgaatgagagtgatgtatacattagttgtacagtgatcatcctactcgtcatcgttggtcatgaaatcatcttgaaaattgtctctctgtttgcactttgcagcagttggctattacaaaccagttaacaagagtggcagcatcaggagttcagaggtcacctgttctgctctgctcttcagaagcaagttgccggcttgagactggtaacaattttgctgggccaaactgagaaatagaagatgggctgggccttgcacatgaacatgcttggttgctactaatttgaccatagcattaggacatacaagtacatgctgctactatagcaaaagaaacaaaaatgcatggatcaatgaactggtaacaggtcataccaatcgtacgataatgcactagttgcaggcactccgccaaagctgccaatgcaatcgtgttgaccagaaaaagataaacacgtcctgtacgttcgattcgtttggatatgatcgcactatgcgaacgtgttgacctctccaatccattccgtttcacttccatcatgtaatcacaagaggataaccaaaagtgatgggggttttgtatgcttgcttactactccaagtcaactagcttttgagtggcccaaaactctcaaaacgaattgacctctgcctttactgttactgcaactcactctctctcatcatcatcgtttgttctacgacggataagctgtgaaaaaaaataaacaaataacttaaaaatgatttaaatgtaaaacttttatctttatgtttttagctatttaaaagctgatgttgaaaataaactacgattagaaaaaacctcaaaatcaactttacaattatgttacaaaacttaaattttagctatggttgagaagccaacatacaatggagctgcttctgtagccactagtcctgaccnnnnnnnnnnnnnnnnnnnnnnntagctcgaaagtatatcaggagagagagagaagctactcgatctacctgtcttgcaaaagctggggcatatattttcagctgaaaag

SEQ ID NO: 22281 - DNA, 7421 bp, Oryza sativa
agttcaaacaatgagagccacgtcactagatttttcagttcatgcatgtagttatacgattctaaaaaaaaaaatacatgctactcaacaccatagtgagatatagatttatcaatggtttaggttttatctcttccaaaacgtaaaagtagtaggacggcatatatatatatgaacaatggcaccatgatggatatatacccattaaacctttttgaactgaagaaaggagtagtacttgtctaccacgctctgtttcgtgcatcgtgttatccagcaaaagtagctgtagatcagtacatcatcttgccgggaaaagtgactttttatttttatttttgcaacaagcgtgtttttttttaccactgacaacaatggtactctctcctacagtactagggagaatgtctgtctcttcttttgagcatggcgagatcgaatgaatgtgatcagtgatgagagccacatacacaaacacacatgctgctgatgaagtgatcgatgagcagctaagcacacacgatccaaggacagatcagcagctttatcataatggtagcagctctggacattcatactccaaaaatccctttcccttttcccctgtctttttgctgcaggccggccagcatatgaatgatcaggagaggcaaggagacatggcaaagcattggcagcagtagactctctggagatctctcctccttgctagtacttgtgtagtactccctctgtttcataatagttatcgttctagattgttaaggatagattaaaatttaatttaaaaattataatacctcttattgaataatgcatgatggaaagtggaatggttattgtggacaaagtgagaacttttggatagaaagtgattgatgtgataactagcattttacaatgacaagtattttgagatgaaatttgaatcctaaagagacgagtattttgggacgaatgcattggtagtactccctcggtccctccatcccataatataagggataatgggtggatatgatcacacattccagtacaattaatctgggcaaatgatctgtccaaatttatcacatccacctattatcttttatattatagaacggagggagtagcattctgcgaagacgacccatgcacatattgctcaccttttgcccaaacacacatgacacaaacacacatgccgtccatgagaaattgagaatgatcgtcgtcgtcttcctcggttgggtcgcagtggtaagtgctaatcatgggctctcgagcgcgcatgtcaaaagcgaacctctcccatcctcattgcctccagcatctcgatcacctcgcttttccctgtttcatctccaatgagtaattttgcagcactgcattctggctgccgccgccgacctagatgccattcttaatttactgttaatttcagttttctttcagagaatgtttttgtatcgaatgaaatgcgtcacattttttaattacctaattaaagccgcatttgagatagattaacaacctgattattaacgcagattatttactgcgttatagagataattaaatattttatgatgaatactccctccgtttcgaaatgtttgacaccgttgactttttagcacatgtttgaccgttcgtcttattcaaaaacttttatgaaatatgtaaaattatatatatacataaaagtatatttaacaataaatcaaatgataggaaaagaattaataattacttaaattttttgaataagatgaacggtcaaacatttttaaaaaagtcaacagcgtcaaacattttgtgatgagggagtaccagaaaccatgcaatagagaactgagatttattttttttaaaaaaaaacatactagtatacttatagggtagggtttgcgtgcgtgcgttcataggtgagtgtgtgttgtgagtgtctgcattgtactgtgtaatttttttaaaaaaatatatctcttgaacatatacatgcacatcttaattatacaagcaccctatgagaaactagacggacatatcttgatcgtttaacggaatagccaaattaagacaacacgatgttagcatgccacctaccactataactagcctaaataaaaacgtttatgctaaatcatagaatcaaatccgctgaatatgtttcatcgtaagaaacctaaccacatgagcttatcctagggaccgtgatttcaatctctcttggatagtggttagatataagagcacaaagctgtcacaaagatattttgggatcagctcatggatgtcaatttggtgagaaagatatcgaagtgctcacttggagattgcctacagcgacatgtaaagagttgccagtgctgctgcatttttggaaacggaggaatatatatgccggaagatgaaagagggcaattgggtgtcattatcatggaatcactattgcaatgccctagaattgtgagagacgtccatgagttgggtgcttggttgactacatgacctatcatctattcatgccgttttgggtaaataagtaacaaaaaccttatctgcatagtctctccgtaccataaaaaataaatctaaaatcggatgtaacatattctaataatacgaatctgggcatatatatgtctagattcatagtgctaagatgtgtcacatccgatattatgttggttttttatgggacgaagggagtatatggatatgattctataaattataattaaaaaaagtaacaaagacatgtacggtaaacgggtaatgagcactataattatactaacatgttgataggataatctataatttttatttaaaaaaagttggacatttttactggcaaccatgttactccattcatttcagaatgtaagatgttttgattttatcctaagtcaaatatcttccgatttgactaaatttattaaaaggaaacatgcaacatgtttaacaccaaataaatatgttataaaaaatatgtttaatggtgaatttaataaaattaatttggcattgtagatattactatatttttctataaattttgttaaacttaattgtagataaaactatatttttctataggacaaaaccatgttacattctaaaatggacggagtttttctttttttatatattttctgcttctttgaacaaactaaacctatgagtaagcacaataatactttacaatgaagcgtattaagaattccttagccaaattatttcaataatatataagttattccttctcactatgatgaggagaacaaaattaagtatatactccaaagaaaaagaagggtagaaaaaattagaagaaaacaacacataaaagaaaaaggagggtacaaatttctgccgaaatgaaacacagagcattcaaaaaatatttttatggcaagtttaatgtaaaaaaaagttcctgttgattatagttaatatcatgccctggggtgagaatgagtaatcatcattgtagcaggcacgatgcgctgctctacttggtggcctgtgcaattatgttcctcaatgagcttgcctcttcctttgctgcttccaccaagttgtcctgcaaacacaccagtttatattccacaatgtcatcatagatcagccaaatgctcaccattgatcagtagtgcatttcacatgagcacatgaccatgcttgtatatcactttttgttgttactcctagaaactcagataaaaagtttcagaaagaaaaggaattcagataagttcagtggaaccaaaagtttcagaaagaaaaggaattcagataagttcagtggaaccaaaaggactatcacaaggaattcatttcttgtcaattcattaggatgtgtatacagtctgtcaaggtagaatactctacatattcctcctttttgtgtgtgtttgttctctaactactagtccctgtttgtggaaggtacctatgggagttgaatatctgaattggttcgtgtgaaattcctacattttgaatgtggcctatctccatttcaattgatacaatacctgtgtagtgatcaggcgtagtactgctttcttgttcgattcttgaagctcaccggcaatcagaacctcatccaatataaagtatgcctgtaaatatagacagaagcacagaaaagacagcaggtttagcaatttgacaggcatggtcaatagatataagtaatcatttgaacaaacgaagtaggtaccttgtggaagttgaatatcaggtcaagctcgcagacctgcaacatggcaaacacagaagaatgtagaataagcaaagaagtttcagaatgcctggtagcacaacaaattgggagaatatcatgttaaaggtgtttctgtgtgagcttacattgccaaaatatcggtccaatatctcaacaaaatgatggatgatttgaagagtctccagttcattatcagcagcatcaatgcacatgcagaagtaaaggcttgcatacctgcagacggtgcgaaacagcttgatgcaatcagaaatatcaaaaatatttctttacagatgaactgacatttgcatgtgatttagcactttagctgctaacagtgctcgccaacaatcacataataacattgcaggtataatcacaactcgggagtaccttttgtatacaactctgtatccgtgccaatcgacaaaattgcacatctttggacctcttgtcaggacgagcgtacttacttctttgataaccttatcatcgaaaataaattatcttgctgatatttttacccagcggaaagaatgatggattaggattacagtaaacatgtactgatatgtgttaacctgtcatttcttaccttggatctttccttctgaggatatggattgtaccatttggtcagcctcaccttcccttgtctgctgatgaggagcacaaaatgtatctgacaacacaacaaatggcgatgtcatatggaatcctcttgtctgctctccagcatcaaaagaatcatcaaaaactaatgctgaaccaaagttcaattcgaggatcacaccactactaatgatgatatggtgcacatcaagacaagctaatggtatgataatgttatcaaggcaagctaatggtatggccacggatatatgatcccaagttcccagctgcatccaactgtacggcatttgtttatgtaatcccaaatcatgcaatctgacgcacatttgggcgaaattctagccctagcccaaatcaatctaactgtaataattcaggaatgggctacggatcatgaacgagtggacgaacttccctcacattaaattgccatcgaaaactgttgggaaaaaaatttcaggaacagaagaaggaaaaaaacagagagagaccattgatattcgagaatagagacgagaagaatcaaccaaatgtaggagggaagagaatcggatcacgaccggattaccatgacgagcgacggcggtggcgctggttagctccggtttcgaaggctcgccggcggtggagacgatctcggccgagaggagatttttttttcccctgagagagagagatgcgtagtagaggacagaggagttgaggtcggatgatactagtcatcgggcccccgattattcttttgcatgggttgccttttctttcttccgtgcatacgtgcatgccgtgtaaccaatccctctctctcggtttgttctctattctcttctcatacatgcaactattttcctgggttctctcttctctctctatctctagtactctcaagctttaaatatatattttttaaaataattatccaatctttaattacatcattatatttattatataattaaatgatatctcatataattatattttgataaaaaatatatacgattatatttctacttgaaacaattttatataacacatgaagcatgaacaacaccaaatattcgctaaaacatctaatgaacatgacgctaagtttgcaaagaactaatgaaatatcagaaaatatttattgaaaacatccagatgacaccatgcacaacattgaaaaaaaatacatattgcaatattaaaaactaaaaatgtacaacatagtttggttacggttgaaacattaaatttcaatggttgaaacatatatatttttattagaatataatcatacgatatgttgttgtaaaaatttaattgtaacaaatattacaatgtaaacgtaatataaattggataagtagtttagaaaaaaattgtttcaaacgttaaaaataaagtagataagaggagcgaaaatcttctctatgtagtggagcatgacgttggagggctccatataacgctgcatggtcgaccgtccgatcagaagtagatcaagtaaatctcggttggggtctccgcgaactgtttcgttttatttctctctgttttttcctttttctattttgggctcccgcatcttgggggcccacggcccacgaacgggatctgcatttcgtcccaatacttatacaattacaaaaataaaaaagttattttccgcacggattctactactgctttcacaattgggacccatatgcctgtcactacatgcaagtctgcaagactgcaactgcagtgcattatgcatgtacgtaaacagcatgaaacagatcactgttgacaagaaattaaaaacactataatcgatgccttccaattttgatggcatgatagatatgcgaatcactcgatattgcaagtgagaggtgtgttttctcaggtatccgtatttacaaattacaacagacaacaaacagaaacattctctaccctgaatatcatgatttttttttccgggccaagtgtacgaatgagaaaaactgttgcatttacaacaatatcatgatcttcacgtcttcagaaacgaacaacactccccagaataacatgatcttcagaaatgaacaacattccccagtgaaagagacagtatggatatatttcaagtgaaacatgacctggcatatttcaagttagcagtcaaccatatatttctcgagatgctttgacatcagtcgccttttggtatttggaaagagaaaaatggatatatggcactccacactccaaaggttgccagcgataagcatcagcatgagcgcaccacagatgagtcccattatcacacatgctcttgaaaactgttgcagaaagaggatactggatccctggtaagtatgtatcagtaagaattggtcagtttcttatgtgatggtagctaagcaacagatctgaatcatcaaatttcttggctcatgtcaaatgcttgcggttgttggaatgatggcatcttgattttgcggaatgaggcacatcgatctttcttcagaggaatcagtttaccagaatatagactgccaatgacccagctcgccggctgcaaagaaaattc

SEQ ID NO: 22282 - DNA, 2557 bp, Oryza sativa
atgcttccttgtaccaacatttgtctgcacagcaactactccaccttcctggaaagaaaatttacattgtaatgtagcagataagtgaagtttatttgaaacaaaacattcgatgataaagcatttgattggcaacaaagataccttattgtgacttgctaaagaatcagatacatggtcattagtatcagcatcatggctgttccatctaatattttgcttctcaggagagctctctaatacgtgagcttctgcatcacaagggtgagaactagcgtgagagatttcctgtttcaggccacttatgttctgaccttgagatgcacaagcagtttgaacaagagataggccaacatcttgaaatgcatcgagcatttcagtctcatctaattctgaaagcctatcagtctcatccagatcactttcagaggatccacaagaatgttctagctcctcaagaaaacactgtttccgagcttctttcacatgtagagcagcttctaaggaagctgtagctagtttatcagactgagaatcaagaagtatcatttccgcaataaccatggcttcagaggcagcgattgatagttcaactgcatcattcacatccgcgctacggagtttccgaacatcaacctttcgtccagacagttgctgtcttctatgtccttttgaatcacatgttttattgatttcctcgctagacattttacaaatttctcgaaggtctttggcttccgattgattttgcggcactgtcttgatctcttgtgcttggtcatcaatacaaaagccacctaacacatctttgcatgtaacagagtttagaccattggcttgagttgaggatagttttgaagtactttctgaagaaagatgcagagagaaaggcactacctgtagagtgtagagagcaaatattcaatgtgttatgacttaatataagaataagaatatttgacaatgaatacaattacacaaaaggatgtctaacagcatgacacagttacaatattcaggagacattagcatagtacattgaatgcaaagatgtatatacagtatatatggctacatgcatcatttgaacaaattaggttaatgacaggaaacaatttgtaacttctgtccttgcaaaggaaacatgagttttactagtttcttagtagacaaccttgttgcttacaattaagctcttctagaacactttcatgtccatggtgatttgcatccagaatttaggcagtcccagtaaggaatatcattcctaaaacttacattgccattgctaggagtagttccagtaggcgtgccctcatcccccgacaagtgcaagctaaacccactgcaactagcagcattcaccatggtgttcagacaactatgttgctcttgtgcagggcctccgataaacgcgcaattctgcaactcaagaaagaacatcagtcattggatcatagccagctgcacaccaagaaacatgggtatatacatcagatattcagatcggattcagcacatctcgtttcctactaattattattggcttgtggtgcccaggcaagatggcattactaaaatagaaacaaagcatgaactaaaaccccaccagattgttgctactaaccaaagagaaaaaggacctcaccacacaagacggcgacgaaacggcggcgctgtccttcccgtgctcgccaaccgccagcggccgatgcggctgtagccattgagggagaaaggcaatgtcctgaacaaatcaacgcgactccactaggttattcgaagaggaggaggagaaggaagcatcccacccagttcgttccttatacagaccaacgcactcagccgctccgaccacaaatgcagcggcgcgcgcgcgagaccgggggagggagaatgggggagagctgggaggaggggcgcggttacctcggagaagcgcggggagtggtagccgcaggccgacatggcggcgggaagtcgccggctcgccgccgccgccgccgccacggggaggaggggatgggggcgcgacgctcttcctccccctctttcttttgtttttctttaatttatttaatccgaaaattaaggattcgcgccagaaatcacagcgaaggcgggcagccgggcatttcggggagggattccacagcgctggctgacaggtgggccccattgttgtaagttgtcgcatccgaacttcttacggtgcaggtgcaaatttatcgaccgtctgttctatttgaaattttgtgattggaattctttttttatttaataggcgataaaacataaatagtaatttatgcgtgacttattttttaaatttgttttataaatttttcaaataagacgaacgattaaattttgggcacataaacccgtaactgcgtttaaaatgggccagagagagcagtttactaggtctaccatttttaaccacacaaggaaatttggcaatttctttcttcacataaattatgaatgttagtattacttagaactgtacgcaataacaccatatttacatggccaattatttagacagaagagg

SEQ ID NO: 22283 - DNA, 841 bp, Oryza sativa
taatagtatttacctgtagagatcgagaaagagaggtttatatcaggagattgggcacaaacatttggcagtattttggtgcttagtgattgatgtacatggaagatatctctttgtgcgatggcaacattacaaggttgctagtcaaaaataggtggcaaattagacttatgatcttaactcataagtaatggtgtaataagatgcagaaaagaaagataatggtattcctacggcagatggtgtatatgcctctaattccaaatgtaggtcattttagttttttcaactcttttctaaatatatgttggtttgaaacttctgcgtgtttttttatttcttccatgtttgtcctcacaagatcgatagtacccctctgataaataaatagatccctttttttccaatgtagtataaacgaagggcaacaaagttattcaagctattttcttaattcatgtgtgcaaatctataacaacttatatttgaaacgaaggctactaattcaagagatatcacgccgagagtaccttgggcgacccttgcaatttccttggcaaatcctgtggatacaaacttgttctcggtatcaataacaagaagtgaaattccagccttgtatattttgccagccacctcaagtatctcatccttggaaaagataaatatatcgtatcagctttagagtgattgatacatgcttttaagaatgcaacttggaagtagtttacgtacatcatatcagcttcagagtgatggtcacaggtttccagtttaaataaatacttttcatatcattactaccatgtgatattagatacgagttgtacctttaattctt

SEQ ID NO: 22284 - DNA, 4130 bp, Oryza sativa
cttgtcttgtcacgatctttctctctcctcagtttctggtatggtgcagctgctcgaagtgtggcatcaacagctaacctccttattggaccctacaacacaattaactgttcaaattggagcctacttgtgataaaggtgccaagcaataggatgggaacggcagaatacaaggcaacacagcagtatatgactattgtttgatagtatatcagtaaatgacagaacacagcagaaagcatcagaggaaaataggcaaaatgattatgcacacatttctagataggagaaactctaaaacactacaggcattgaattgagaggaaacaaggatctggattcaggaatcttggtacaataaagtgattaagaagtttaccttgggaagcatagaacctatgtatcgtcccctatcagatgagaatatgagattctttgctcgtccagctttccctcgccgtctttgagcttgctgagcaaagaaaaggagcttctcatctactataccacttcagcatcaaaaatgaactcctcaggtatctgctggtcctgctgttcattttcttcatcatcgtcctgtccaagagtacagctaatgagctacgagaaaacaaaatgaataagttagtcaaatcgtatatgtattaacctcttggtcctcttcctcgtcttcatcttgatcttcttgagaatcttgatcttgtggagggggtggcggtgggggtggaggaggttgttggtcttgctgctcctgtgggttatcagataggattgatcgaggtagaataactagctctacctgcaagaaggtgcacacatgtcaaatgtcttaactttattcagaatatactgacatcattacattaatgcaaacagccagcatggcagaagaaaattgtgagccatgcgagggcaaaatttattttgctgtgacttttattacgtgcaagtttgcagctttctattttgttcttaacaacaaatcatgatgcatgtttccttcggtacatttcagtaaagagatgaaaaggaatagttgtaaacaggaaattacagggggtgtcttactgtattaaataatgaagaattcaaaggcataagtatacttaacagctttcttaaggtcatccacatatactttttcacgcccttccatagcagcaagacattttgccactcgagcagcatacagctcagcccggtgcccctgcaaatgagtgtcagttttatttacatgagaacacagccactttttgaattacattaaccacaaaaaagtagcatcagtgtctcaaaaaccatgattgcttcaggtattacattaaccacatggtgcacagcggacaggtataatatctagacaagcagaaaataatgcaaagccacatcgatttcagggcatgataaacacaactaaaatgaaatcaatggttacagcagacagtttttagccacctcgccacatgttatgaccagaatgcatgatcatggggtacagactacagaccattacaaggacagtgcaatattccaatcaagctccttactcagcttaagccaaacagagctaaaaaattctttcactgcaaaataaactaacctgacagccaccgcgtatagcttccatgacaagatatttgagctgctctgtgctgattgcaacatctttcagatattctcttgccaaaattatctgttagaccatgtattaccacctgtgagatgaacagtgcataatattgttttcaactaaacctccatcgttgctagttaaagtcgctcatgattttccatagtcttcaatgtgggactttggccacgttattttttcaatactacatactagtaaaataatagaagtcataaactgtgaaagtattgtccaacaaaaatagaatggcattattttgtgtgccatcatataccttttatacgtattaaagattgatgttttgaatgttggaccagataaaatatgttaagtggcagaacaacacagggaatataatgtaaatgtgggtacatgcagttaattcagcatgagtggatgacgttgggatctcaaaatacagaaccatgaatagcgtatatactttcgactatgaaggcaagggaaaaatcatatgtaaatggcacaagttgtaattaggtgagaaagatccaaaaatcaatgtatcaacttgtctgatgtgaccatttgtttatgaagcatattaatgaatccacatattttgtgatactgattgattagatatcgctgttctgaagaaagctatttgtgtgcaatacaaaaaaaaaagcaaaagctaaatagtttctacaccctattctagttcaataaaggaggtactctatcttacaggtttacatccctagtttaacagtatcggtggtacctgggtttttgcaacctcagtttcttcttccaccattttaaaaacctctttgctggactcttgaaattgtgttgcaatatccacagctgccacacgatcatcaaaactcattggcagatcagcgctgcaacaaaacaacaatatggaatgagcaatctgtggtatttcataaatgcattgagagttttcttatgttctccacaccaacagagggtgtataagataatacaacctgaacttggttaaaagaagtgagtaaatgagtgatccatagtctaaagtaccttaaattaattgcaatacgatcaagtaagtgttcacgtacagatccttcctctgggttgtaagtagcaattagaagtggtttgcatggatgacgaaagctaatgccctctctttccacaatattgactccctcagtcaagacattcagaagtagattgcttacgccctcatccaatagatttatctcatcaacataaagaacgcctctgtgagcttcagcaagaaggccaggttgaaacacagtagttcctgattgcacagatgcttcaacatcgactgatccgattaacctatcctcagtgataccaagcgggatctgtcaaggggaaacctgaaattgaactaacaatggtatgtcgaaattattttttaaacaaaaagtccatgcagcatacctgcacaaaaggtgttttgataatctcggtcttcaagttaccatcagcatcatattgaacttggttagccaaaccctcctcccatctgccataagaggagaacaatcaagtgagttacctgacaatcatttcagaaatgaaagtaaacatattcaaattgtagttggtatgtaaaactttgtgggggtgaaaagaagaatttggatgcttaaacagaagttctagaagcattattagacatgcatttggggacattactcttctgggtagttagggtcagcatttgcaatcgagcctacaaccacttcataggtggaagcatagcgtgcaagccacgagccatcactgtctttgctgtcccacgcttccctgagatggcgatgcctccaatttcacggtcaattgccccaagcagcagagcagttttaattgcatcctggacgcacaataaggtaagttaaaattgtaacatatacaaagttgagaccataaatcaatggtttgataacaagatggtgtcttctcctttgcaggttattacattagtcacccggtggctacgtacctaggctgtcctccacaaaccgggacttcgggatactattgcggtagtatcacgatagttggaccaggtgacacggagtttttttatccaggagcatgggtggcgatctagtctacggattgatagccactaatccctatgttttggttattcttttgtgcttgggaaggatgtttttggttcttttggctgtgtgcatcatatgcagaggccggggtgggcccgatgcggttgtattgtctttgtgtaattgactgagtatattaataaagcttccattatctaaaaataactcgatgcagggaacaatgggaggaaaactaaagcttgaaagtcattccagctcgtttgtttcatcttcagagagagtatgacagcaaaataactcatagcaaaggcattttttcagagatgtacattggcacattgtgtactgatcggtgatcactatttgtccactgattgattcgcttacaatagcattagcat

SEQ ID NO: 22285 - DNA, 1575 bp, Oryza sativa
gagagaagactaggccggaagttcaatttcctgtgagtacacatgctctatattttatatttctccgattcaaatacatacaagtgtatattaattagatctctcgttgtttgtcatttatttgtagtgcgcaaagcaaaagcagggaactaacttgtgcggctattacgtgtgcgagtattgccactgccttgcaaaccaaatcatcaccacaagagagctcgatgtacgtacaaataaattcaaaatttcattacgtagcgatttcttgtttaattactaatcaatttcatacattcatatagtttattcgcatgagggataacctgaccacacacaaggaatttatcacggcggttcaagaacaactcatgggattcatcaacgaagaaatccttaatcccaagggtgaattctactacgacggaaacacaattcaccggtccttagcttctgagctagcagcgagtactactacgtcgaaatgatagctagctagctaggacatataatggattgtaattaatacatgactacatatgtttctatatgcatgtgtacacattttctataatgtaaatatattttggtcatatatatatatctatatacatatgcattaatttgcataacatatatatgtgtataaatacatatatattatgcatgtatatacatataatataatataatatatatatatatatacatatatatatatatgtatgcatatatatgtattgaaacatatatatgcatggtttatatatatatatatatatataaactatatatatatataaaccatgcagcaacagggccatgcaaaaaaaaaaatggtcagctcgatctttactcccggatatttcacccgggactaaagatagcgatctttagtcccggattggtactcccggtttggaaaccgggactaaaggggggttacgaaccgggactacaaagggtttctccaccagtggggattcctccatgcttgcaattcaactaatttaagcattgtgttggagaaagcccaacaaatcaatgccacaggtcttggtgttaaggatgaggggtatgcatgttaaaatggttgggagctatgatcatcacaaggtatgaagtggtaatttgactcccctccttgcccaatgacgaggacaggatttgaacccaggtcagtgttaaggatttgcatatacttaccattgcacaacagttagttttttttttctcttactcttgcctaatactccctccgtattttaatgtatgacgccgttgacttttcgactaacgtttgaccattcgtattattcaaaattttcgtataaatatgaaaacatttatatcatggttaaataacatttgatgatgaatctagtcacaataaaataaatgacaattgcataaatttttttaataagatgaatggtcaaatgttggataaaaagtcaacagcgtcatacattaaaatatggaggtagtatcattttaatttcttctgccatagggtcgcgaagacccttgatgcttggatgttgggcgccaatgctaaggcctatggcaatgagg

SEQ ID NO: 22286 - DNA, 695 bp, Oryza sativa
gccctttgaatctccattctacaacgatcaaagggagtatattattttctatagtctacttatatacaaggacctaatttattaaaggagacgtatagtaagaaatctaaccgaacgatatacttacaaaatccagcaactcataatagagacgtcgagggcgtccagctggtatagttcgtagattcccttgaaattgatccagagaatgtcatctccttgcaagaagtccgtgtccctgatcctcgctccgatcatctctctaccggcggcgctcatctccatgtacagctgatggaacttgtacatttgtgtgggtagggactgcagcagctcaggcttgacaagcggtttaccgagttcgtacatgtatttcacttccgccttttcgattggtgcgactcctagcaattgatccgtagttagaccggtgtcagtaataaattgttctatcgtcatttctttaccggtaaccaacggctcgatctcctgttttggttgctctccaagctgagggactggtttggactttccagaagatgctttcttcagcgttcgctcatagtccgatagcttgatggcctccttgacagatgcagacatacccctgaagaagttcctgacactggggtctataggaatcttcttttctggacttcgaggcttgaattgtctcttgacttctgatgcaacgt

SEQ ID NO: 22287 - DNA, 799 bp, Oryza sativa
ctgttgggcgtttacgacttcaccgccggcctgcctccgtcgccgcgagtggtgcctccgcctacacggctggcctattatgccgccgctgttgggcgtctacgacttcaccgccggcctgcctccgtcgccgccgagtggtgcctccgcctacacggctggcctattatgccgccgctgttgggcgtctacgacttcaccgccggcctgcctccgtcgccgccgagtggtgcctccgcctacacggctggcctgttatgccgccgctgttgggcgtctacgacttcaccgccggcctgcctccgtcgccgccgagtggtgcctccgcctacacggctggcctgttatgccgccgctgttgggcgtctacgacttcaccgccggcctgcctccgtcgccgccgagtggtgcctccgcctacacggctggcctgttatgccgccgctgttgggcgtctacgacttcaccgccggcccgcctccgtcgccgccgagtggtgcctccgcctacacggctggcctgttatgccgccgctgttgggcgtctacgacttcaccgccggcccgcctccgtcgccgccgagtggtccctccgcctacacggctggcctattatgccgccgctgttgggcgtctacgacttcaccgccggcccgcctccgtcgccgccgagtggtacctccgcctacacggctggcctattatgccgccgctgttgggcgtctacgacttcaccgccggcgtgcctccgtcgccgccgagtggaactccgcctacacggctggccattatgccgccgc

SEQ ID NO: 22288 - DNA, 13846 bp, Oryza sativa
cgacgcggcaagggcctcatcgaggcccgactgcgagaggacggccacggcgcctgatgtctgctaggctttcctcgccagcagcacgatgctgtcctgggcgaggtcgacgcggtcgttggagagcaaggtcgtgagggctaacacggcgcccgcggcgatggccgtgctctggttggccgcgctctggagcagcccgtacaggatgaccatggcgttcttctggctgtgggtgtgcgccgtcccagatgagctggaccagcgtcttgatcgcctccaggatgcgtccgagttattcgatgagaggtagaagaggatggccaccgcgttgtgctgctccttggccttggcaccgacgctgatcacgtcgatgacgaggccgacttctccgacctccacgatggtcatttggttcccattttttttaaaatagtaattaataacccaaaaattaaatgatagtaaatcaaaggtttaatttactcttataaaaataaggacgctatgtacaacagtgtccatggacgttgttcccgagaacgtcaacagtgtacgtccagatcaggacgctgtttgtaatggcgtccatcccattggagccgaaccagcctacggtagggaagcctccactcgcgtcgcgtctcgctgattcttgtcgggtcgtcgtcctcaacgctgctcgccaaggaaggcctccgctgcgtctcgctcggttagcataagcgccctaagccgtcaggttaatacttcatatccgatcctgccgtccgatatgattcgacctatgcatcctaattttttagcgcacttcttcaaattaaatggccagctcgatcctgcaaatggcttctcttttttttccctaacgaatcgcagatggctactcttggttcgatactaataagaaatacaaatttgtacgtacatgtgtgcctgcaacgagctgcttcgtttatttatccagaatgtcctattgattgctccgtaaaagctagaagacctggttaataatgtactcaatgttagagcaaacagatcaaggatgcaagtaacgctaatgcatgctgcagtgctgcacataacggagaattgggaacccaaaagttgaaaacagcgtccccttccggacgttctcaagaacagcgtccacgtctggacgctctggtagatagcgtcgttcttacttttataaatccagccagcgatttactaattatttaatttataggatattaggccccctttgattcaaaggaaattcataggaattttagaggatttcattcctatagaaatttttcctacaaagccctttgaatcaaaggaatgaatcctatggaatcctatgaaattcctatggaatgcctcttcccatacaagttttgaaggaattttaacaagaggtagaacctcatggaagaaattctttgattctttatctctcctcaaattcctgtgttttttctatggtccaatcaaacggtcattcctatgtttttcatgtgttttgcaatcctctgttttacacttacatttctgtcagaatcctatgtttttcctattcctctgttttttttaattactatacataaaaaaaatcagtatttggttcattccctcactttgccataccatgctttagctagtcatgtcactgtttcttatgtgtgtgtttgtttcgttgccacaattgtatcctgcaatactttcttagccttaggtccaacatgtcatacttccagttttagagctaactatgccacacctatggccaactattttctacccacacacttttgcttcatgccacaatatgcctaactatgccacaatactcccagttgtggcatcattaggcatcatccaaacatcccctcatccttccaaattactagggtcgttcactgcacttgacttgttctaataccttggaatgccatacagtagatacctttagttttggacttggaggcattgtgaacacaggagtagctcttcctctttcaagcagtagttggtactactacacaagtcgcacagggcactggtggagaaaccatctttcgtcggtcggccgatttccacagtagtcccggatgcaataaaaaccggggctaaagatgttctttagtcccggttcaaaagggcaacgggcatatttgatctttagtcccggtttgtgttaccaaccgggactaaagatgatctttagtcccggttcgaatgctgtcagggtctgtcaggccctcccggtatctttagtcccggttgataacaccaaccgggactaaagatggtaactttagtcccggttggtaataccaaccgggactaaagatcccggtgatctttagccccggttggtgctaccaaccgggactaaagtcccacccctatatatatgtcttcttcctcctccagctgcccgagcaagcttcaaaatttcttcaaaaaagaggggaggtcatgccaaaatttctattgaatttattttggtgattacatacaaatcggaggtgcctaaaaggtttgcaacttcatcctccaatgttttttttgtcatactacatttgcacctatgttttgtacactttttttgtctccaaaatgtagttgtaagttgatgagagagaaaatgtgtgtggggaagaaagaatatatagaaatttagttcatttgctaaacaaggttttataaaatagttgagaaggaaaactctagtgaaagttaatcttaaataatagaaaacaaactaaaatgaaaattaaaagaagtaaaacacattaaaattagtttattacttaacaaatagtttttaagaattatttggtgtaatattttatgatttttgtatgaataaagatatcttataattattgtatgactgtcattattgtaagaataattatttgtgtacggtttttttgactcatgtagatggatcggcaatggatgtacgctgaccggcggtcgaaagagtttattgacggcgtgcactattttttgagagtggccgaagctaacaggaaaaggggttttatttgttgtccatgcaataagtgtaagaatcagaaggagtattctgcatccaggactattcatttccacttgtttgagtcggggttcatgccaagctataattgttggacatcccacggagagcaaggtgttgaaatggaagaagatgaagtggaagacgacaatattccggactttgctcaatttgttggatttgaaggaaatcaaacgggcgaggaggaaatagctgctgatggtaacgacgttgcggatgatcttgttcagatgttgcaggacgccagggaggactgcgaaagtgaaaaggaggcccataaattggacaagatgttggaggaccacagaacttcgttgtacccaggttgcgagcaggggcacaaaaagttggataccactctggagttgttgcaatggaaggcaaaaaatggggttagtgacaaggcatttggcgatttattgaaactcgtcaagaacattcttccgtggggaaacaaattgcccgagacaacgtacgaggttaagaagatagtctgcccgttaggactggaagttcataagattcacgcatgtccgaacgattgtatcctatatcgcggtgaggagtatgaagacctagaagcatgccctgtttgcaaagcactacgatacaagattagacgggacgatccaggagaagttgacgggcagctaacaaagaagagaattcctgctaaggtgatgtggtatttccctataataccacggctaaggcgtttgttcaggaacaaggggaatgctagaatgttgcgatggcacgctgaagagcgtcaacaggacgggatgctgagacaccccgccgatggttcgcagtggcgaaacatcgacagaaaatttaaagaatttggaaaggacgcacgaaacatacggtttggtttgagtacggatggcatgaatccttttggagagatgagcagcggccatagcacttggcccgttacgatgtgtatctacaacctccccccctggctatgcatgaagaggaagtacataatgatgccgattattattcaaggccccaagcaacctggtaacgacatcgacgtgtacctaagaccactggtcgaggatcttaaacagttgtggaagaaggaaggtgtccccgtgtgggacgaggacaaacaggaggagtttaacctacgagcgctgctgttcgtaaccatcaacgattggcctgcacttagcaacctatccggacagtccaacaaggggtacaaggcttgcactcactgtatggaggaaacagaaagtacgtatcttaagcactgtaggaaggttgtatacatgggtcatcgtcgattctttgcagcaaaccacccggtacggaagaaaggcaagcacttcgaacataaggccgaccaccgtacgaagcctaaacatcgcagcgggaaaacagtgtttgctatggttaaagatcttaaagtagtgtttggaaaggggcctggaagccagcatatagagagcgaagatggtcacgcggcgatgtggaaaaagaactctatattttgggagttaccatattgggaattcttggacgtacgccacgcaatcgacgtgatgcacctcactaagaacctttgcgtaaaccttcttggcttcctaggtgtatacggaaagtcgaaagatacactggaagcacgtaatgatctgaagcatatggaacaacgcggcgaccttcacccggaaccaaaggagaaaggaagccattacttgagtccagccagctacactcttagcaaggcagagaaggaaagtatgtttgaatgcttggagagcataaaggtaccgtctggatactccacgaatatcaagcgaataataagcacgaaggagaagaagttcacaaacctaaagagtcatgactgtcacgtgttgatgacacaactgctaccagttgtaataaggggtatccttccagacaatgtccgggcaacaataacaaagcaatgtgcattcatgaacgcaatttcgcataaggtcatcgatccggatagattagatgcccttcagaatgaagtggtgcaatgtctcgtcagttttgagttgatatttccaccttcatttttcaatataatgacgcatctgctttgtcaccttgtgaaagagatccgtattctcggtcctatgtacctacacaacatgtttcctttcgagaggtacatgggcgttctgaagaagtatgttcgtaaccgtgctcgtccagaggcaagcatcgccaagggttatggaacagaggaggtcatcgaattttgcgtagaatttatcgaagaccttcgcccaatcggggtacctgaatcacgccatgaagggagactacggggaaagggaactctcggaaggaaagcaattatgacggtagacaacaatttattccgtaaagcccatttcactgttctgcaacactcttcattggtagctccttacatcgaggagcacttggctctagttcgcgccaggaacatcggtaagtccgatgcatggattacacggcatcacattgatactttccccgcgtggctacgacaacatctcatgggtaacgagtcgatcaaccaacaacttgccttatctgcgaggggaccgtctgggtcgatcgcgactgtcgaaacatgatttcggcaataataaaagggggtagcgcacgagacctaaaagtggatggatgcggagacaaaggatttagacaggttcaggccctctcaatgagaggtaataccctactcctgtttggggatttgaatccgccgagtgtgtattgatctgacgatcaggttgtctcatgcccctagagggggctccctgcccgccttatataggttggggggcagggttacaagatagaaaccttaaccaatacggtatcggtttcctaaatctactttacaatcttatcaaaccaggactttaggccgttccataatatacagggaaacgtaatacccaagtcatgatctgttacatattccatacatatatgttatcccctattactagtcggataaccatgccgtgtggatacggggtacccataatctccacagtagcccctgaaaccttcacagtcgaaaatataatcttctctcgaactagattactccaaagccgagtgcttcaatcatcttcgccatggtctcccgagtacttttaccaaatctgaagactgtggagggctgaaaaataaagtcaggtatatcgaatagatgcacctaataggtgtagcccccgactatgtggttaattgaaccaaccaaacatatagtcaaggaataaataatctaaccaaccgagtggttttgataattgtagtcaaccaagcgacttaatattaatatgtagcatatgcggtgtgaatccctgaataatatgatccaagtgatataccgactgctttgtaaaatatgatgagtgtaacctaaagttggctacatcattgaaaattcacatagcaaaatagctataaagaagcttgtatgttgtgaataaagaaatttccaaagtattgggcatacgccatgcgcacactgctttaacagacgtgctttagtccctaaaagacacatggtttcaccacacctggaaatatatggcatatgtggtgtaaaatccgagtaaataaactcataaaggatttaccaaccgcctagaaaatgaccacaatatataatcagcctaagccataatattggtcaataaaaatgcacacttacgtggcgaaaagcagtgatattatatccaatcaattgcttaaaaacccaaacagcaccttgatttatataaaaaaagtcagcgggacagctatataaagctttactgtttgacaccttttaagatgcattataccaactcctaaaaagttaagtaactgtggtataaaaggattttaaggtattgggcacttgatcacgcgcactttggcctaagcaaaaagtgcctaagtccctaaaagaacgtgacaggccacacctgaaaatatgggctgcagacatattaggcctaggccaaaaaatatgccttcgacaccctttaaaggatgacgcatgtaacatgctcccgagtaatagatcttccaggtattatagaccaaatgtagctcatatgaatagcttctgatctgaatgattatcccttctgggatactccaaaatagatgtaacaattgaatcccgactggcgcaagtattcagttgataacccttacggggaataataaatagtccagtctttgagcatagaaaatagacccatgatcacgaattcatattgcatatatccagagcaagtccaaattgaaggtatgatacttgtgtttgagctaataagcccctgagcatatagcttgtccttctgtcgtagtcacaattgtccattgatggtagctgacgcatttggcatagagacaagacgaccaacatagagataatattgcccaccagaggtggcaaaaatattggtggtagtggagatagtgataccaatcaaaagtaatgaagtcgcatagtcatagaggcgaagaaaccagtcggcagcaaacaagttagccaacagtaaagatgaaggcgtccagcaacagcgacagaattgtgtagccatggtggtgaaataatcagtcggtgatagacgagccagcagtcggtgacgatgataacaagccgacaatgaagacgtagacgcacaccaacagcaatggcgaaatccactaatcatgaagatgaagaaaatagtcggcgacgacaaacgcaactgacatgatgaagatgacgatgtcggcgatccagtcaatagcagtgtcgcaaccaatgataatgacaaagacgctcatcagcatttgcatagtaggtcaaccgtgaaggtgaaataataagtcggcgaaaacataatcatccattagcaacagcagagatgtcagggtcgatgaagcagaggtgctggtgatgatgtcagtggcaataatccatcaaattaatgttataactgttgtagatgcttcacttggaggagagttgatgttgttgcccaactcgtctaaaccgaaatatttgaagttgttgaagtagaatgtctgctccgaatcaaagatgaagataatgactcctggagttgactcgttggttgatgaattgatttcttcagcttgacataaaatttgtcaaattttgagccttgtatttgtgtagcccccgactctttgattagttgggaaacaactgaacatagagtcgagaactatagcttcttgtcgtcgaatagttattgcttgattgaagatatgtgttgaagatgtccaagtagaaatccgaagataataaagatgaagtcgctccaccatgatgacaaagttatgttgccgtgatgaagtgaaccggtagtgaagacgcgcagttgtgaagataaaagcaccagttggcggcggcataaccagtcggcgacggaagacgatgatgtccatcagtagtggtagaatcatgcagccatggaagtgcagaaaccagtcggcagccatggcaaacgtaggcagcttgtgttgaagatactgatgcctattagtagtgacagcgatgtaaccagccgtgaagaagatagcatgagttggcgctataacaggccagccgtgcaggcggtgacaccagtcagcggcggatgcggcggccggtcggtgaagacgtagacgcccaacaacggcagcataataggccagccgtgcaggcggaaacaccagtcggcggcggacgaggcggccggtcggtgaagacgtagacgcccaacaacggcagcataataggctagccgtgcaggcggaaacaccagtcggcggcggacgaggcggccggtcggtgaagacatagacgcccaacaacggcggcataaaggccagccgtgcaggcggaaacaccagtcggcggcggacgaggcggccggtcggtgaagacgtagacgcccaacaacggcagcaaaataggccagccgtgcaggcggaaacaccagtcggcggcggacgaggcggccggtcggtgaagacgtagacgcccaacaacggcggcataaaggccagccgtgcaggcggaaacaccagtcggcggcggacgaggcggccggtcggtgaagacatagacgcccaacaacggcggcataaaggccagccgtgcaggcggaaacaccagtcggcggcggacgaggcggccggtcggtgaagacgtagacgcccaacaacggcagcaaaataagtcagccgtgcaggcggaagcaccagtcggcggcggacgaggcggccggtcggtgaagacgtagacgcccaacaacggcggcataataggccagccgtgcaggcggaaacaccagtcggcgacggtcgaagcgagccggtggtaatgttctgactgatccattcctggagcgtaagagataagcttaaagccatgaatcccttttatgcatatctggatctggatcctgcagaacaaacatataggatgagtagtatctgatataaatataatactcgagaaaaaatcaagtattttaaaatatttataaatatgtatttctcctcttgtcaattttgatttccccgagcagatgactccttacgtttaaacactctgcccgactaatcatagccaccaagcactgggagtcggcctaagcacttcccaaacatgcatatgagtgacatgagttcgtcattaatggaacaaagtttcacggatcagagtttactactcgggtacttttgcaattattaagagcagaaaataaatttatctcatctctatgcttttgatttattccgaataatacttagcaccttgcgttactcggtccatccaacgagcccccgggtgctaggaatcggcccaaaggcaaccatccgttagcaaaccaaacggaaagcataggaagatagaactccgtaactcgataggtacttttgtactcagattatgtcacaagcaatcaagataaatattatgaaaattgtttaaaaaatacgatataacatctatagcccccgactcactagtcaacggcgaaccagttgatgtagtgaggcaaaggaaaagacaaaatatcatataaagaataaaataaatgatgacttagctttgtcgtattccctcgatgacagcagaagtagccgatgtgggaataaagcagtccatcaatggtgacaaaaacaccagtcggcaccagtggaaccaagctagtggtgtaggtgatgaagcccattaacagcggcggagtccgccaaccgtataggcaaaaacaccagtcagtggcggcagaggccagccggtcggcaaagacgtggacacccatgaacggtggtgtgaccaaccaaccgtataggcgaggacaccactcggcggcgacggaggcaggccggcggtgaagtcgtagacgcccaacagcggcggcataataggccagccgtgtaggcggaggcaccactcggcggcgacggaggcaggccggcggtgaagtagtagacgcccaacagcggcggcataataggccagccgtgtaggcggaggcaccactcggcggcgacggaggcacgccggcggtgaagtcgtagacgcccaacagcggcggcataataggccagccgtgtaggcggaggtaccactcggcggcgacggaggcaggccggcggtgaagtcgtagacgcccaacagcggcggcataataggccagccgtgtaggcggagttaccactcggcggcgacggaggcgggccggcggtgaagtcgtagacgcccaacagcggcggcataataggccagccgtgtaggcggagggaccactcggcggcgacggaggcgggccggcggtgaagtcgtagacgcccaacagcggcggcataacaggccagccgtgtaggcggaggcaccactcggcggcgacggaggcaggccggcggtgaagtcgtagacgcccaacagcggcggcataacaggccagccgtgtaggcggaggcaccactcggcggcgacggaggcaggccggcggtgaagtcgtagacgcccaacagcggcggcataataggccagccgtgtaggcggaggcaccactcggcggcgacggaggcaggccggcggtgaagtcgtagacgcccaacagcggcggcataattagtgatcaaataataattagtgatctgtgaattaattctaatttatataagaaaatttagaacgataaacctggtttgtgatccaattttgattcaaggcctgtcaatggatgaaccgtagcatgcagccgtgtagacatgtaatcgtcggtagcacatgcatggattagtttggagaccactttgtgcatgtaatagctgatttgtgtatggattaatttccttgaccacagatttgaccaggtatatttaatttgtatcctggactttgtgtcttgccgtacgtatccgagtagtattgacttggtgatgtacaggctcaaccgacggtgatcttcgcatgatttcggcggcggctgcttgctgattgcttcaaatcatgccctggtgacgaaaccgacggaccaacagacatggcagcattgtagcgacggatttgatctcactgacagaggtaaaattgacgataacaagctggttgtagatcgattcgatcggtgattaatctcctggttgattgaccagatccagatagaatttttggcgacgaagaccctgcccttttgttgagaagatcacggccaaagatgccggcacaaagttccatcgcacttctcgacggaaaactcgacgcaacccctacctggcgcgccaactgtcgaaacatgatttcggcaataataaaagggggtagcgcacgagacctaaaagtggatggatgcggagacaaaggatttagataggttcaggccctctcaatgagaggtaataccctactcctgtttggggatttgaatccgccgagtgtgtattgatctgacgatcaggttgtctcatgcccctagagggggctccctgcccgccttatataggttggggggcagggttacaagatagaaaccttaaccaatacggtatcggtttcctaaatctactttacaatcttatcaaaccaggactttaggccgttccataatatacagggaaacgtaatacccaagtcatgatctgttacatattccatacatatatgttatcccctattactagtcggataaccatgccgtgtggatacggggtacccataatctccacagcgacattccagggatatgagatcaatgggtacacattctacacgagagcccaagacatgaagagcacgaaccaaaacagcgctgttcgtgtcgatgccatgggacacgatggaacaactgccacgtattacggtgccatcgaggacatatgggaacttgactatggtcctctcaaggttcctctgttccggtgccaatgggttaggttgactggtggaggcgtaatgattgatgacagtgggatgacaactgttgatcttaacaaggttggatactcggacgaaccttttgtccttgccaatgatgtaaagcaagtctttttcgtgaaggacatgtctagcaaaggaaagaagggcagagggcctgatgagcctaagcgtcaagtggttctctcaggcaaaagaaaaatcgtcggagttgaggacaagactgacgaggattacgatcagttggatgggcaaccccctttcacggtgacgattgaccctagcatcctcctatcaaatgaagacaccccttactcacgcagcgatcacaaggagggaacaatagtgaggagaaagtacgtgcggtcaaccgtcaccgccgatgtaatgccgtaattattgtgtacacgatgtaaactattttggatgtattgattatccatataaatcaattgatgtatggcatatgttaattacgcacgattattagaggtttcaacaagtttaaatcatgtatatgctagttatatgtgatacttacaatttttaaaagttttaaatcacacaggtggcaatttcatatgtatgttaattagagtttttaacatttaatttactagcatgcatatgctaattataattgactagaggatttttaaaagttttaaatcacgcaagtggcattttatatgttaattagagttttttaacatttaatttactatcattcatatgctaattataattgactggagaatttttaaaagtattaaatttaatatatttttaaaactatcattcatatattagagtttttcacaatttaatttactatctttcatatgctacttatatatgactattcgaatttttaaaaggtttaaatcatgcatgtggcatttacatatgttaattagagtttttagcatttaatttaatataattcctacgctaagtatatatgatgattacaatttttattaattttaaatcatgcagtatgtacatacatatcttaattagagtttttaccaatataataatatcattcatatatatgctaagtatatatatatatattggaatttttattaattataagtcatatatttgcttattacgatttatccacttaatttattacagacaaaaataatttttcgaagtaattgtcattaatctttagtactttaaataatgttaatgcattaacttctattttataaacacatatgtaagcgaaaatcatatgcagtgctataatctttagtcccggttcttaaccctaaccgggtttaaaaagaatttcgaaatagcgggaaaagatatttactcccggt

SEQ ID NO: 22289 - DNA, 15998 bp, Oryza sativa
aacgaacgtgaacgagcgaacgaacgtgaacgagtgaacgaacgaggatgaacgttaacgtgaaatgcaaaatatatatatatatatatatatatatatatatatatatatatatatacatatatattacttggcatttatcctaatacatctgtttgtatcttgtagaaaagacgtgttgtcggagtcgtccgtcaagcctgagtggaagagctagccctagaaggaattggagcaggcaagtgacgtaataatataaatgattgttatatttgtaatgcaattaattaagattattagacctgtaattagacttatcatgtaagattgtgtagtgttctaatattatttgagttttaatataagattactttatttgtaattagacttagtatgtaattattgactacggaagtggtgcgacaagtagcaattgactattgtagtcttaattagacttagcatatacgcacgaaacacttagcatacatgactattttagtcttagcatgtaatattatttgaatatatatattagattactttatttgtaattagacttagtatataattattgactacggaagtggtgcgacaagtagcaattgactattgtagtcttaattagacttagcatatacgcacgaaacacttagcatacatgactattttagtcttagcatgtaatattatttgaatatatatataagattactttatttgtaattagacttagtatataattattgactacggaagtggtgcgacaagtagcaattgactattgtagtcttaattagacttagcatatacgcacgaaacacttagcatacatgactattttagtcttagcatgtaatattatttgagttttaatataagattactttatttgtaattagacttagtatataattattgactacggaagtggtgcgacaagtagcaattgactattgtagtcttaattacacttagcatatacgcacgaaacacttagcagacatgactattttagtcttagcatgtaatattatttgagttttaatataagattactttatttgagattagacttagtatataattatttactacggaaatggtgcgacaagtagcaattgactattgttgtcttaattagacttagcatatatgcacgaaacacttagcatacatgactattttagtcttagcatgtaatattatttgagttttaatataagattactttatttgtaattagacttagtatataattatttactagctagggttgtataatatacgtcacctagacttagcttatatcacgatttgtaattagacttagcacgtaaggttgtgtatggttctaatgtacgacatttacagttagcatacatgacttagattgttaaaacataaatgtctcgtgacttagcagatgtttcttgtatgaacagatggctgaccgcgatgaggaacagatattgtacgatacaatcgcggagggaagcagccagtactggaatgaagaagaggggaacgaggatccaaaccagtacttgaacgaggaaggaaacgtggagagggatgcggaggggaaccagcaggggcacgtggaaagggatgtggaggggaaccaggaggaggaggctagtggtagtcaatcctccgttggacagaagagggcacgcgggcaacgaggtgcagcgaagaagcttgagggtcggcacatcataacggaagtggaagaagatggacgtcctagtgccccggccgaagccgccaagaactatgtacgtcacagcggttgggttgtgcgggataacgtgcctgtcagtacggtgtactggcgaagaacaagggcacgcggagatcatgagagctttgtcccagattcggagaaagagatgctgtggaccacaatgctcgagacattcacccttcctgcgggtacagaggacaaagtgaaaaggtggactctgaagaaaatggcagaacagtttcagagcttcaagggagatctgtaccagaagtatatactgaaggggcagacaccgaacttcgacacattcccaaagctaagggatcactgggacgagttcgttgcatataagacaggtgaacaagggcaggcgatgatggaaagaaacaaagaaaatgccgccaagaagaagtaccatcaccacttggggtcaggaggctatagcgtcgcgatgccgaagtgggaggagatggaggctagcttgattgagaggggtatcgaaccggcaacagccaattggccggaacgatcgaagttctggtactatgctcacggtggaacgctcaacccagctgatggctcactggtcttcggcgttcagatacgagaggctgcgcaacgactaacagatgcagtggaagcctcctctcagggcacgttccgacccgacagagatagggacgagctgacactcgccctgcagactccagagcatccaggacgaacacgagggaaaggggtgattccttggaagattggtttcaaggaggacatccacacgtacaggagtcggatgaggagcaagagagataccgaggcgaagattgcagacctagagttccgggtatcgagctacgaactccacatgcaagaggaggtggcaaggaaggttgatgaacgcatggccgcacatcggtcccatgatccccagccgaccattcctcctgcaatggtgagcccgtcaggaaaccgtagcagctgcgcctcaacggggcaggtaggatcgcagagcatggacgccatgcaaacacaggacgaatcgacctgtcccgttgatgacatcactcagcggacaccatgtgagctgcatattcctttcaagaacttatcaataaaggtaagatttagccattccgctagttgctgcttatgtatgttgattactaataaataatctctcacaacatgaaggtggtgtcgggcatggccatcccaacggacccttcaggtacttaccactgcaggccgattccagcaggatactcgaaggtcgaagttgagttggtcgaaggcgcgtacgaggacctcgagctggattaccctggaggagacggtgagacgcatctacgagacacaagccatgccattattctatggcacaggcggtacatcatcctccctgggcgacaagcggcgtctcgtgcaccatctcctccggctccgccatctcctcctcaggatcctgcaccgtctcctcctcatgctccgccagcaccgtctccacctcaggctccagcaccgactcctcctcaggatcctgcaccgtctcctcctcgtgctcctacacctactcccccgcaagctcctcttccggcaccttcaaagtcaagggcccccccagctgcaccgcctgcccacacaagggcaacgaagaaggcgaaagttgacgccgccaagaacaaggacccggggtacgattgcacgcaagaggagcttgacgcttacgttgcatcagaagtcaagagacaattcaagcctcgaagtccagaaaagaagattcctatagaccccagtgtcaggaacttcttcaggggtatgtctgcatctgtcaaggaggccatcaagctatcggactatgagcgaacgctgaagaaagcatcttctggaaagtccaaaccagtccctcagcttggagagcaaccaaaccaggagatcgagccgttggtgaccggtaaagaaatgacgatagaacaatttattactgacaccggtctaactacggatcaattgctaggagccgcaccaatcgaaaaggcggaagtgaaatacatgtacgaactcggtaaaccgcttgtcaagcctgagctgctgcagtccctacccacacaaatgtacaagttccatcagctgtacatggagatgagcgccaccggtagagagataatcggagcgaggatcagggacacggacttcttgcaaggagatgacattctctggatcaatttcacacatatctacgaactataccagctggacgccgtcgacgtctctattatgagttgctggattttgtaagtatatcgttcagttagatttcttactatacgtctcctttaattaattaggtccttgtatataagtagactatagaaaataatatactcccttttatcgttgtagaatggagattcaaagggcccgacggcggagggttttcgatactggattcatcgaccctcggaaagtaaacgtcacaatgctcgaccaatatccacaagaaacagaggacaatctcgtccatctcctgaaggcccagcattacaagacgttcatactgttgccatacaacacagagttagtttaattttactgtcttcctacataccaaatttcattcccgtacgaacttgctaagtgtttcatatgtaatgcatcccacgcacattgcagattccactgggtgcttttactcttcgacctggaggcctgcaccgtcaacgtatatgactcaatggataaaaaagagtctacgtttgacaaggttttcgaacttatagacaggtaccgtcataagttcctttgttaattaagaaaatcttgttatgttaattgctactacgaatcatagctttaaactccatgtagggcttggtatcggttccgtcaattggtccgcggcaaatggagagaaagacttaggcggaagttcaaatttcctgtgagtacacatgctctacatttatatttctccgattcaaatacatacaagtgtatattaattagatctctcgttgtttgtcatttatttgtagtgcgcaaagcaaaagcagggaaataacttgtgcggctattacgtgtgcgagtattgccactgccttgcaaaccaaatcatcaccacaagagagctcgatgtacgtacaaataaattcaaaatttcagtacgtagcgatttcttgtttaattactaatcaatttcatacattcatatagtttattcgcatgagggataacctgaccacacacaaggaatttatcgcggcggttcaagaacaactcatgggattcatcaacgaagaaatccttgatcccaagggtgaattctactacgacggaaacacaattcaccggtccttagcttctgagctagcagcgagtactactacgtcgaaatcgtagctagctaggacatataatggattgtaattaatacatgactacatatgtttctatatgcatgtgtacacattttctataatgtaaatatattttggtcatatatatatctatatacatatgcatttgcataacatatatatgtataaatacatatatatatgtatgcatatatatgtattgaaacatatatatgcatggtttatatatatatatatatatatatttatatatatatatatatatatatatatatatatatatatatatatatatatatatatatatataaaccatgcagcaacagggccatgaaaaaaaaaaaaaggtcagctcgatctttagtcccggttatttcacccgggactaaagatagcgatctttagtcccggattggtactcccggtttggaaaccgggactaaatgggggttacgaaccgggactacaaagggtttctccaccagtgaagtctataagtggcatgaatatggtccgtcatctttggtccatttccttgatcagcaagctgcgcagtgtgatctgggttggcatgattttgcctgtttccatggatcccaagatcggcagtctttggacatttgggaggccatccttgggtgactattgaacgaatatatcagatccatggagctacaccattcccggtgcctcctagttctacgcaagttgttcaaacatggacatacagggcagggcctacaaaactaaaatgcatgatatttataggttaagagaagctgtgctccatctcacactgacaagcacttgtgttgagcctccaaattttcggccatttgtctatctcaagataattttctataattctggtgcagtgcactatttatcatttatcggtgccgtgcacttggatcgacaaaggacacgatataaatgataggtgatgtaattaagtagggtagcatgacaaaattatatacagcggcggagccacctccaaggcaggtctgctggccacccaaactccgctgctaccgtctccactacaacacccgacagcgcctatgaaaattagttggtcactaaaaaacgctattagtgaacctaactcaatggtgtcactggctccgccattgattatataggatctccgtgatctggtttgcctaaaaccggcacctatgaggcgttttccatgtaaatgagccttttgacgggataaaaattaagaactagcacctataactactcattggtgtcggtttaaaaaaaccggcaacaataattctaccaagtcataggtgccggttcatctaataaatttacacctatatatgtcatatatgtgtcggttcttgaagaaaggatcacctatggacttacatgtattttctatctatctttttcatatgaagacagatgaagatagactttatacaaatttttaaatcttgacgagatctaccactttgtagttgactactctttcattcgaggtgttttccatctcctaaaatgtgttgtaatttcttagatctatttagataaacgaaattttaaaaattataaatgtctgggatggcgacaaaatatactccctccggctccataattcttgacgttttgacaatgccgaggtactgttactttcctattttgtaatctgaacactgacctctatattcctttacactcacatccttttctattcatgtatttttccaagaatgctcacgatcgagcatccaacgcaacgctcccatcgaacacctccacaagaatcccagccatttatccaagatgtgatccgacggttgagttgcgggaaacacttggatgcgagtgtcccatatcctgacctcgatggctccacgcaggcaacaacaaccctctcctcgatgccagagtcactgcttctgcagccgccgccgccaaaagatcctccctcctccccactggctcccttctccctcctccacaatcatcttcatcccctctaatagactttaagggagctgcatggtggggagatccaacttgtcatcaaggtggcactgacgtgtcagcgtgctggtggcgagcaggggaaggcgaggaagtagaagaacaagagggttgatgtttggaggcttcgccgtggaagaggaggtggaggaggcatgtttatgaggaaatggcatttggtggatccagttgctggagtgaaggaagaagtatattcagccaatggagtaggggaagaagatgattgtaggttttgttgcaattatattgtttatttctgttgcatcttgttctgtttgtgtgtttcattcttttcttataatgttgcacatgatgtgcagtgtatttttttcttgatgctacacacaatagaacctgatgttgtcatcaatgatgttaaaggctgaaacatttttttgttgagctatgatacatatgaaacactttttgttgaaatattttttagtaagtcatgaaacatttaaaatatttttctatacggtgaaacactgtctgaacttttgattaggatcagacatctgatccctagtatttttcctatctgcatttttccatcctataatccgaacgattaatttttttttttggaaaattttttgctacaggacatcgtaacttcgcggtttagctttaggacaccgtacgaagtaacttttaggggaagacactctcaaaacttggatattttcttgtggacgccgcacctattaaaataataatttccgggtgaggaggagagagaaatcacgtgaaatatcaaaaatgtccttgggcccacgtgtcaacactcctatctctcttctctctccctctggcaccggcaatagggaacggcagcagcggcatcactccaaatctaaccggtgcaactccagcggcgtcaccctggacccagatgatggttgctgcccttgccctcatggcgagctccctaacgcgtgccgccgtccatcagctcagccacgaccatctccgcgccgccgcgacccttgctgcagtcggccgcctcgggacctcgtcgccgcacagctccaagctgcctttcaatagtccctatgtcctcccctctcctttaattgagccgtcatcgaccatagccatgtcatcgtcgccgtcccgaacccactgctgccaccggctatggtgctcgccgcctctagccaccctcggccacgccattgcctctagaaggtgagggagggccaactctagctgtccgggccttcggccgagccacccccttctctgcccttcaccggtgagctcgtgccaagccgtcgcgcacgctcaccgtctcatagagatgcggcgctggaaggaggggatagagggaagagagatagaagagctgacatgtgggccaagggcagttttgacatttcatgcaatttctctctcttcctcatctggacattattattttaatgatgcggtattcaccagcaaatatctaatttttgatagtgttttcccccaaaagtctattcgcgtagtgtcctaaactaaaactccgcgtcctaaaactaaaaccacaaagtcacgttgttagcaaaatttgcctctttttttttccacaaaatttgccgcaaactaaaactaggatgtatttggatggagggcttggataggatatggccacccaaattttggaggtgtttggatggtgggcaacactgggatatggccaccacctaaggaatatttcctctagatgctggctccgtgcatccggccgattcggccggacggggtggcccaggaccgcgtgaatcgtgcacccctcacctcctccccatccttttctccttttttttatgagagatttgataatttatcacttatttaagtgggttttgattatttgacatcctagtccactttcatatacttagatagtcctacatgtcatcctcacaagtactccctccgtattttaatgtatgacgccgttgattttttgacaaacatttgacctttcgtcttatttaaaaaatttatgtaattataatttattttattatgacttgatttatcatcaaatattctttaagcatgatgtaagtatttttatatttgcataaaaattttgaataagacggatggttaaacgttggtcaaaaagtcaacggtgttatacgttaaaatatgataacatggagagagtatcaattaaagcatttgggcaacggaaaaaaaggtgtcaaattatcaaaattttccttttttctcctctcttctcaccggttcaccagtgccaaaccctacctctcctccctcctctgtttcggcggcgcatcaggcggcgtggagggcggactggtaggcggtgccgggccgggggtggttcggcggagcgggtggcggcgccggggccgggcggcaggtgtcggcggcgcaggcggtgggtgtcggcggcgcgggcgctgtctcctggcggcgcgggcggcgactccaggcgaccccttcctcgtacccccgatctcggaaaagaggattataaggtaaaagcacacacaaatctaacaccactacagcgataaaccccccaaaccccaccaccacgccgccgccgccgccgccggagaagatgatggtgccgctggatccgtcatccaagcccacctcccagcgccgcatcgcggagggggacaccgtcgtggtgtacgagcgccacgacgccatgcgcgccgtcgccgtgcgcccgggggccgtgctccagaaccgattcggcgtcttccgccacgacgactggatcggccgccccttcggctgcaaggtccacagcgccgcctccgccggcggcggaggggctcgcgggggcaaggggaagggcggcgggttcgtccacctccttgcgcccacccctgagctgtggacgctcgtgctcagccaccggacgcagatcctctacctcgccgacatcagcctcgtcgtctcctacctcgagctcgtccccgggtgcctcgtactcgagtccggcaccgggagcggctccctcaccacctcgctcgcccgcgccgtcgccccgcacggccgcgtctgcaccttcgatttccacgaccaaagggccgcctccgcaaggtactaatttttttctcttatggactgtaatatttgtttttctgatggaagaatcgatcacctgataaaaatatttaggccgaattttggggagaaaaataaacagctgtgtctaatttatatatattatcttagcattctgcatacatttttttttcttatggactaatatttttcttatggaagaatcgatcacttatagaatatttaggccgaattttggggagaaaaataaacagatgtgactaatttatagatattatcttagcattctgcatacattttttttcttatggactaatatttttcttatggaagaatcgatcacttgatagaatatttaggccgaattttggggagaaaaataaaccactgtgactaatgtatagatacttatcttagcattctgcatagagaaggtagattggtgataattcacaagcaatattatcctttggtggtttccctgcctgatatgattgtcacaaatcagaatcacctgtgcacttttgcacacacattagcttggagttgtccaagctttttgatgtgagatcgttttctgttgtggtggtaatgcacgataaagtgatttgtgtggcaccacctagctggttgtatggagctattttgcagtaatgcacaataaaagtattttgtgtgatatgctgttatagaaaatgactttacagataggatagggccatagggatgatttctcaacttatgtctttgcagcacctgtaagatactaggatgatatgatcgacagggttcacccccttttcaactccacttgaagcataacactaatgtgaaatgcagattacactacagagaaaagtttacttggactaaaaattgttattgtcactcaacatggcacagcagatagagaacttatataacatgaaagagaagattttcagaaccgtgaatccatgattgtccaatacttctccatagacatatcattttgatggatattttcctttttgcaattgcgatttggtttccatttgtaaatagggaagattttgagaggaatgacctgaccagcataatcacagtcgcagttcgggacatacaaggacaagggttccctgaggaacacactggtgctgccgatgctgtgttcttggacttaccccagccttggcttgcaataccttctgcggggactatgctaaagcaagatggagttttatgctccttctcaccctgcattgagcaagtgcagcgggcttgcgaagctatgagatcatgtttcacaggttcaatgcatgctcagaatttttttctgtcagaaattgagggcgtattataactgtttttcatgattcatgggagcaaatgaccccattatactcatagattgattgtggtaccaatttgcacatctgggattgaaagtttgattattttgccttgtgttgctttggagtaattttgggagagaactttacatatttatttcgagttgtagcaaacttgtttagtttgtagtttgtaccttgatagctgtttggatgacagaccttaagttagctgcttcgacaaacagtatttaaagtttcttgtttgagtatgaaagttgtaaagattttgctacagcttacaatttgatgttttgtgggatccatttaacttaggagtcattttcatcaccattcaattttattagtgggtagtcttattcagacttataatttgatgatgcgactctagttctatcatattggagttacagaatggtgacatttagaccctgaaaaattatatcccattttgaatataaattatctacagttgactttactaaacactaaactatttctgaatacataaccatagatttgaaaatattgaccaataggtaatacaagtaaacattatcctgagttaacccacaaaagtgggggctgaacaaaagttctattttaacatttccgtgttataatgcagatattagaacctttgaaattcttcttcgcacctatgaagtacgagaaggtggtttgaagggtgccacaaccaatgaagagtctaatgcagtgcctcttgctcagaaaaaaagaaaacttcttgctgctgcagaaactttagatgttaagcagaattctagtgttatggttaggccttgtagcactgctagaggacacactggctacctgacatttgcgaggcttcgtgtgcatggaaactaaactgatcctccatacaggtgagtaggtatacaagagtagggatcaaaattatgtcctgtttaagacctataaattgatacaaactgccaatttatttctacctagccacacttttattactcttttagcgtagtgcttttgtgttgagttgtaactgtttgctcttgctctgtaacttgatagggaaacttgtggactcacaccttcataatagaaggaaattgagtgtgcaaccccatgttcaggtattctctcaagattgatttggagatgatcattctttttctgaaatactgttatggccatttgctgccattgctgatagtcaaccagggtcacctgtactgaactgcatttacctgtacgtcgagctgtgggccttgcatttgttgtaatggtgtagaagtatttcccagagttcctttttaggagtacttgaggaagtattgggaggagtacttgaggaggtattgggaggtataagatgccatacttcctgaaggacagtaaaaacgctcttgtttaacctggccaagtgggctgggcatgtttggatttcacgtttccatgcgttgccagaaaaggaattcaaatatctatcttttttaataaatgtgttttcacaggttgccgaaaaaaggtgtggtatgtttctgtttgattgattagcaccgcctaacctctttttcctaaaccatgtaatacagttaatttaagtcctattggatgaaacaaataaaccagagcggtgaatgtacgaatatacttagacaaagtcaaataagagacatgttgccattgcataagtttaggtgatatcgccatccaagtgattgagtagttgatatagatcacacctaaaattctaaaatagactagttatgccattagcctccatgcacaagccataaataacttgactagatggccagctaattgattagtaaactatttatataggactgttgttttaaaaaaaatacagattttgttgtagtacatggcgactttttgtttacttcctgaacatcttaaaagtgaatatttggaggaacacactcttaaaaaaacatgattattcgctactttccagtcgcataaacctagacgttaattatgatgttttagactaggttgaagttaaacttttataattttgattataaatgacttcaaaaatacttagtttaaaggcactagaacaacaaatatagttgtatatatatcatagaaaaacatagtcaaagatatatttccgagactgttattgtgcaacacgtcaaggataccatggacattaaaatatatatttatgattaaataggagagtgtattcttcctacatcaaaattcgcacaaaaagagaactctaagttgcagtgtttccctatcaagtatcaatcgcgagctgcataacttatatagtgataaggagaaaccgatggggatttaaaggcttgatgcgatgacgctcttgcaggagaaaccgatggctctcccgcgtgtctcgcgtgacgctataaacaaaccgaatatacaatgcgagcaacgcagctataaaagttggcgaacgacatgtagcatgcattccaagcagagccagaacagtgcgtgacaccgtaatgccgccggagaagcaggacgcaacgatggcgaggcgacagcgccacgccgtgatgatcccgtacccggcgcagggccacatcacgccgatgatgaagctggccaagctgctccacgcgcgtggcttccacgtcaccttcgtcaacaccgagttcaaccaccgccgcatgctcgcctcccggggcgccgccgcgctcgacggcggcgtgccggggttccgcttcgccgccatccccgacggcctcccgccgtccgacgccgacgccacccaggacatccccgcgctctgccgctccaccatgaccacctgcctcccccacgtcgtcgccctcctcgccgagctcaatgacccgacctccggtgtgccgccggtcacgtgcgtcgtggcggacgccatcatgtcgttcgcgtacgacgcggcgaggcggatcggcgtgccgtgcaccgcgctgtgcacgccgagcgcctgcggcttcgtggggtacagccactaccggcagctcgtggagcgcggcctcgtgccgctcaaggacgcggcgcagctcgccgacgggtacctcgacacggtggtggacggcgcgcgcggcatgtgcgacggcgtccagctgcgcgacttccccagcttcatccgcaccacggaccgcggcgacatcatgctcaacttcatcatgcgcgaggccgagcggctcaccctccccgacgccgtcatcctcaacaccttcgacgacctcgagcggccggcgctggacgccatgcgcgccatcctcccaccggtctacaccgtcgggccgctccacctccacgttcgccacgtcgtccccaagggcagcccgctggacacagccatcggctcgaacctctggaaggagcagggcggcctcctcgagtggctcgacggccggccgccgcgctccgtcgtgtacgtcaactacggcagcatcgccgtgatgacgaacgagcagctcctggagttcgcctggggcctcgcccacagcggctacccattcctctggaacgtgcgccccgacctcgtcaagggcgacgccgccgtgctgccgccggagttcctcgccgccgtggagggccgcggcatgctgacgacatggtgcccgcaggagcaggtgatcgagcaccccgcggtgggtgtgttcctgacgcactccgggtggaactcgacgctggagagcctcgccgcgggcgtgccgatgctgagctggccgttcttcgcggagcagcagacgaactgccggtacaagcgcacggagtggggcgtcgggatggagatcggcggcgaggtggagcggagcgacgtggccgccacgatacgggaggccatggagggggagaaagggcgggagatgcggcgtcgcgcggcggagtggaaggagatggccacgagggtgacgctgcccggtggaaccgcggatatcaacttgacaaggcttatcgacgaggtgctgctcagtggtgggaagaagcgtcaagctttggacgcccgtgactgaatctaaaagtttacgataatattgtgttggcatgtttatattgaaaaggttttcttaaaaattaatttgaatcgtatataatcttacaaaatagcagcagtccagacatccaatggtccacagtgaggaagcactagaagtgcgtggttatgtagctccattcactaggtttaaaatcgtattgtcgacaattcgacctattcatttatatttgttatttaatgaggtttatgggatttatctggatctatctttgtaagtgtgtaaagggacacacttacggccagcaagtatcactactagagaaactatctttcgtgggttgcctaaatacctcaatagccccgattcatcaaaaaaaaccgggactagaaatcatttttagtctcggtttaaaactaaatgatctttagtcccggttcattcattgtca

SEQ ID NO: 22290 - DNA, 10140 bp, Oryza sativa
ggtatgttcagactatttatacatagatgtggaaataagtgatggacatcgagttatgcagtgtagatgatttttttagtgtattaataatatataatttattttagtggtactaattcagtttcatttattaaaaaggcacatagctttaagacaataacaacaggggagtttatatatgaccacgacaaaatgatttttatttaaataagagagactacgatacattcccgtgtgaatgcgcgggctacattccttgttattatataaatttttaaataagatgagtacttatatggatcggatgtccaaaattcaatgccatactggagtagatcttgcgcccatgcatgaggacgatcccatcgatcgtatcacatcacatgataatgcactggaatcctattccatcactctaatgatcataattaatgcgctcttgatcaaaggcgaacagtaccgtggcaacgtcccctctttaagctgaactcattgctctgtacaattggccttcgaaattgcaaagtttaaaaaactgagcaatttcggacattggagtatcagaccactactcagtgaaatgcaggctgcggtacaaggagatttccaggagtatccgggatattatcataaacaaatatgttgctaaatactccctccgtactcgtaaaagaagtcgtttaggacagcgacacggtctccaaaacataactttgacttcttatttctataaaaatatttattgaaaagtgatatatgtatacttttatgaaagtatttttcaagaaaaatccattcatataacttttacattttaaacttaacaatttgagagttattcatgatttatatttccaaggtttgacttaaacattgtcctaaacgacttcctttacgagtacgcggggagtatttctataaacttagctaaagttaaaaggaggttgactaaggcagcgttcgagagggcgagagagtgagtttgtttgttttgttttccacgcgcacgtttcccaaactactaaacggtatattttttgcaaaaaatttctataggaaagttgctttaaaaaatcatattaatccatttttgaaatttaaaatagttaatacttaattaatcatgagttaatagctcacctcgtttgcgtatcttcccaatctcctcaatccccttctcctcaaacacaccctaagaaaataatcaaaattaacatcatttaatatgaaacgacgagggagtatataatataataataaattcgcgacgagggagtatataatataataataaattcgaaatgctaaatgtcattgtacaaaaatttaggggcaatattttacagattttagactgttggattggcgccaagattcgtgcccgcgctttttctcccccaaccccgacgagctctcactcttctccggtgccggcgatgcccccaactccgacaggggacatatatatggattaggatttggggttggattgttagagtaggagtggggatgtggcgggggaagaaggtagttccccaaggtttagagggatgggcgtgggcagcggtgggcggtaaggcaccaatggtggcactagagccatagggatggcaggaggcggtgggccaacgttagcggccgggcaaataacgagactggttagaaggcaacagccgatgatgccgtatctggcgaccgggagccaccagagacggggaagacggcgaaacaagggactcggcgacgttgccttgggaaagagagaggaggagggggagaaggccgaccaaggtgggagagggggctcatcggtgctgttgaccccttctgaccagctggagaggtagcggaggagcaggagacagagccgaaggttttgcgtgagcgcacgaaagcggcggcgatgggcgggattgaggaagacaaagagaaaaaaagatttgggtatatatgtttgcatgaatctcaaagcgatccaatggtatatatttgcaagatttaagagggtctcagtcaaaatccataatgactgtcctatgataaatttcggaagttattctcataaagctattttggtcatttaaacaaaattgtaaagtattaatgaaggctaatcggacggtgatggtaaattatagaagttaaacaaagccaattgcatatcgtagaacgtgataaagtcagtgatggatcatagatatatgataaactcaatagcatataatgtattctcacatctccagctttgtctccacatgataccatacgcatggcacacttgatacaatgagacgcccctactattcgggacaaaagtcacaaaactcgatgctctctccagtctcacctggtcccacgcgaaaaaccatgtggccacccatgtccatacataaaacaactccgccatgcgccccacgcgtgcatctcctgctataaaaacgaacatctccacagtacacgagtgctcattgccttccaagcacagcagctcatcactgagctgaccagagagagccggagatgggatcgacggcgacggcgaggcggcagcaccacgccgtgatggtgccgtacccggcgcagggccacgtcacgccgatgctgaagctggccaagctgctccacgcgcgcggcttccacgtcaccttcgtcaacaccgagttcaaccaccgccgcctcctcgccacccgtggcgccgccgcgctcgacggcgtcgtccccgggttccgcttcgccgccatccccgacggcctcccgccctccgaccccgacgccacccaggacatccccgcgctctgctactccaccatgaccacctgcctcccccacctcgacgcgctcctcgccacgatcaacgccgacgccgccgcggcgccgccggtgacgtgcgtcgtctgcgacggcgtcatgtcgttcgcgtacgacgcggcgaggcggatcggcgtgccgtgcgccgcgctgtggacggccagcgcgtgcgggctcatggggtaccgccactaccggcatctcgtggagcggggcctcgtgccgctcagggacgcggcgcagctcaccgacgggtacctcgacacggtggtcgacggcgcgcgcggcatgtgcgacggcgtccggctccgcgacctcccgagcttcatccgcaccacggaccgcggggacaccatgctcaacttcctcatgcgcgagtgcgagcgcctctccctccccgacgccatcatcgtcaacaccttcgacgacctcgagcgccaggcgctcgacgaaatgcccagggtcctcccgccgcccgtctacgccgtcggcccgctcctcctccaggtccgccgcgccgtccccgcgggctcccagctcgacgtcgccgtcggcgccaacctctggaaggagcagggcggccttctcgagtggctcgacggccggccgccgcgctccgtcgtgtacgtcaactacggcagcatcgccgtgatgacgaacgagcagctcctcgagttcgcctggggcctcgctcacagcggctacccgttcctctggaacgtgcgccccgacctcgtcaagggcgacgccgccatgctgccgccggagttcctcgccgccgtggagggccgcgggctgctgacgacgtggtgcccgcaggagcaggtgatcgaacaccctgcggtgggcgtgttcctgacgcactccgggtggaactcgacgctggagagcctcgccgcgggcgtgccgatgctgagctggccgttcttcgcggagcagcagacgaactgccggtacaagcggacggagtggggcgtcgggatggagatcggcggcgaggcgcggcgaggggaggtggcggcgctgatacgggaggccatggagggggagaagggggcggagatgcgacggcgcgcggcggggtggaaggaggcggcggcgagggcggcgcggccgggtgggcccgcggagtgtgggctggatcggctcatccacgaggtgctcctcgctggtgggaacaagggtggtcaaaggctaagctagctagccgtttgacgcacgtgactgtgggaattaataatgtgtggacatgtgtatttgaattccatgtgaaattcgaaatgattcgtcaaacaatttaatttatgtagaaattcctacgaaattgccttgttccaaaacatcgtgagctaggagctcgagaaatggatcttttttttttacaaacatagacgattaaaacacacgtacacttactccgacgaacgcatgtacgcacgctctactctaatagttagcacatttgaaagattttaacgatatatatttagattcacgaattccctataaacacatcggtatcaacgggcatgtcactttctactaaaggaataattagatgcatggttggaaatttcggactagacccctctgatacgatattatttcagccgaaaatttttattttttttaaatttttcgtgaattttggtaatatttgttcgaattcaactaaattttgttcaaaaatgtcggaaatttcggtgaggtccaatcaaattagctaaaccgaagtttaaccctgattagatgtaaatacgagcacacttaatataaaacacatgttactttcagtgacgaattcccactacaggatgatacacatttagaggcgagctaatcagcctcaaaatcccaaaaaatccgcctcagaatatgtattgaggccaacattcactgcctcggatactcctgcctcaaaatagtatattgagccaggcataagagttggcctctaaaaggtgtatttgaggctaaccatgtatgcctcagaatttgattgaggcataccgcatgcctcaatgctagggtacgctaccgaggctattactgctgcctcaaaacaaattgaggcaactgtaacctgcctcaatgtaggatgcatcaaattaattatatttcctagattattattgtgggaaatacacattttcatcatcatgaaaacatgaaaacttgacaattgaaacaataagaaattaaatagtatccaaatcacttcattcatatattagcagtacatccaatcatacatgtccaataaataatacatagcatctcatccgtcacttagactataacaacattctggtggtcttaatataggcattaaagtgaactaatatgtctgaactccaattcatatgtggcatttacaagtgttgagacaatcaactactcaaaagtgtagatatataattactgctcatgtttgagctatctcttctaagaagttctcgccaattttctatagttgaacatgatcgacaatcatcaccgtttgagagaaactcgagcacctggagtgtaaatatgtaaaattcagttaacacaaacaaacaatgtcactatctttatttaaataaagaacataaaatatgatcatgagcatggaaattgagtttactaccaaagaaaaattgacaaaacaatccaaagtatagcaggaactaattatacagagaaggaaatgctagagacctatgattaaacattttgaacagaagtacatttctatgtaaaatagactgcacctattgaggttttaaagtatatggcaatccaaattacaatagcatttctatcttttgcatacttatattttgctcaatgaaatttccagaataaaaatgatgtaaatactctatatatacccaacataaatggcacatatacctgtttttgtcacttccccattgcactgaggtgacacttcttcaacatttcaaattgatatttaccatgttagacttgctatgtaaactaagcaataaaacaaagaagccaagaaaggaacatactagttgggatggccatgcaatgcaatgaccaatagcgtctctaatatagttcaaatttctatgcggccggaacaattcagcatctccacatataagactgtctatcactactttgtagcactcccttcccagcattgttcctccgaccatttctaaggggtcttgactttgaatagtagctcttgcaacacggttatatggacgaacaattctcttaagaaagacatcccttccaacctatttcaaaatgtagccacatcagattttattacagagtagaaagtagaatagttgctactgttttgtagtaataaaaaagaactaaccacattttcacaagctaatgctgcccttttgaccttagcatgtttagttgttcccacattggccccttcaattttagtaggcttgttgttattgtacctggctatatgcttctgtaccccctgttacacaatagaagatgttactgttgtcaacctattagcatgcattaagcaacagaaatgcatggtggtaatatagtgcgttccaaataaataccatatatccatatacaaacttcagcagcattttgagtgatcacagttggaactttagagcgtttacttgtggcatgattgcttgttgtttctccacaacgttttttttgtcattcttggttgcttggtacaattgtgattgtccacatctttttctaccccctgttgtacattacatgtagcatcaacccttctcaatgaatcctacaagacttaagatatgttacagtttgacttgaaaaatgaagtaaaatcgatgttattcagctcaccttcgtaacatgcatattttgattaacttgcgattctctggcaactcctggttgcacctatattcaacaaaaaataaataagtctatactaattccaaataatactagtgcattgacttgaaaaatatgaagcaaagtcatcgttattcactcaccatcccatcatgtctgttatgattaagctgagattcttcaacaattcttggttgtacctgtattttaaaaaataattcttaatgccgcaaacaatactggtgcattgacttgagcaagataaagtaaagtcgaagttattgttagtgcatcgtactaagcacaactactatctgttcgagaagagcttgagcaggggacaaacaaagaagaataaagcaaccaactagctaggagaagaataaagcaacaagcaagctagatggctacctgcatttcattcaccaaaaatcatattttaaactaacatgcaccagcttctagactattctagaccatgttctaactttaggactattctagaagtacttcagacgaaggaaatgaattagtttccattagctcaccttcctagcatgtttgttcagactaagctgcaattctctagcaattcttggttgtatctgtattcaacaaaggaaaaaaaaaccattagatgaaactagactagcacattgagttgaaaaatatggagaaaagtaaatgtcattgaagttaccttcatagcaggcctcttctgatttagttgcaatgcttcaacaattcttggttgtatctaaaatcaaggaaaaaagatagaagtttatagttcctgaataataataccagtacaattgaggttatgcaaaatgaactatgatcttttatattgtttgaggcagatgagcatgagtgctcctcaattggcttgttcaaggaatgcctttgttcaggagaagtatgcttcatagctttaaattctgccattttctctgcaagtcgtctctccattcgttcttccattctttcttccagctgttgcatcccttcttttaaagcacatactttttgttccgctctatgtcttgcttctctctccaactataagcttgttctttctgttgatttagttcctggcaaaccaagacttaatataaaacacatgttactttcagtgacgaattcgatcctcgattcgttattatgccatttagttttatgacgtttggtaggaggattgtgttgcttagtgacaaaaatgagatgttcgtcattgagaccaaagacaaattgacatgaactaatccaatgatatatcatgacaaatgtttttctataagagaccaaccgggacaaatatttttttataagagaccaaccggcaaatgtcttaagttcatgattgaaagcaccatggcctgaatttgtaagctgtcaaaaattacttaatgtttttagaatttataataatgtgcaaaaatgaattaagtttaatgaagtaaacaggagaataaaaaattattaataaatcacggtgcgagttatttttcctaaattatccataaactaaaatactatatgaaattttagtggaattttcaaagctatattataattttagtaatacatgaattatttatgtaatttttggtgttcctacccttcgccctctctagtaggtttggtacttcctccgtttcacaatgtaaatcattgtagcattttccacattcatattgatgttaatgaatctagacatatatatctatctagattcattaacatcaatatgaatgtgagaaatactagaatgacttatattgtgaaacggagggagtaggtttttagtgttactacacatctagattgcagtgtagaccaacctgcatagtccaaacatcaaaattgagcacagttgaaattcagcgtcactaaaccaattttgccacagaacaagatactacatacagtaccacatggtgacaagaattgaacacaattccttcagcttagtcaagacgtccataagaggattgtgcataggtgagttctaggcaaaaggaactgaatctgagatatatacaggaatctatatgcagggcacatatttcataacttggattagtcggtcacaccatccagaacggctcttgcggttttaggcaaaatggaactgaaatatgaacaggcagaatagctccaagatggcatctatatagacagacactgcacagatttcgccatccagaactcagctctttcttggtccgtaaaatactgattacgaccatgttaagtagaggatcatcttcattaatttgatggacacctccagatgaacaaagaaaagatatatactgattcagagcgatgcaaccttgtaggctgttcctgtaatagaagaaaaaagtgttcagcgccatttagcgtgctaggtttaatgtctcttgtttacatgaatatgtgtaggtaagctatgaacatgtggaatcatatcataactgtctatgcgctgaaaatcgaataacttacatcgggtggaacgagtccacgatttataggcttgtgtgttgcaatttgcaactgaaggactgaggcttttctgcaaagaggttatgtgctgtggctgacgggagctgccctgtgtacaccgtgctaactttttcgggctcaaggtggcaattttcctagccgcttacgcgcacgagaagtgagccggtggtttcggtggaaatgcatccgatttcatttagcacggtattgtatttctcttggatgacgaaagaatggctgcttgcagctttgtgaacatcctggaatggctgtccaagacttccttcatcacttcggtcttctagcctggttgaatgagcagcgactcaaaattgaagaaactttttttttgcagtaggatttgacagaattgatgaacaaaaaaaggagcatcagcaacaaaagagtgtaatgggggaaggatccgaaacaaagcaacgatagtttgattaattgattgatatatatttgtggagatgtcaaaacaacaaggcagcaatacaaataagtcaactttagggttttagtatagtccctgaaaaccagaaaattgcaaatcaataatcaatttttggctgtctgaagaggctggtagtcataagatctgattttgaaggtcaggttaattttcagacttctgtgagaacgactatgaaagttcagaattggaaattcgacttcttcctgaccagaactgcatccaagcataggacatacggaaggtgcaaagtagatattttacatacatgtcgggggatgcatcggggttgtagtcttgctcctacaggatagcagctgaattataaaggagcaagtgaacacaaataattgcacaccacatgcccccatggacatacctcagcaatgaactcccatttttcatccttaagagattgccgtacaacatcaccatgatcatacacaatctgggtttcaaacaaaagaaagagaatatctaaatatgaagtcaag

SEQ ID NO: 22291 - DNA, 6749 bp, Oryza sativa
ggatgcgatgtttaacataaatttaatatatttgtaagcctcaagccccctaccccgttggatcctcatgcaaagaagaaaaagaagaaaaagatgccctccaccatttctggatttgcttcacatgatatttttttatacgtcgtactaatttatactattcttaaaaataatgtttaaattataccaatatattataaattaaacgacaacttaattacaaaaagtattatcaaacatacatactgtatctctgtgcctctgcaatctcgcaaagacgtggtatggaactagaaggaaactgcaacaacgcatggtttgaaatggttcttcacctttggcctttttcttaaaccagccagctcgccagttatttccaagcctgtggacagttcgtcgccaacgaccaacttgcagaaaatactcgagtaacaattaaacaattagaatgtttcaaagaggctagattactcccgatgcctcctaattctatgcaagttgtccagaaaagatgtacattaaaacctacaagttgcatgatattttccaggtcgagaattagctagtttgtgcgtagcgacatgcacttgatcattcgaattgctggtcttttgtgtatatatgtatgtgtctctctgtgtgtgagagagactgagcatctatatatctaccaattagcaaacatatttttcacattttgggagggagaaagtcgaaagcaacgaacagatagccaaactcaccatgcagcaagcagcaatgcctgattttttttatcaaggttattttttgttagaaatgccatatatgactttgctggtcgtatatacagaaataattcattgcatgccgttcagatagcctagcagttttgctgtagaccaaaagatggaataagctgtataaaaccacttttgtacttagtacgtatatcaagcaaggtgagcaaaataatgaattgaaagacatcttgtacgggtaaaaatcaggagagaactcactaactagggcaagttgtcaatagattcaagagtctctataacactgggtgatcttgttcgattgagcactcttaacagcaaagttgggtaactatccctctcggttaaggctgcgagacctctttatttcttgattgcctgcagcctgcgtgctgtctggatgtggtacgtagagccactatttggcgtagacggtcataatcatgtatgtactcatgtacatatcatgaaacaaatgtgtaggacaattcctgatgccgcctaatcatattagagtaatgtaactttaactttttaatttagggctgggattaatatcgcaagaacattatattctatctccataggttttagtagtacgagtttctctagaccttttttttgttttttttttgtttttgtcaatgaaagtgttccctgaattttggtgcaggtgttcatcggctccatatatataaaatgtttgctggctaaggaagatagaagtttcattaagtctatttatgtattgcagcaccaggtagatggagaaagtttaaataaggtagtatttccagataggtccgtatcataaaataagttgtgtgagaggaccataaaaagaccattttcatgactagaactatggtctacaaatgatagctagccttattaattatgtcttggcatttgtcccatgtgtagtctcgaatagcaagaactaaaccaaccagaggagtgaatggttgaagtacccaaaaactaaaacttttaccggaattaaaaattacccttaaatctgatgtagatagctctgatcggagttgacccgctggtctgatcgacacactttgatttttacaccatgtagtgtgatgagcgttcccaagagcatctgtgactggccattcttgacgttttctgtgatgatcagcgctcctagaaaatcaaagtggctatccatacgatgtttccttagaaaatgaatcttgttgcagaggcttaaaaagttcataaaaaactacatccatggacaagatgagatagctagctgtcacggttttaagtgtgtaggatatatgttacttcctccatgtttgaaatttacaacatgatacattttgcatttcaccggtgattcgtgtccaaataaataggacaatgcattatgatttagttcgtaagactctaagtatctaaccaacaatgtttgtaaaatttctgtataatgtttacaacaatagcaagatgcataaaatcaccgaggggcacctatgtgtcacctttgtccatggcagtgttttctagatccatatgttatgctcggccatttttccagtttatagagtatgattttagtcatccagagaattatgccagaattccatattacttccaatcctatactagctagttatgtccaaacaaataaagatggatacatcagaggatgccagtgtattggtttattagaaaattatagaggaatgtgtacattgcaaaaggccctccaacttgttaagaagctagccatttgtttatattcactctttgtatatttatatatatactgcatggtatttattctccaatatattatagagaagatctttatatgaactacgaaggctgcagcttcccgtaaattttaaaaaaaagtttcataaagatggatatacaaagaaggtgcatgtgtattgcatgacatgagcatttcattgcaagaacagagtatttcagagtacacaattcattcttgagatagaccagccatattaatcgtcttttctactttcagtattcacatcttaatctttttttgtttctcattttgtatattgaagttgaatataatttttggtgcagtggtgtctggtacatgttactatactctagattgtcaagttgtttagaattttgtcacaaccatttagattaaatttaagagtcaggattagaacactctcacaaagaacccatgaaaaggctatcgctgtctgacattgcttcgtgttataatccagccctatgttttgagtttgcagcaaaatataatttgcattctactggatatttatcaactcaatgccactagtaggtgcccttagttagagcatagcacatgtacattgtaaaaggcccttgaacttttgaagtgtttctttacactgcttgctgtttatataacagtacaacatagaaaattattcatatgccctggaaaggttgccacctgcctcaaattaatgacacattcaataaagctgtacacaaaaaaattacaggacacatttcgcaagaaaagagtggttaaaaggtgtggtttcgtagaaaccacgccttttaaccaatgatatctggaataacaaatgaactgcttaacctttcttggaaagcagaatttcatcaattgaatctaaatatcgagacattatgtgcagcataaaatttaataaatgtgtattactcgaagtgtattatcgtcaatccaaaaggaactcactctcctttcctaaacttatgatctttgtcatgccagttttcttatactgtgtcccctcattacccctttgtctctcccttgctgctaaaaataatgaagtcttgaagatatatgaattttggggaaataatggctgttgagatcaaattagctttggtagtaactatgatctctttctgtaaacaacaaggtaggtgctaagtcatcaggactaaaaatgttcagccaatgatcaatccaggggcattgctatcgctcctctattattacctgcagagactaacacggccaaacctgacacatttctctgtattgttgtcccttctttgcagttagactgcgaggtggctgcgtatcttgatagcctgatgtgagcctgctgcctggatgtaatacgtagagccactgtttggcaatgggtcaatttcttatatatatatgttgctacatccaaccttcctcaatggaggctcatcaggacagtagcaatgcgtcctagtaaattgctatgccatagctgccatgtaggcttgggaactctaaaagacactatacccacagtgcaagtgtggcaagtgtggtttaaaaaatttataacgggacctacagataatataaaaaatctcacccctcccacacccccccacccccacctaatcctctcacgtccccatgtccagggcggccatggcggcgtgctccggccagcgcggcggagctcggtggcaccggcggacgggtggagggacccatgcggcgatgagcaacagatccggcagcatccagcggtgcggccgaagacgccggcggcgccaagcggcgtggtggaagacggctgcgtcaacgacaccgtcgtcgacggtggaggcacagcaccgaagctgcgcggccgcggaccctgccaacgccattggcgcgcgaggtggggggcgagcttctggagctccgcccagaagacggcggcagcaccgagcggcggatctcgggaggcttcccgagccccacgcagcgacggcgagctccacctagaagatggcggcggcgccgagcggcggatctcgggtggcttccccgagcccaaggcagcgacggtgagatccccgagcgcctctactccggcgagcatccgacgagcaccacgcagcggcggcccctactttggtgagccccacgccccgagtgcccctactccagcgtgccttttttttttactccagcgtgcctcctttcttttgctttctcgtttctcgtggaggtgcccctttttttggacaaaagttgttgaggttcgtgtggccaaacttgatcacgcgaagctgggttgggaacggtccccactcccctctctactccacgcaagcgatttgcctacgtggctctacattgtcacacgccacgtctttgcattgtaaatggccttagcttgacccttgctgaggaaggatgatgagagaaacgtgtaggacattatttcctgatgcctcctaatcattattaaattatgttctaatctaaactttctcagagctgagattgatatgtcaagcagattctacgacaaaggatttcagtaggtactggtctctaaacttttgttgtctttttgtcagcaaggtgttggctgaattttggtgcaggcatgcatatgtatatatacagtctctctatgcatatatagggaacaacggatgttaatttaatgctatgacagtgtttagttccctttaaacttccaaaaatttcatcacatcaaatatttgaatatatatatagagcgtaatgtggatgaaaaaaaaaaaccaactgcatagtttacatgtaaattacgagacgaatcttttgagcctaattacgtcatgatttgataatgtggtgctacattaaacatttgctaatgatagattaattaggcttaatagattcatctcacagtttacgggtggaatctataatttgttttattattagtctatatttaatacttcaaatatgtatccgtatacgtcaaacaaattttgccaaagaacaaaacacggcctatctatattttgcagcatgaggtatatggggaaattttaaacaaggtagaatttcagacaactccgcatcctaagatgagttgtgtgagagaataatagaaatgccattttcataactacaactatagtgtacactgtacatatagtagacaaattaatttgggacaatttcgttgttgccccctactttgatgatgtctaatattgattttcgttcttacccctacttttttttaaatgaatcaaccgttttcctctgttctgttaattcttgctaatggtgttaaatgcggggtgtaaaaagataagtatacccttcaatactttcccgtacttttgacataatcagatctattgatgccatagcaataatttagtttgtcaaaattttgtaaaagttagctaaaatttgggttaaatttgaaagtggtgtacaaaagtaccggaaaatatctaagggtatacttgtccttttcacctcacatttaacaccgttagcaagaattaatgaaataggggcaaatggcttattcgtttaaaaaaaatagctatttggtcgtgcgttgcacgactttagaagcctttataaaaagcccaaaatatatacacactataagtatgataattactgtgtctactttaaatttgaacttttttgtaaaatcataggatcgacatgataaaaaaatagttaaatctagatgaacatatattttgaacgaaaagttcagacgttatattcaagatcaggcctctttgttttggttcctcaacaatgctcattctaaaattaaaatataatttcacaatgacttaaacatatatctatactggaaacagacatataaagcaaggccttgcgaattatcaaaaataattcatgcaagataaaatcttggaaaaattcatgaaagtactaatcaatataatcaaatcactgtaatttttacctaattttatatgtacatttgttacatcaaataaatcggtcaaagtagtcaaacagtggattagttataaaccttaatcagctaaaacctaccatcaccaaaatgtgcattacactgaatacaagtgtataatggaactaatttattcgaataccaggttaattataatgaataaatataatttttgtagaatttatttcctcagtttaaaccaactaaaaattcatctgcctccatccaccctattttagcatgcccacaaattaaactacagatt

SEQ ID NO: 22292 - DNA, 2019 bp, Oryza sativa
cctcgcctcattcatcacctcggcatcctcttcaaaatgccccaataagcgccaaggttggtagagcaagctaggagatcaattccattttccccaactctagccgccgagcaccaccgagatcaattccattttccccaactctagccgccgagcaccaccgccaaatcctccttctccggtgagtcaccatttgattccgtgcaggtgtcatccctagaacctcagtagcttcacgtgcccatccttttcatagttgggaagccggatgaagccattatcatcgtctggcctattcggctgccgccgggccattacacacattgtcaccaccatcagagccccgccagacctcgtgcacctaaaccgagccctagcaccacatgcaccgtgaccccgatcatggggaggaggcagcgatggtgatggggaagtggtttcgcggcggcgatggaagcgagaaggtcggcaggcggcgctggatgcgttctggtttctgggatgtggtggatgtatttttttctcttttttttattcacgtgctcactgattcttgtactccctccgtatcacaattagaagatgttttgcgtggccgtcgtactttcacgtttagatgatgttcctagccacacgtacaaaagccgacgaaattgcccctgcctcctcgatctcaaccccacgccggcgctgtattaacttcgcactcttcggttccaccacgcgcttttccctcgctcatccttcttattcaccacaaacgccaccgcccagaaacaccgctgccccagaaacaccgtcgcagaggaggagctcgcgccggactccatggacgcgccagagtcggagctcgtgccagactccttcacgctggagttgcaggagctcgcgccggactccatggacgcgccggagtcggagctcgtgctggactccttcacgccagatttgcaggagctcgcgccagattccgtggaagcgccggagtcagagctcgtgccggactcctttgcaccggagttgcaggagctcgcaccggaatcggagagtagccttggcttcatctagcaaagatggttcgcaagggagagaagttggcagccgatcttctctttctaatgtttctttttgcatgtgtggaatcttaaaattgttgcttcctttcaccttcatagcttccatcaaaacactttgtagtgttacaaacattcggtttgctttgtgtgccgaatactccatgaatgcctacaaaataagtgtgcaagaaatgagtcaatgagcaaatttgttgttgaagaatcaatgtaacatgtgtgaacaatttgatcaaattacctcttccactgttggaactagagcttctattgtttttgcattcttattgtattgaattgcttgaatagctcgaaaaaaatccaagtcaagaatgttgaaatccggagaatttggtgtttggcaaattaggcgaatatcaaatccttcttgcttagcatgctcacagaaatccgaatcatccaagtttagatgggaaggtgcattatcctgttgaatgaagattggtttgcccacatcttcttttggccatttggctcgaatagcgggcaagactttgttgatcatgaaatctctaatcacttctcttgtgatcgaagttatgggcttcaaaaccaagtctccacggacacggccggttctcacattgcctctcatagccggttgataagtaacaagtggaaaacaactaatcctaccatcaaaaatgcaattcccatccctaaaccttggccgagcacaaacacacaagaacatgagcctagggatgtaattcttgttcttacaagtccgatggggatcatcttgttcaggtagcaaataatatttttcagatttttgagagaggtagaaccatttttcatcaatgagcacaaagtcaaaaaaatccttaaaccttggaccaccatgcaaatccctcttaatcatgtcaacacacccttcaacctagacttatattagcttcag

SEQ ID NO: 22293 - DNA, 830 bp, Oryza sativa
atgtaggggtaagaacgaaattgcccccaattaattttggcttggtatttctcccgtatagtgttgagcgctcccaatagcaaatacatgcgtgacaatttttacaatatatgcagtacaaactcaacttgggtggaacttctctaaccgcttctgtaccgccggtctgaccggtgtccggtctaacctaagtttgactgcttctgtaccgccggtctgaccggtgtccggtttgactggagtcttaccgcttctgtaccgctggtctgaccggtgtccggtctgaccgccaattagtagcggtcggaccggcagtacctcggcggtcggaccggcagtacctcggcggtcagaccggcttcagacatattttttttctaaaaattctcaaattatttttgcactcggatatatgcctattcgatctacttgtcgtgtcttagtactggattcctaaatttttattatctaaccccagtattgaggcttcgacttttgcttgtgtgtaggctttggtggcaaggaaggggagcgtgtgtatcgtggattccggttgttcacagcgcatgccccgtgataaaaattggttctcctccctcgaacaggcatccaagactagtgccgttttggctacaggtttggtcaaggtaaatgacaagtttgaattgaaaaacgtagctttggttgaggtcttaaattataatttgctttcagtttcacaaattgttgatgaaaattttgaggttcactttaagaaaactagaagtaaagtatttgattcttgtggtgattctgtgctaaatatttctcgctatggaagagtgtttaaa

SEQ ID NO: 22294 - DNA, 943 bp, Oryza sativa
ggtttttaatataagcacacatctgctttgtcaccttgtgaaagagatccgtattctcgggcctatgtacctacacaacatgtttcctttcgagaggtacatgggcgttctgaagaagtatgttcgtaaccgtgctcgtccagaggcaagcatcgccaagggttatggaacagaggaggtcatcgaattttgcgtagaatttatcgaagaccttcgcccaatcggggtaccggaatcacgccatgaagggagactacggggaaagggaactctcggaaggaaagcaattatgacggtagacaacaatttattccgtaaagcccatttcactgttctgcaacactcttcattggtagctccttacatcgaggagcacttggctctagttcgcgccaggaacatcggtaagtccgatgtatggattacacggcatcacattgatactttccccgcgtggctacgacaacatctcatgggtaacgagtcgatcaaccaacaacttgccttcctggcgaggggaccgtctgggtcgatcgcgacattccagggatatgagatcaatgggtacacattctacacgagagcccaagacatgaagagcacgaaccaaaacagcgctgttcgtgtcgatgccatgggacacgatggaacaactgccacgtattacggtgccatcgaggacatatgggaacttgactatggtcctctcaaggttcctctgttccggtgccaatgggttaggttgactggtggaggcgtaatgattgatgacagtgggatgacaactgttgaccttaacaaggttggatactcggacgaaccttttgtccttgccaatgatgtaacgcaagtctttttcgtgaaggacatgtctagcaaaggaaagaagggcagagggcctgatgagcctaagcgtcaagtggttctcccaggcaaaagaaaa

SEQ ID NO: 22295 - DNA, 705 bp, Oryza sativa
gtcctcgccgccgcctccgcctctccgctgccgccgcatctctggggtgagagccgccgccgccagatctccctttatctctcgatctctccgatctcagctcgatctctctccgtctctctccgtcgccgccgccgccacgccacgccgccgccgccacggccccgcaacgccacgccgccgccgccgccgtcgccacgccaccgtcgccacgccgtcaccacgccgccgccgtcgccacgccgtcgccacgccgccgccgtcgccacgccgccgccgtcgccacggcgccaaccgccgccccgatgccgccacggccccgcaacgccacgccgccgccgccgccgtcgccacgccaccgtcgccacgccgtcaccacgccgccgccgtcgccacgccgccgtcgccacgccgtcgccacgccgccgccgtcgccacggcggcaaccgccgccccgatgccgccacaccgccattaacgaacgagaacgagaacgatcgaacgaacgagaagcgagaacgaacacgtcaacgtacgttgccgtgagaacgtgaacgagaacgagaacgatcgaacgaacgagagcgagaacgaacacgtcaatgtatgttgccgcgagaacgtgaacgagaacgagaacgatcgaacgaacgagagcgataacgagaacgatcgaacgaagacaagtgagaacgagggaacgaa

SEQ ID NO: 22296 - DNA, 554 bp, Oryza sativa
cgtgcaggcggaaacaccagtcggcggcggacgaggcggcccgtcggtgaagacgtagacgcccaacaacggtggcataataggccagccgtgcaggcggaaacaccagtcggcggctgacgaggcggccggtcggtgaagacgtagacgcccaacaacggtggcataataggccagccgtgcaggcggaaacaccagtcggcggctgacgaggcggccggtcggtgaagacgtagacgcccaacaacggcggcataataggccagccgtgcaggcggaaacaccagtcggcggcggacgaggcggccggtcggtgaagacgtagacgcccaacaacggtggcataataggccagtcgtgcaggcggagacaccagtcggcggcgacgaaggcaagccggtcagtgaagacgtagacgcccaacaacggcggcataataggccagccgtgcaggcggaaacaccagtcggcgacggacgaggcggccggtcggtgaagacgtagacgcccaacaacggcggcataaaggccagccgtgcaggcggaaacaccag

SEQ ID NO: 22297 - DNA, 752 bp, Oryza sativa
tatgcatgtttgggaaggcttaggccgactcccagtgcttggtggctatgattagtcgggcagagtgtttaaacgtaaggagtcatctgctcggggaaatcaaaattgacaagaggagaaatacatatttataaatattttaaaatacttgattttttctcgagtattatatttatatcagatactactcatcctatatgtttgttctgcaggatccagatccagatatgcataaaagggattcatggctttaagcttatctcttacgctccaggaatggatcagtcagaacattaccaccggctcgcttcgaccgtcgccgactggtgtttccgcctacacggctggcctttatgccgccgttgttgggcgtctacgtcttcaccgaccggccgcctcgtccgccgccgactggtgcttccgcctgcacggctggcctttatgccgccgttgttgggcgtctacgtcttcaccgaccggcttgccttcgccgccgccgactggtgtttccgcctgtacggctggcctttatgccgccattgttgggcgtttacgtcttcaccgaccggcttgccttcgccgccgccgactggtgtttccgcctgcacggctggcctattatgccgccgttgttgggcgtctacgtcttcaccgaccggccgcctcgtccgccgccgactggtgcttccgcctgcacggctgacttattttgctgccggtgatgggcgtctacgtcttcaccgaccggccgc

SEQ ID NO: 22298 - DNA, 604 bp, Oryza sativa
gtacgacatttacacttagcatacatgacttagattgttaaaacataaatgtctcgtgacttagcagatgtttcttgtatcaacagatggctgaccgcgatgaggaacagatattgtacgatacaatcgcggagggaagcagccagtactggaatgaagaagaggggaacgaggatccaaaccagtacttgaacgaggaagggaacgtggagagggatgcggaggggaaccaggaggaggaggctagtggtagtcaaccctccgttggacagaagagggcacgcgggcaacgaggtgcagcgaagaagcttgagggtcggcacatcataacggaagtggaagaagatggacgtcctagtgccccggccgaagccgccaagaactatgtacgtcacagcggttgggttgtgcgggataacgtgcctgtcagtacggtgtactggcgaagaacaagggcacgaggagatcatgagagctttgtcccagattcggagaaagagatgctgtggaccacaatgctcgagacattcaccattcctgcgggtacagaggacaaagtgaaaaggtggactctgaagaaaatggcagaacagtttcagagctt

SEQ ID NO: 22299 - DNA, 718 bp, Oryza sativa
ctacgtcttcaccgaccggccgcctcgtccgccgccgactggtgtgtccgcctgcacggctggcctattatgccgtcgttgttgggcgtctacatcttcaccgaccggccgcctcgtcggccgccgactggtgtctccgcctgcacggctggcctattatgccaccattgttgggcgtctacgtcttcaccgaccggccgcctcgtcagccgccgactggtgtttccgcctgcacggctggcctattatgtcaccgttgttgggcgtctacgtcttcaccgaccggccgcctcgtcagccgccgactggtgtttccgcctgcacggctggcctattatgccaccgttgttgggcgtctacgtcttcaccgaccggccgcctcgtccgccgccgactggtgtttccgcctgcacggctggcctattatgccgccgttgttgggcgtctacgtcttcaccgaccggcctgcctccgtcgccgccgactggtgtcctcgcctaaacggttggttggtcacaccaccgttcatgggcatccacgtcttcaccgaccggccacctcgtccgccgccgactggtgtttccgcctgcacggctggcctattgagccgtcgttgttgggcgtctacgactccaccaccggcctgcctccgccgccgccgactggtgtcctcgcctaaaacgtgggtggtcacaccaccgtcatgggcaccacgtct

SEQ ID NO: 22300 - DNA, 7811 bp, Oryza sativa
  unsure (1)..(7811): unsure at all n locations
ctcatgcattaactgatgaatcgtggattaacgccatgcatgaagaacttgaaaattttgagagaaacaaagtttggactttagttgaaccaccttctggacataatattattggaaccaagtgggttttcaaaaataaacaaaatgaggatggtttgattgtgacaaataaagctagacttggttctcaaggttttacccaagtggagggtttggattttggtgaaacttttgctcctgttgctagaattgaggcaattagacttttgttagcttttgctatttcaaaaggttttaaattgtatcaaatggatgtgaaaagtgcttttctaaatggttttatataggaggaagtttatgtcaaacaaccaccaggttttgaaaatcctgattttcccaaccatgtttttaaattgtctaaagctttgtatggcttgaaacaagcaactagagcatggtatgataggcttaagaattttttgcttgcgaaatgttttacaattggaaaggttgacaaaacacttttagttcttaagcatggtgataatcaactgttcgttcagatttatgtggatgatatcatctttggttgttcaacttacgctttggttgtggagtttgctgagactatgcgcagggagtttaagataagcatgatgagtgagttatcatactttttgggattgcaaattaagcaaacacctcaaggtacatttgtgcatcaaacgaagtacaatgttaacatcaattggttctacagctgtgttggatcctgatgaagatggtgaagctgtaactaacaacatgattgaatctttatcgtatctgattgcttctaggccagacatacagtttgctgtgtgtttgtgtgcacgctttcaagcttctcctcatgcttcacatcgtcaagcggttaagcgaataatgaagtatttgaatcatacacttaagtttggaatttagtattctacttcatcttctatatgcttgagtggatattccgatgctgattttactagttgtagaattgataggaaaagtactagtggatcggaacatgtcattttcttggtactgtaggatcgtaaagggcctttacaaccccaaaagctagccattgagatgaagggctcccccacttatatcttaggtcatttgcccttccacattcaatatgggactattcaacaatttcgcccttcacacattggtgccccttagcccttcaccaccccttcactgtatacaggccccacagggccacggtccatcagatatacaggccccgcaggcacccacagtccatcgggccttcacacactgtgtccatcgggccagagatgttaaactagccaggctctgataccaattataggatcgtaaagggcctttcccaccccaaaagctaaccattaaggtgaggggctcccccacttatatcttaggtccttttcccttctacaactaatgtggactattcaacaaaactcgtgtaaaccacaaccaagatcttaactacttaaaaaattaataactttccatttgtcacttaatttttcgtccatatacatgctaatttttcatccatatactcaattttttttgtccttcgtgcttgtgtgtccgccttgctcacgatccccttcatcccctacgcaaccttcgtccgtctctctgtgagaaacggatcgaatagaatacaagtatggacacatgaacaaatcaacccaacttccccatccaaaacccaatcatatgaacaaatcggatcaaaaacatcttgaaaaaatcaagaagaaaataaagagaaatcgagtcggagaagagataaaatcaagtgcacactgatcctaaataaggggaaatcacactatcgtctgggttggaggctaactgggagtggcctcgctcgatccgcgtcaccagcacccaatccgggattgatccgtgtcacccctgtccgatccgatcctctccaatgtccacagtttcgcctgttcttcagaactccaaccaaaaccaacgagctccaagccaccagatccggccacaagatatcgaggtcagctaaatctggaaggtatgaaaattaaggaggcgggagagaggagagctcgaggaaattactgaatccgaaagctaaaggcattgccgccgcaataatcttcctcctcttctcctgatcattaccggcgtcttcttcctcacaggctgtaccaccgcctccctgcacaagctccaagaatcccatgcaccttcggcattttctcctccctccagctgccatatcggctggccacgagtccaaagtcaccaggcaatgatgagcagatggatacattaggggcggcgggctgagcggaatatcggcggcgatgagggtgaggaaagaccgaaagaggacgagggagaaagaaccgctcacgtggataaattattgggggtgcgattatgtttcttttttcattttttctattttctaaccactcacgcggatcacgatcggatgggggcagcgagctgaggggaatgagagcagcgaggaaacaacacttatttttttcttttctctaactgcttacacagataattatgacatataacaatttcattcggttgatatctgtgtagaacattagcttgattcatcgatttgtacttttcaaaaatatctttttttttcatgattgcatgtataagagtacatctaactgattgattcaaatgttgatataatattttatatggtattgtagagataacctcacctaactaaataaagaggagagatcatacacaaatccgcaaaaccaaccaaacaaaatatcttctgaaccgtctctcttatggaagcaaccaaacaaaatattacattagccaaacaaaataaattcaagcaacaaaacagaggaggaatgtttatcctcttagccatgtcaaactcaggctgtatgagggagataagctagactaaggagatgcgagcaacctaacacatggggaggatagggtagctttgttgatgcatgcctatggttcttcatttaaggatgttctggccgagtattgttacacgaacttatatcctaccctactttaaacatatggattttttcaatcgtcacgctttattttgttcatcgcctacatgaaccccgctgaatcgcccgattgagtcaatcatttcattttttttccatacgtgtttaaattcatgcattgtgtgatataaaatgaaaaattaaaaaaaataaaaaaaggtaaagggagatgagttttgtatttgcctttagaaaaattaaaaaaaataaaaaaaggtaaagggagatgagttttgtatttgcctttagtatattcttgtgcatggtagcaatacttgttagataatatggaactagactttgtatgcattttttactttatatgaacttttgatattgtttttgatagtgtaacgtttcatatagatagagtagaaaattacaagtctatattcctggagggctatagcccaaagggaaataaaaacaaccatgccacacatctacaaccaaatcctgcatgcttcgtatattctcgaaaatactttatgcttgagcaatattattaagaatggagaagttgtaccgatcaaattatcaccaattatatagaacatccatttggaatggcctgctgactgagtcagtgtggagattatgggtaccccatacccacacggcatggttatccgactagttataggggataacttatatctatgtaatatgtaacagatcatgacttgggtgttacgtttccttgtatattacggaacggcgtaaagtcctgatttgggaaaccgataccgtattggttaaggtttctatcttgtaatcctgctccccatcctatataaggtgggcaggaggccctctagggggcagatatgagacaacctgatcatcagatcaatacacacccggcggattcaaatccccaaacaggagtagggtattacctctcattgagagggcctgaacctgtctaaatcctttgtctccacatccatccacttttaggtctcgtgcgctaccccttttattattgccgaaatcatgtttcgacagttggcgcgccaggtaggggttgcgtcgagttttccgtcgagaagtgcgatggaactctgtgccggcatcatcggtgctactcttgtctttggccgtgatcctctcaacaaaagggcagggtcttcgtcgccaaaaattctatctggatctggtttatcgttctaaattttcttatataaattagaattaattcacagatcactaattattatttgatctattattttatacatgtaccgccggccgccttcgtcgctgccgattggtttcatcgcctccacagttggtgtgcgccgctgccgttgcnnnnnnnnnnnnnnnnnnnnnnnccggcctgcctccgtcgccgccgactggtgtcctcgcctatacggtcggttggtcacaccaccgttgatgggcatcgtcatctacaccgccggcctgcctccgtcgccgccgactggtgtcatcgcctatacggttggtcggtcacaccaccgttcatgggcgtccatgtcttcaccgaccggctggccttcgccgccgccgactggtgcctccgcctacacggctggcctattatgccgccgctgttgggcgtccacgacttcaccgccggcctgcctccgtcgccgccgactggtgtcttcgtctatatggttggttggtcacaccaccgttgttgggcgtctacgtcttcaccaccggcatgcctccgttgccgccgagtggtgcctccgcctacacggctggcctattatgccgccgctgttgggcgtccacgacttcaccgccggcctgcctccgtcgccgccgactggtgtcctcgcctatacggtcggttggtcacaccaccgttgatgggcatcgtcatctacaccgccggcctgcctccgtcgccgccgactggtgtcatcgcctatacggttggtcggtcacaccaccgttcatgggcgtccacgtcttcaccgaccggctggccttcgtcgactggtgttttcgcctgcacggctggcctattatgccgccgttgttggatgtctacatcttcaccgttggatcaccttcgttgccgtcgactggtgtttccgcttacacggctggcctattatgccgccgttagtgggcatcttcgctttcaccgtcgaccgccttcgtcgccgccgactggtgtcttcattgttattgatggacgactttgttcccacattggccacttctgccatcaccaaggggaatattacaaagctaagtcatcatttattttattctttatatgatatttttccttttcctctgcctcactacaccaattggtcttccattgagtagtgagtcgggggctagagatgttatatcatatttttcataatatttatcttgattgcttgcgacataatctgagtacaaaagtacctatcgagttatggagttctatcttcctatgctttccgtttggtttgccaatggatagttgcctttaggccgattcctagcacccgggggctcgttggatggaccgagtaacgcaaggtgctaagtattattcggaataaatcaaaagcatagagataagataatttattttctgctcttaataattgcaaaagtacccgagtagtaaactccgatccgtgaaactttgttccattaatgacgaactcatgtcactcatatgcatgtttgggaagtgcttaggccgactcccagtgcttggtggctatgactagtcgggcagagtgtttaaacgtaatgagtcatctgctcggagaaatcaaaattaacaagagaagacatacgtatttataaactgcttgattttttctcgagtattatatttatatcagatactactcatcctatatgtttgttctgcaggatccagatccagatatgcataaaagggattcatggctttaagcatatctcttatgctccaggaatggatcagtcagaacatcaccaccggctcgcctcgaccgccgccgactggcgtttccgcctgcacggctggcctattatgccgccgttgttgggcgtctacgtcttcaccgaccggcttgccttcgccgccgccgactggtgtgtccgcctgcacggctggcctattatgccgccgttgttgggcgtctacgtcttcaccgaccggcttgccttcgccgccgccgactggtgtgtccgcctgcacggctggcctattatgccgccgttgttgggcgtctacgtcttcaccgaccggcctgccttcgccgctgccgactggtgtttccgcctgcacggctggcctttatgctgccgttgttgggcgtctacgtcttcaccgaccggccgcctcgtcagccgccgactggtgtttccgcctgcacggctggcctattatgccaccgttgttgggcgtctacgtcttcaccgaccggccgcctcgtccgccgccgattggtgtcttcgcctatacggttggttggtcacaccaccgttgttgggcgtctacgtcttcaccgaccggcctgccttcgtcgccgccgactggtgtctccgcctgcacggctggcctttatgctgccgttgttgggcgtctacgtcttcaccgaccggccgcctcgtcggccgccgactggtgtttccgcctgcacggctggcctattatgccaccgttgttgggcgtctacgtcttcaccgaccggccgcctcgtccgccgccgactggtgtttccgcctgcacggctggcctattatgccgccgttgttgggcgtctacgtcttcaccgaccggccgcctcgtccgccgccgactggtgtttccgcctgcacggctggcctattatgccaccgttgttgggcgtctacgtcttcaccgaccggccgccgcatccgccgctgactggtgtcaccgcctgcacggctggcctgttataacgccaactgatgctatcttcttcacggctggctacatcgctgtcactactaataggcatcagtatcttcaacacaagctgcctacgtttgccatggctgccgactagtttcttcacttccatggctgcatgattctgccagtgttgattggcctattatgccgctgttgttgggcatctacatcttcatcgccggtcgtctcgtctgctgctgactagtgcccttacctctacgtctggtttatacagctaccactactgatggacatcatcgtctttcgtcgccgactggttatgctgtcgccgactagtgcttttattttcacaactgcgcgtcttcgctaccagcttgcttctattgccgccgactcgtgttcacttcatcacggcgatgcaactttgtcatcatggtggagcgacttcatctttattatcttcgtcactggcaaactctattgctgctacttcgcaagttttgcttcttcaccaaccatgacgtctttgtgaacctcgacatctcggcatgcgatgccgtgttattttactacaacaagtggctctccaatattcaggatttctacttggacatcttcaacacatatcttcaatcaagcaatgactattcgatgacaagaagctacagttctcgactctatgtttagttgtttcccaactaatcaaagagtcgggggctacacaaatacaaggctcaaaatttgacaaattttatgtcaagctgaagaaatcaattcatcaacccacgagtcaactccaggagtcattatcttcatctttgcttcagagc

SEQ ID NO: 22301 - DNA, 945 bp, Oryza sativa
tattatgccgccgttgttgggcgtctacgtcttcaccgaccggcctgccttcgccgctgccgactggtgtttccgcctgcacggctggcctttatgctgccgttgttgggcgtctacgtcttcaccgaccggccgcctcgtcggccgccgactggtgtttccgcctgcacggctggcctattatgccaccgttgttgggcgtctacgtcttcaccgaccggccgcctcgtccgccgccgattggtgtcttcgcctatacggttggttggtcacaccaccgttgttgggcgtctacgtcttcaccgaccggcctgcctccgtcgccgccgactggtgtcctcgcctatacggtcggttggtcacaccaccgttgatgggcatcgtcatctacaccgccggcctgcctccgtcgccgccgactggtgtcatcgcctatacggttggtcggtcacaccaccgttcatgggcgtccacgtcttcaccgaccggctggccttcgtcgactggtgttttcgcctgcacggctggcctattatgccgccgttgttggatgtctacatcttcaccgttggatcaccttcgttgccgtcgactggtgtttccgcttacacggctggcctattatgccgccgttagtgggcatcttcgctttcaccgtcgaccgccttcgtcgccgccgactggtgtcttcattgttattgatggacgactttgttcccacattggccacttctgccatcaccaaggggaatattacaaagctaagtcatcatttattttattctttatatgatatttttccttttcctctgcctcactacaccaattggtcttccattgagtagtgagtcgggggctagagatgttatatcatatttttcataatatttatcttgattgcttgcgacatatctgagtacaaaagtacctatcgagttatggagt

SEQ ID NO: 22302 - DNA, 991 bp, Oryza sativa
gcacagctggcctattacgccaccgttgttgggcgtctagtcttcaccgacaggccgcctggtccgccgccgattggtgtcttcgcctatacggttggttggtcacaccaccgttgttgggcgtactacgtcttcaccgaccggcttgccttcgtcgccgccgactggtgtctccgcctgcacggctggcctttatgctgccgttgttgggcgtctacgtcttcaccgaccggccgcctcgtcggccgccgactggtgtttccgcctgcacggctggcctattatgccaccgttgttgggcgtctacgtcttcaccgaccggccgcctcgtccgccgccgactggtgtttccgcctgcacggctggcctattatgccgccgttgttgggcgtctacgtcttcaccgaccggcttgccttcgccgccgctgactggtgtttccggctgcacggctggcctttatgccgccgttgttgggcgtctacgtcttcaccgaccggcctgccttcgccgctgccgactggtgttttccgcctgcacggctggcctttatgctgccgttgttgggcgtctacgtcttcaccgaccggccgcctcgtcggccgccgactggtgtttccgcctgcacggctggcctattatgccaccgttgttgggcgtctacgtcttcaccgaccggccgcctcgtccgccgccgattggtgtcttcgcctatacggttggttggtcacaccaccgttgttgggcgtctacgtcttcaccgatcggcttgccttcgtcgccgccgactggtgtctccgcctgcacggctggcctattatgccaccgttgttgggcgtctacgtcttcaccgaccggccgcctcgtccgccgccgactggtgtttccgcctgcacggctggcctttatgctgccgttgttgggcgtctacgtcttcaccgaccggccgcctcgtcggccgccgactggtgtttccgtctgcacggctggc

SEQ ID NO: 22303 - DNA, 593 bp, Oryza sativa
gactggtgtttccgcctgcacggctggcctttatgccgccgttgttgggcgtctacgtcttcaccgaccggcctgccttcgccgctgccgactggtgtttccgcctgcacggctggcctttatgctgccgttgttgggcgtctacgtcttcaccgaccggccgcctcgtcggccgccgactggtgtttccgcctgcacggctggcctattacgccaccgttgttgggcgtctacgtcttcaccgaccggcctgccttcgccgctgccgactggtgtttccgcctgcacggctggcctttatgccgccgttgttgggcgtctacgtcttcaccgaccggccgcctcgtccgtcgccgactggtgtttccgcctgcacggctggcctattatgccgccgttgttgggcgtctacgtcttcactgaccggcttgccttcgtcgccgccgactggtgtctccgcctgcacgactggcctattatgccaccgttgttgggcgtctacgtcttcaccgaccggccgcctcgtccgccgccgactggtgtttccgcctgcacggctggcctattatgccgccgttgttgggcgtctacgt

SEQ ID NO: 22304 - DNA, 6212 bp, Oryza sativa
attctcggccttctgcctttttcatataccaaccagctgttggcaagctagttccaagctcgcgaatagttggccatcaacgacaaactttccagtcatttctcgagtttcagctgaacagtccaagtgactcagagtgtgtatcaattgaacaaccggagtgactcaaagaggctagatcactcctgatgcctcctaattctacgcataaaatattgtatagcagagcctataagttgcatgatacatttccaaggttgaggataattagctagcccgtacccagtgacaggcacattaggattgctgtccttttgtctatatatctaccaatagcacatagcactatatattgtcccacatatgcatgtattgccatggaccacatagtatttagaaatatttaccctaaagtaatattaagaatattttcaataatctagtatttatgatactttatatagtactttccactattcttttgacacattgttaaattaaaccagtacaacacgtttttagcaagcacatgtaacttatcagtcccagtcccactaatgtagtatgaattcatttacaactttcattgcatcacaccaatttgctagtaaatttgttcccaatgattactccatcaagtacaaccaaatatgcatgttcgagctagaaggctcttaatttagcactaacctttgtttgatctccatatataatttgatattttacacaacgcgtttaataaccctctcaaaattaacctagacgcggcctcagtgattagtgatgtgtgatggctcctggacctacaaatccacaatgaggaggatggctcttgttagcttggacttacgtccctccagtgcagaaacaagcaggaaatgcgacatggtgcgtgttatctttgtgccggcaaggtttaaatttgccccctactggtttggaacggttcatccactctgcgcatttttcatgacccccaagcttggtattttaggttccgtcgagatgagggagcttgcttaatttcatgcgcatcttcaggatttaattttaacaggcgtttcaagagagtcttgcagatgtcaattggatggatgtggctatgctattcccgatgccacctaattcgacacaagttgtccaaacatggatgtagagaaactatatatactccctccatctaatttcggtagtcatattttatcttggcacaatgaccaaggataagtaattgtactttatcatccattttaacatgctactagttattcctcgtaaacaagcgattcattaatagtaaagttctcgatgctcatatagccaatcttgtgtggaaaagtagagaatcacacattcaatctgataaagtcattaagaggataggtggctggattgaaatatgcctatcaaaaaataaatctttaagatttggaaatattcctatcaaaatagatagagtatttcaatgttaattagagaaagagtaaaatacagtagcggcccttaaacttgcgggcggatgtcatccaggtccactaacttgcaaattgtgtaattaggccactaaactttctaaatgtaccatcgccggtccaaaatgccgtttgaccgcggtcgcgccaacgtggcatgccacgtgcatagctgagctggcccgcaccgtgcgtgacacaccgcccacgccttgtcgtttttcatccaggtccctctctttttctcatttggtttccaccactgcttcttcttccccggagcgcccaaaatctgagcggcgactagggatgcgattgagggcaaggtttggcggcggagcaggtcgcggcaggttcggcggcggagcaggtctcggcagggttcggcgacggagtatgtcatggcagggttcactactagaaaaatcatttgttgctacgaaaaaaatcgtggcatcaatactaaaattgtggcaatagatccatgttgccacaattttaaaatcgttgctagccgtggtaataaatagcgtcgtaataggttattgcaacgatttttattttgtggtaataaatttagatgttgccacggaatggatgtggcaaaaagtcatattgcaacacttcacgtcgttgtaataaaaattattgccaccactccatatgtggcattagttttatgtaccaaactaaaagtttaaatattaatctatcatcctatctattttatctatttattttttttgatattgtgtcttggctaggattcgaacccaagacctatccttcacacatgctctcctttaccaactcacctacgcatcaattctgttgaaaatgcatatcgttccatttgagcctacgtaactgagatttgaatcatagatttgaatatctaaaagatttcaaatgaaaaggttatcacctataaaattgtagatctcgttgagagctataatttccatataaaatttgtctcaatccgtgttcatatgaaaaaattaagttaaattatgagacaacaatttttttattgcaacgaatttgttgatcgtggcaacaaaaaatagtgaaaaaaagtaccatgtactatgtaaattgccacaaaaattaaaattgtggcgatagaacatgttttttgcaacaatacgattttttgtggtgatatctcattttctattgcaacaaaactactaaataaaacaacgattgtagatcgttgcaataaaatataattatttaccacggaaaaattatcattgcaatagtacaatatattgctacgaattattttttatagtaataatttggtggcaatagctcaattatcttgtagtggttcttcggcggagtaggtctcggcgggcttcggcggcagaggcgatggcaggctcgagctccagtaggagcacaacacggtcggcgaccgaaatatccaggcaaggtaaaacctttccatctcccattcggtacctggagagtagtttgttgaagtcagttggtttattcattttgaatgtgcagaatggtggatgcaaattatggcagtggtatgaaccagggacaacgctgtatttgcagcaggttttgaatgatttagtcagcactgttcgtgaagtgaagacagagaactctgaaattagagcatcccttgccaactcaagagctgtgattgatggacttgtcactgaacgcaatgtctatgaagcaaagagcatgggacaaaaagaggaatgtggctcatttgctgaaatggcctgtagaatcaagatgttagaagagagtagatgatttatgttgtcagtaattgttggttttgtagtagtcatatttgcactattgcttcttaggtagataccaaagtttgatggatatggatgtattggtgctggtgtgttttgtgtcagctaataaggcacttgagtgaccttttgtgtatgctgaatctgaaccatgtatgaaaaatgtatgctaaatgctattatgtgaagctgaaatatgagattttgttctgaaaatcgacatctctaattttttttcagcagacaactgttattttgttctagcttatgaaatgtcttgtaaaacgtcatctagaaatagcaaacatgcatcatgcattacaggcagtaatttcccatattcatcacaataccaaatttctggcatttagtagtatttctagtactacattcagtgaacacatgtctggcatcacaaaattcccatgttctatcataaaatagccgcaagtttggcagcacaaaatcaagcaagcatgcccatgaaatccatacagggttcaaattttggcataacaaattactactagcactaaaggaccatcaaacatatggtctaacacatatcacttgtttgtagcagtagctttcttcccgggagctctgttctttgaagtagtagcagcaactcctgaaactcctttagttgtacacttccttttgttggccctagattttccctcttttgttgctgtggtcataggggtagatactacagctggctagtttgaaaggatgtactggttatctgggagaggaccatgtgtagtttccatttgactcacttgtgatgattcctcaaacatctgtgcaaccataggattaggaacttgtgatagtaattggtcatatgcagactgagattgggtcagcacctacaagtttacaaaggtaattaagatagagttataatagggtagtgataatagagtgataagatagagtattgtttcattacctctgctggttcttgctcagattcatgccactcttctgtagaacttgcagctgggatcctacttgtcttcagtttgggtctgagtccagcctttctcagtgggcaccctttcttgttatgtccaggctctttgcagtaagagcagtgcatctccacaccatgcttggacattttagacccattttttccctgtacctcatgtggtgctttcctcctagacttaggtggtctgccaacctttttctcatatattggaggcttcacttctggcccattcacctgagcccacttagtcatatcattgcagggccaaatgttaaatgcatatgcagggtggaagaactgactcagcactaattctctcactccttaagcatgagatagcatggttacaagggatgcctgtcagatcccatctcctgcagtcacaatgtttagcactaaggtcaacaatgtactaaaaattcctatcttccacctgaaaaatccctttcccggctggcaaaacataacatgtgtttgccatatctgcatttttcagtactttcaatatcatttgctaattggactaactttgcaaaccctccaagtgtcatcttatcatttgctctaaaagtttcaatgtacttctcagatagccatttagcagtacaccttttcagcacccattccttctgacatttatgctccccaagatatgtcttcaccatcattgacttggacctgctatcaaatgatgcatataagttccatgggcaaccctcaacacaatgggccctaagtcttttttgctcattcctaggcatcttgatgtccactctagccttcaaactgtactctgttatggcctttctaagtacttctactgaaggaaacaccatgccaaccttaaaaactgggttcttaacatcctctgccatgaaagccttaaactttaatctcacttcaccatcatcatctgaatctgggagctgcaaatcttcatcatcagtggaaacttcctccccatcagaatttctaactactatttctttccccttcaactgactgcccttagctttcttccaaaactttgccttgcagtcagataagtcttcaacacccacatcaacattgtcaacatacaagtcatcatttgcatctgatatatcatagtcactatccataaaatctgggtcatcttctaagctaccatcactgtcactgtcatcttatttgtttggcaccttcctatcagcagttgacatcttcctaggactaagcaccttaggcaattcactaataggattagctactacatcatcccaatctacacctgcaattgtgtcaccctgatcaaagtagataataaaattcttaaccttgtgcacaactgatttcatcacttcaaagtcagccctagtagatataaccctaaggccatcttcaagagtctttccagggagcaaccaataagccttaaaatctggagtcatatcatacccaagcatagctaaaaattcatccaaacaaacaatatcccatgttcttgcttcacagtggtcaatccaatttatcgtttgatctacatatgccctattgctaccctgaccaacaaaaaaaccaccatggtgtacctcagcggtgaatttaccatcatcaagacctgcattgcaatcctaattagcggtattactctcatgttctagcctactcgagaacaatgtcaggataatcatcctacaggaaaaaataacatctttttgcataatcaaacgccatattcctttgtatctatctaccaacatcaatcagtgcatgctaaccttgcagattaatggatgaaaatttgaaattacactcactgtacaacggaggcccttccccttccaagcggaaaatcatgccgcctccccgcgattatggccagcgggaggccgcaacagccaatctcgcctctttgtgctttcgctggaaccctatttctcggcgatcactccc

SEQ ID NO: 22305 - DNA, 22647 bp, Oryza sativa
aagatcaatccatctttactcccgggtggtatcaccaaccgggactaaagtggtaatcttctagttctggttggtagtataaaccgggactaaagatcctcgacccccggacatacatctgacaggagatgaatcgggactaaaaatcatctttagtcccggttggtgtactaaagatcaaaatttttttaactgagactaaaaatcgtttttattcccggtttttaatggaaccgggactattgtgggatttggtcgaccgaccaaaaatggtttctccaccagcgatggtatcaaattgtttccgattattagatatagaatgggcattgttagattcaacgatcggaaacgatctgatactgtgaggtaccggtacattaagacttttttttttaccggagtaaatctcttatacactacactaacacatgcaagtgctcccccaggtcattagtataaaactaaaaaggtgccacagcaacctgtactgttctgttgactggtttcactgcttgcctcaagtggttatgggtgatgaaccaagtgctaaatgagcgtgcaaccttcgaattgattaaaacatttcgctttgatttgtatgggccatgtgaacaaagaactggattgagcatcatcccatgggggccgctgggctaatatgacaatggagagcaataggaatgcaagcagccagcgggcggcctgcatgctagcttaagctatggagccacattaatactatgtaccaatttcttcgaaccggtatctattggtacttaaaggtaccgctttttaattcttttttcaccttgtgaatgtgggaaacggtcaattggtgccggttttaaatgaatcggcatctataagccgtcacttattaaggtttttgtagtagtcgaaggagatttggagattaaggagagaataaaggagggagggaagaatataataagtgaggtgcgttatctcggtcttttcaggtctctttacactccggctatgaaaattgattttgcaggcatacgcttaatttgccaattagtctacttaagaatttgtccacaaaactcgatattcgcaagaggttaataaccatggaaacttggtgtttttggaagcagctataagcggttatttttctcgtccgcctgcaaaataaaagggacgtgttgtaaaaaaaaaaaacttttttcaagtattgtgggaggctaggagtattttgtgcacacggtcgccaattctatgttttactcttcctacctttcaagcaaaagtacattatttttccatttgagatgaagtagaaaaattaggagaaagtaatgtgaccgaaaagaaaaatacgagggagaaaaaaagagagaagaaaaataacttttgacggtattggtttagtcgtgcaagcccttgtgggaaatccaattgaaacgacattaagacgaaaacagttcgtacatctttctttgtttcattcatctcagaattaccattcactagtactgccatcccattctcgacgggcagatgcatgatataacttaagacaatatcagttgattgtgatgagctagatcgaggcgcgcatcaaactgtcaagcatgtagaagccttatttcctggagctaaaccatgagtcccaatgcctcccaatactaaactagccccttctttcttgttacctaggcgccatcatatggctaccagtgccgcttgcaaatatgcatggatgactatatatttgatgattattttctcagtaaagacatccaacttatattataagtactatccctatctgatattgcctcgtactccctccgtcccaaaaaaagacaaaccctgagtttccgtgtccaacgtttgaccgtccgtcttatttaaaaaaaatataaaaaaaattaaaaagacaagttacgcataaagtattaatcatgttttatcatctaacaataatgaaaatactaattataaaaaacatcatataaaacggatagtcaaacgttagacacggaaactcagattgtctttttttttttttaggacggagggagtacgtgtttcaatctatagccatatttgtaagaagtaaactgctactgtcctgcgtgggctatatgcttttgcaggctgcagccagcgtcaatgctccaagtttgctgcatatgtaatatactttgcatatttctggtgctttatcaactcaataccatgcatgtacatagtgaaaggcctgcaaacttttgaagtatttgcttcagctgcgtattatttatgctccaatatgtttagctctgcgtgtacgtccattatagacgtagagaccgggtttaattttaacacaaattttaatgcttcctccgtttcaaaatgtctgacaccgttgactttttaagcacatgtttgaccgttcgtcttatttaaaaaaaatttatgaaatatgtaaaactatatgtatacatgaaagtatatttaacaatgaatcaaatgatatgaaaagaataaataattactttaattttttatacaaaacgaatggtcaaacacgtactaaaaagttaacggtgtcaaacattttgaaacggagggagtatatctctatgcaatgcagagtattatagtcagaccaaaaagaagctcactcccctttgctaaactttttcacgtttgccatgctaaatttcctagtatacgcgagctcgctctctaactcttagcaacttcttgctgctaaaaataatgaagcctccaagtactcaaatatgtgccgctgctctcctctattgcccgcagaaactagcatgaccaaacctagtactagatttctctgcaatatcgtccctttcatggagtagttccagctcacacaggcctctgcgtctcttgaccacatacaaccagcctgctgtcttggatgaggtatgtaggccgtattagggagaagtttggaaaaagttggtagtttgaaaaaaaaaagttaggagtttatgtgtgtaagaaagttttggatgtgatgtgatgtgatggaaagttgggagttggaggaattttcatgtgactaaacagggccgtagagccaatgttgggcacacagggtcataatcatgtacatatagctatattccctctacaccagagatgacacatatctactcttagtacggaccttcatccaacaagactcattaactcttaccaaggaagtatcatgaaacaggcgtgtaggacaattcctgatgcctcttaatcataattacctttctcaggactaagattaatctctcaaccatattctaagaccaaagatttcagtaggtgctctactctctgtacttatttggttctttttgtcagcaagctggtcttctctgaattttggtgcaggcgtgcagccactccatatatatttgcttgttggctgcctaaggaagatggaaagttcattaaggctatctatgtattgcagcatcaggtatacaggagaaagattaagagaaaatcccctatatacccatgaaagttcacctaatcccttctataccttgaattttgctcaatcccttacatacccctgaattttagtttggatcccttccatgccctttccgctagttgaccgttagttcaccgttaaattcttttgaaaaagtccattttgccctttgctatgaagaaacataataaattaatgaagtatattgttggaatgtaaaaatttattgaatgggactattatatttatgagtatgtgatgcaccatattatttgtgacaaatttacttttacatatgatataaaaagttgatacttatttattattagttattaaaagttcttttatgtagcatatgtgttttcatagtaatacaacagatttgtttattacttcagaacacatatgctaaaaaaaatcttttaataactaataaataagtattaattttttatgtcatatctaaaagtatatttatcgcaaataatatggtgcataactatctcataaatataatagtctcatataacaaatttctatgctccaacaatatactctattaatttatatgcttctttgtactatagggtaaaatggactttttcataagaatttaacggtcaactaacggtcaactagcggaaagggcatggaagagatccaaactaaaattcaagggtatgtaagggattgagcaaaattcagaggtacagaagggattatgtgaactttcaaggatacggagattttctcaaagattaaacaaggcagtaatttcagacatcctaaaatgaattgtgtgagaggacgataaaaacgccatttcgatccatgactcgaactaccagccatatagtgatgagcgctctcaaaattatgcaaatatatatacaacgttttcttggtaaatgcaactcgatgcctcccaaaattacaatagatctggttaatgcagcaacatagcgcatgcaaagtctacttgacaagctgagagaactattaaggttttgtgtaggctatctatcactattttgacgtttgattttgccttgatatttacagcataacacactttgcatttcactggtaattcatatccaacgcatgtggcaatacattttattggaagactactgtggcaatacattatgatttagtccgtaagaacctaagtgtctaatgaacaatgtgcgtgtaaaatttctcagtactgtttacaatcatagcaatgcataggttgcacgtcttggtgacaaatatgagcaaccgttctaaacaacggtgtttctagaccactaacattgtttggccattttaccagattctagagtatgctgtatctaacatccagagaactgttataaaaccggccccgatagcacatcgagaaccaaacattaaaaaaacgtcatgggagatccaaacacgatgatgacaccgagacacgatatttgttagcgaggttcagccgaagcctacatccctaggacactgattacgggcgctcctccccgatccgacatattacagagtatcagaattacaatgtctcacggccggacgctgccggtagctgctccctctcgatatgctaagtcgtcatgcggttataacagatctgtccctctatttaagagagattctaagatagagtgtggctcttattcttttctgaacacgtaatataactctaagttctaaaccgtaaccgactttgtaaacatatttgacgcaaactctaacaagaactatataacagaatttagaatcctccgaatcctaagcttgttaaggtctgtaaacaattaaagatcgatatatcagaggatgccccttagtatacccaatttattagcaagaggccagcgcatacgtgcatggtgaaaggcctcagtttttttttaaacaaactggccctttgtttatactgcttacaatctattctccaatatatttgtggataaaaaaactttatacaccttacaaaggttgccacttcccttcaattcatttgtttatatatactggccttttgtttatactgcttaattactatttattctttgtactgcgcaccacttgcagtccaggttaccaaacattctcattcctggttcccagatgtacctataccttgtgttgtaaatcttatttgtgacttaatttaacaggaacgaccccgcattgcaaatttcctgctttttcctgtgatttctgcaaagttgcccaagaggaaatccggaaacttaacaatcatattttgccgttttcataggtttagctgcatttctagttatccaaatacaccacagaacagcaatcaaattcttcatatccttcttatggttacgaaaccagccccccacgagtgatgacgaatatgctccacccataatgaaagtactatcaactacattccaaattaacaattaagcaaataggcattttagaaacaaggatcgatgtacaagaagatgaatacgtattgcatgacacgaacattttctagcaagtacatagggcatttatagcagagccataagacgtttgacggcattcaatctgcatatattgtgtctttcgtaaagttgtatatgcacgtactgtatgactcgtttgattgcaagaatagagtattgcttgctgatcctctcaatccgccggcatcgagagagagagagataggaggaaattaaagcctgaccctagtcatctactcactgatgccacgggaaggggggaggggtcaccgtcattgccaggggtcgccagcgtcttggagaggggaagaaagccccagctagccttgtcaagctaagaggataaacaagaaggctgggaaagagcatctcgtcctgtttctagaggacgaagttgaccaagaaggaagaagcaggttaacggaaatcttgacggcgatgacatggttttaatttggcaaaaatattttaacaattatatgtacccaattggtgcctcgcaacgcgatcattgtaagagggggatgcagccagaaacgaaacagcaagcatgcatggtttgaaatggttcttcgcgtgctgcctctttcatggaccaacgagctgcaggcaagctatttccatgctctcgaatagttggccatcaactacgaacttcccagtcatttcttgagtttcaactgaacaatcggagcgattcaaagccttgagtagtgactcaaagaggctagagtagactagtcctgatgcctcctaattctacgcaagttgttgataaaagattgtatagcagaaccaatgagttgcatgatacatttccaaggttgaggataattagctagctcgtgcctattgacagtcacattaggattgctggccttttgtctatatatctaccaatagcacatagcactatataatgtcccacatatgcatgtattgccatggaccacaaaatagttatgataagtacttttcacttttcttgggacacattgttaaattataccagtgcaacactttttttagcaagcacatgtaacttatcagtccctctaatgtactatgaattcatttacaaattacaactttcattgcatcgcaccaatttgctggtaaatttgttcgctatgattactccatcaagtacgaccaaatatgcatgttcgagctagaaggctcttaatttagcttttacctttgtttgatctccatatgtaatttgatgttttacacaaattaacctagacgcggcctgatcagtgattagtgatgtgtgatggctcctggacctacaaatccacaacgaggaggatggctcttgttagcttggacatacatagatccctccagtgcagaattcatccaagaaacaaagcaggaaatgagacatggtgcgcgtcctctgtgtcccgacaaggtttaaatttgccccctactggtttgaaatggctcatccactctgcgcatttttcatgacccccaagctaggtatttcaggttgcatcgagatgatgaagcttgtttcatgctcatctacagcatttttacaggcgatccattagagccttgcagatgtcaattggatggatggggctatgccactcccgatgccacctaattctacacaagtcatccaaacatggatgcagagaagggctaaccaaatgtgcatcatatatatatttcaatgttaattagagaaactatctaggagagatagaagcttgagcttccgaatttaattctggcctttggtttgtcttttgttttaaaagaactaagcttctgtctattatatcgattccctatgtacatggattggcaacaacgacatggtatggttgattttatacaccctactacagaaacggtttttacatgcgggtgaaagagatttttgcatgcggttagcacaaccgcatgcgccaaaaggtacgtcaaaatcggttttttcacatgcaaaaaccggccgcatgcaaaaataaatttggcgaaaaaaataaaaaacaaaaaacccacaaaccctatcacgctgcccaccgtcggagcgccggatccgccgccccaccacccgccatcgtcgccggggtcagatcagccgcccccacctccagtagtcatcgctgcccccggatcgactgtccccaccaccggatcgattgtccccaccgcccacagtcgtcactagtcgtcgccagggttagaccagccgcccgcagttgtcggcgaggccggatccgcctcccgcggtcatcgccggcaccggatcggccaccctcactatccgccggtgccacatccatcggccccgccgcctgcggttgtcgctagcgccggatcagccacccctgcctcctgcagtcgtcgctggcgccgcatccgccaccccctctgtcctccgtcgtcaccgacgacggatccgcacaagggagggtccccagtgcctgatccatgcggggtggcaccgcccgaggcggccgagccgccaacttgatcccgctcggtgatccaatgagtgaggctttcaaagaactacaacctttcaagtagtttgtcacccaccaactcagtaaccaccacacaagcatcagcaacgcttggcctccacccaaccacaccagcgcccctccgtcggcctacttttgaacaaccgcaacaccccacaagctcgcttcatcccaccgttcatcccatgagaactagcctaggcctcctccgtcccgccacccgtcggcctccttgccatgttcaaccaaaggagaacctgtgactggacagcgttgcttcggcctcctgagcttccctcgctgaccagtagtctgctcaactcaaccgaaaaccccgacgaagaaggggaggagctccaggaaaggggagggtgctgaccggaatggggaagacgacccaccaccgccagctccctttccactaccgcctctcccttgcgcactgtcaccagggcagcatcgctgaatccgaccgttgcacgaggtctccagccgtgccggcaccaccacaaccttcaggcatcggtgccccagcctcccaatggctgtgcctactcaccactggccttgatgccacccactgccattgctgcgcgaggcgccgccgtcgccactagtcacggcggctttgaagcctcccggtgcagtctctgcgcgagggccccgctaccggccgcgacagcattgaagccacccactgccatcactcatggcctcttcaccatgctgacaattgtcgctggcctcgacagtctccaactgccacgggttgttccgaccagatccgacgcgataacgctagatccacacgtggggtgcccggatccggccacaccggcaccggatccactactctccatgcgccgagtcaccatcctcatgctaaggcaggtcgccactggggagaggcctcaccaccaccctcccggctggccgcttggttctccagcagaacactccggtggcggcgatgggagggacaggaaggaagcgaggcagcaatggggctagggttcgcccccccttgccacccacgtgagaggacagcgtggcgtctcgatcttgcacgcccgcctttctctttcatccaagccaatcggggaagcccattcatgctatttttttgaagtcgacagcatcgtcaataggaaggtaccaagccggtgataggagcattggtgcccgtgcacaaccgtctacatattaatcgatgatatttctttctcatagtgctatctccccgccacctaggtataaattccaaaaaaatgcattgataggagcattgtttcgttattgtacttgccattaagataaagattaagtacgggcacgcaaaatgataaagctattaacgcattaattgagttttaattctttcaaaacctgaaaggatttatttgatattttagagcaacttcaatatagaaaaattttcacacgaaatacaccgtttatcagtttgaaaagcatgctgataaaaaatgaatctgtataatcgaaaaaaaacagggcagtccatgtacactaatttgtcagatatgtcataattaaagtatttctaccattctttgaaggcccatgatcgatcaagaaagctagcagtagttaattttctgagcaatttagcatccatgatgttggatggtaaaattgctctaattttctcgttaattccatagagtcgaaggccgcgaagaactttgcacgtttaaaatctaccagttgttcaacaaggccgaaataacaattcaattaatgttttactttgcacatagcaactaataccataaaaattaacctaggcccttccacaccattattgagctatgagcctatgatgacatgtactcctacatatccaccattagagcaagtataatagtgagctataagcctactataaacttatgtggaggagagatgtaacaaaaagttaagggtgttggctctcatgcaagagctagcttaacacaagctccaagacaaatataattaatatataagttagagatagagatatgagaagaaaattatagccaaccttatagctaatctattagagcaagtataatagtgagttataagcctactataaacttaggtggaggagagagatagtgaaaaattaagaatattggctctcatgcaagaactagcttatcacaagctccaaggcaaatacattaaatgtaataagtgagagatagagagaggagaagaaaattgtagccaaccttgtagctaatctattatatatgttgactttaagatggactaatagtaggaaatgggctatattattatccttgctcttatatgtgctgggtttaagattgactaatagtaggaactgaactctattattatccttgctctttatatgatttcgctagcatagatatccaggcttgcagcgctgaactcgggaacatgtacaggaatgcaatgaggcacgacgtgtgcctcaacaggccgaacactatcttgctatggtttcaactgtttcatcgtttccttgcattttatattatattacccgcaacctatgcagtctagattctgccaatgatgaggcttgtttcgatgttgccaaacatatggccatccagttgcatttcaccggcgattcttgggtaactggtgaaaggaccaatctgagttatggggctacgacactcctgatgcctcccaattctacacaatctgcccaagcatggatataatccggagtagcaagttttcattggcagcaacatgtttgctcctgccctctctttagttatgaagtcttatagagatcgtgatgacagctcccaatcctattgactatgctatactttatccggttaagttctcctagattgataggagtaactgaattacctttcaaggctagagttatgcatggtctatttatatattgcttcgactagctagagtactcatcaaagaaagaagtaaaaatatcataaatcaatagcatgcggtaagttcctatatatgcattcccttgattaagtatatttagaattttcaggccccatattttctcttatgcttatacttatcagtcgaatttgaattttcaaccttaaatttagagtgatttgaaggtttttttcatcaaagtttattttttagcctttgcttttagatcgttcagaacacatatataaaaagttttattcacaatttatttttcatttgcaagtatgtcatttggctttttcctcgaataagcgaaacaatggactgatgacaccttgcaagacaaagggaaaatatatagtgcaaacccacacatatagtgtaaacctaaaaactaccgtagtatccacgtcacctcatgtttaaatatgggagtaaaaattttagtcaaggtcgtaacgtgaacaaatctcatacgtctatttttaaatcatatgataggttacaggtttgcactacatcttataaaccgatttcagggtccgatcccagacgttccattgggccacgtgtcatcgtgtgttgcgctcagtcgagattctcggaaggagaaggtgccacgtattcgcacccctcacacagccgttagatgagaaatcaacgttagaggagggggtgatagcaactcgatttacgtggactgctccgcctggacatgcaccacctgggggagggagaggcgacgccggcggagggggatggaagcccccttgcgcctcctcgatgtgctcgagccggccgcctcctcgcttcaggggatgtcgatcgagggcgagagtggaggggagaggaggctgagctcggcaaggagctgacgctgatagccagcgacggatggagcagttgaccggcgggtggatttgctcgtcatcgccgccatcctgcgccgcgggaggttgctcccactggtccctgtgcctgccgctcatgcgctcctgatggttcattcccgtctctgcttgtggacttgtgattatgggattggaaacgaatggtcgtggcctggtggaaaacgctgctcgttcctaacatgcgcagcagtagtactctgatctgcgttccttttcctttttttttcttttctcatttaaggctgcattaagatgacaaatatagtactatctatatataaaaaagacatatcagatgcccctatattacttataacctattggttgccctaataactcaaagttaaagctaaaattaaaattttcaaacttaattttgaagttgattttaagatattttcaacgttgtttctatttcagtattaacttttaagtcactaacatacatctataaaagctttaattaaaaaattatttttattttaaataagccgttttgatttattagggaatatggataaccgatgagtacattaatctatgttcgacagtgtgagaaggtgaaaagaaaatcttgctttccgcacgcatgctacccgaaccgattgatgacgtatgttttctcaaaagaaaaatttataggaaatttacataaagaacatatccattttcttgatttaaaatattaatcatcattaatcatacgctaatgacttaattttgtgtatcatatcatggttctcttttctcatttactcaaacacactttaagtggtagttattttgggataaattttaaacctaaaagggagaattttttgaacgcatggagtaaattagaatgcaaagtgggctcgcagggtatctatgtaattaattttctcatctatgggttccatagtaaaaaaaatgataaatcgtgtgatttttgcaaataaaaataatagtaaaattcaccttgggctacttttttttatcaccggcgtttcaaagcactttgaatcaccctttaactaattttttcacttttgatcagatacttttaccttagcattttgtaccatccttagttgttttatccatatacatctaaactgtcatatatcaaagaaacaatctatatacaatcaagggagtttattgacgaataagagcataagtactcaaggtcattcatatgcatgaaaagagagtaacaaaggcaatattacccgatccaaagtgaaaacatttggttaaaggatgatcaaatgccaaatatcggtaataaaagatgacccaaagtaaaatttactccaaaaaatttttctagaaaagtgatcttacaagcatattaatccattttcatgtttgaaataattaatacccattaattatacgctgatgacttatctcattttgtgcatcttatcattcttctcttttctccttcactcaaataagcactattatttattttaggataatttttaatttggtgatggagggagtaaactagaatgtgaatatcgaagatttgttaattatatcgaagatttgctaaatggtattgcatgtgaagcgtttacatagttggccaaataaaacattctgcatactaccacattaatattttctacttgcttatattttttgccagtttttatttatctaagtgtaatatgtttgtcaagaaataaacatttccagaattttttcccaaatggaaatattcccaaacagaatttttttcaaaaagaaatatcacaaatatcaccgattattgtcgcttcgttcatttttactccatctcatatatataagaaatcaagctaattctaaataactctacaacatttttatatcctaaaaagtataaatattcacaaggtatttttagttggtgcgccaaaggcgcacccattttctagtattttcctgacatagagtcatgcttcgatagaaatgatattaattacagttcacaaatgttcttccccctgttgtatgcccttgcccttggtgtaagcaacaatggttgaaatgtttatacataatgatggactctatggggtagataattaatctcaaacaacaaagtaggtatataatcgtccaacaatgtaaaaatgtggaaggagaaaatcatgaatttaggctgaggctagtttgcttcccacagtatcagcgacaaacgcatatcgtgccttgcgcatgatctgtgacaagatctcactggtattgtgttttttcttcgaaaataagtactccctccggtttcattttaattgacgctttggacaatggcacgctctacaaaatatacctttgaccttatttttctattataatatataaataaataaatacatgcttatgttttgaaacaaatctttatatgtttttctagtttctttaaactaaatatttttaaagttattgatggttaaaattataaaagtttaacctcaaccttgtctaaaacgtcaattaatatagaaggagtactatgtaaatgacaaaatggccaataattaatcacgcctcaccataataaccagcaaattttcattggcagcaacatgttctgttgctccggtatgatagaatccaaagtggctacgatagaattccagactcctgcaagtactatactttgtctttcatccaagccaattgggatgcccattcacgctattttttttccaagtcgataacaccatcaatagataggcgccaacccggcgataggagcattgctgcccgtgcacaaccgtctgcatattaatcgatgacgtttctctctcattgtactctctctctccgccacctagatataaaatccaacacaaggttactattagccggtgattatttgttattgtacttgctcttaagacgaagattaagtacgggcacgtaaaataataaagtcattaacgtatgattaattaaactttatttactacaaacctgagaggatttatttgatattttagaacaacttctatatagaaagttttcataggaaatacattgtttattagtttgaaaagtatgctaataaaaatcgagatggaatctgtatcttaatcgaaaaataacagggcagtccttatacacttatttgtcagatacttcctctgttttattttttaagactttctagcattgcccatcctagaaagttttataacctgaaacagagggagtatgtcataattaaagtatttctaccattctttgattaagagagctagcggtagttacttttctgagcaattttaccatccaacatttggcactttcaggtatcacattttgcacactaaaattcggtacacctgaagatagtacgtcctaagtatcttgaggtacaaaattttacactagaaagtatctcaagataccaaaaatttgtggtacctcgagttacgaaatgttggattgtaaaattctatatttttctcgttaattccatcgggtccaaggacacgaagaagtttgcacgttataaatctaccagttgttcaacaaggccgatataacaattcaatgtttatacacatagggcccgtttagttccctaaaatattttcccaaaaacatcacatcaaatctttggacacatgcataaagtattaaatatagataaaaagaaaaactaattgcacagttatgggagaaatcgcgagacgaatcttttaagcctaattagtccgtgattagccttaagtgctacagtaacccacaagtgctaatgacggcttaattagtctcaaaagattcgtctcgtggtttccaggcgagttctgaaattagttttttcattcgtgtccgaaaaccccttccgacatccggtcaaacattcgatgtgacacttaaaaatttccttttctccaactaaacacacccatagcaagtactacctccgtcccaaaataactgcagccgtggaaatacgtgtccaacgtttgaccgtccgtcttatttgaaaaatttataattttttttaaaaaaattagccacacataaagtactattcatattttatcatctaataacaataaaaataataattataaaaaaatttcaaataaaacgaacggtcaaacgttggagatgaatagtgcaaaactgcacttattttgggacggagggagtaataccataaaaattaaccttaggccctaccacaccattagagcaatgatgacatgtactcctacacctacatatccaccaatagggtgattttgccagcattgatagcttgcagcgctgaactcggaaacatgtgcaagcaagcaacgaggcgcgacgtgtgtgcctcaacggttggaacggtttcgtcgtcttcgtgcattttatattacccaacctaggcagtttagattctgccagggcccaggatgatgatgcttgtttcgatgttgccaaacatatggccatccagttgcatttcaccggcgattcttgtgtgactggtgaaaggaccaatccgagttatgggccgggctatccaactcctgatgcctcctaattctactcaatctgttcaaacatggatataaaccagaatagcacattccatggcagcaagtagcaacatgttctgttgctccactccagccctttctatagttatgaagtcttatacagaacgtgatgacagcattcctcattccagacacctcccaatcctatttgactacatatgcctatatactttatccggttcagttccaagattgatcggagtaattaaattacctttcaagattagagtaatccatggtctaataatatattgcttggactagctagactcatcaaagagaagtaaaaatagcatataccaatagcatgggggtatgattctatatattactggtggagaaactgtttttactcccgatttataactctcctatagttccggtttcctaaccgggactacgaatccgggactaatgatcgctatctttagtcccgggcgaaataaccgggagtaaagatctatctttagtcccggttgataacaccaaccaggactaaagagagggataccaaccgggactaaagagaggatagggacaatcccggatggtctttttttttttgttactttcttattttctcccgaatcggatggcatgcacatcccaaatcaaaccccaaatcccaaataaagtaacatctcaaatccacatcacaaatcccaaatccacatcacaaatcttaaagttacttatacacacaaatctaaaacatcacaaatcctaaaaaaatttacacacaaatcaaatacatcacagattatacatctcaaatccatacaatgaatcacaaaattacatctcagtgaatcacaaaatatcaaaaaaaaagagatggtcgtctgggccgcacgcctatgcgtccgtccgtccaccgcgtccgcgtggcgcgacctcatcagcggcctcatccgtctccaggggagggaggaggaagggaaaggaaggagtagcggcctcatccgtctccaggggagggaggaggaagggaaggggaaggaaggaggaagaggaggagaggggagggggggagaagagaggaggatcgatctgtgggtgaggaagtggttgtgattgtgaaggagaggataaggaataaggattatatgctatgttgaattttagtcccggttgatatttccaaccgggactaaagatctaaatgatctttactcccggttggtactaccaaccagaactaaagtggtaatctttagtcccggttggtagtatccaccgggagtaaagatcctcggccccctgacatgcctctgacagaggatgaaccgggactaaaaatcatctttagtctcggttaccaaccgggattaaagatcaaaatttttttaaccgggactaaaaatcgtttttaatcccggtttttaatgaaaccaggattattgtagaatttggtcgaccgaccaaagatgattttttcaccagtgtatgcatcccttgattaagtatatctagaattttcatgatgcgaaggagtcatatctttcctaaggagacaatggactgatgacacctcgcaggacacacaagggaaaatatacggtgcaagccccctatacagtgtaaacctaaaaactacagtagtatccaaaaatgaaagactgtgatttgtccacgtcacctcatggttaaatctgggagtaaaaattttagtcaaggtaacatgaacaaatctcaaacgtccatttttagatcatatggtaggtgacaagtttgcactaaatatttttctgacatattatcatgcttcgatagaaatgataataattaaagttcacaaatgttcttccccctgttgaatgttgatgcccttggtgtaagcaacaatggttgaaatgtttatacataatgatggactctatgggtaaataattaatctcagacaacaaagtaagtatataatcgtccaacaaattaaagtaaaaatgtggaaggagaaaataatggatttaggccgaggcttgtcattcgcatgatatgtgacaaaatctcactaatgtcgtgctgatccaacctctatttttcgtcagaaacaagtactatgtaaatgacaaaatgaccatgaatcacgcctcaccataaccaagcaaattttcattggcagcaacatattctgttgctccggtcctctccttagcgacgaagtctagcaatctaatgtggctatgatagaattccagacacctccaagtcctattgacactatactatgctttatctccacttcagtctcgagattgacaggaaattaaaatttctatcaaagcctagagtaatgcatggtgtatgtatatattgcttcacctagctagtccaatcaaagagggaagtaatagcatatgtcaatagtaattgaaatatttgaagtactatttgtgtgattctgtctagtggtttttgcacatgcaaagtgtactatggcttggtcggattgacaagcacgcctctgaaggtaaagcacatacattttcttgtttgatccacttttgtgttgaatactagtggatccctagttttatgcttagagcaagaataataatcactgccatctcacttagccatgctctaaaagctcacctgtataatgggttggctataagctgactgatacattacctaattgaaacatctaagcaattaatatatgcatatgcaaagcatccgttgtggctacatctctatggccatttcagtgaacaccatttcatcagtcaaagtatatcccgatgaataacagattaacataatactgagaaacaaagatggctgattaattcgagctctatagcatagattgcctccaagcaacattattcatcttaatacctagatgacaaataacttatgacaaatagcatgtcgggtcccaaaactaatgattcagtaaccgacatgtttagactatatcaagctctggatcagtagattgatacaggttcaacaatctggatattcattgcatacattttaacatggctccaaaggagatgttattataaaataataggacatatcaagtttgtggctaactattacattagaagctataggttgacccaattctaatattttgctatagacttaaaccaactaactatactagacttgaagacttggtttaaagggaactaacttatatgattgaactcccggcttcggcaagaacatcgaattgactctgaaagaaggggttgaagtaagggtgagtacaacgtactcagcaagctattatattaatcaataatgaatggatgaaatggtagtatttgagtagagctaagtttacttgcagaaggctaggaatatagaggaagaaagcctgtaatgttttagatgcaataatatttaataaagtttgaaattaagtttctaaccaaataccatatgagtcccaatgctcaaatccgtgagcacggctattcgaataaattcatttatactttactgcagtaaatgtacgctttacccacagcccacgacttgccgataatcatcagcttcagtcatagcctagtattaggttactaacaatagtggcacctgttccatgaactcttatccccatacgctctgaaagtacgttatcagtagcgtgaggagttctggtgttctcggggtatttagagaggactgattgtatgacaccatgtcatcacaatcagggtttccaaacaagtcatatatgacatcataattaatctcacacaaatatttacctacgcctcggtaaatatcacaatattgccctgctcggcaaaagtttgcctcctgcgcgaggacttaaacatagaaccactgtacataggtaccacattgttaaataacataatatctaggtctgtgcccatcctagaactgtggtcgtactcgtttgtttttcataagtacttgggcagtcttatgtcagttggaacaatactagccactcggaaatcaaccatttctaccgtactgtcccaatctaagttcattatattttatgcagtctaactaggcagggctaagcaaaagctagcatatatctggtttgttgtatgttcaggttatgcattcaaaatcatggatgactaatgcatagaatagagatatagaatataggataattatgctcaagggaaggaataataacttgccttgctccaacgcaaataaatccgagataggcagcctgtttatctgatgcttgaaataccataggttgccatccaaatataatagactctactgaaaaagaggaagaaccaaattcaatgaaagccataaaagcaagaaagagataaatggttaggagggctagggtttagggtatagcctatctcttttatagggtatatggattactgggctgatattttatgtggagattctagagagttggaggctagacgtgcgccgtgcgtatcactatttttcttttttttctttttctaaaatctaatatatatggtgaccggtcgctcttttttttttgtggtcccacccattagatccgccggtgctaggaagcttacagaagacctagtagtatgacttatacgctccacccgaggggtagtctacagacggtctagtaccagataagactctaagtgaaacttgcttgcataagacttgcaattcaaggcgtagtccattgttcaagttgtgagtaagtgtagcttggagttctaaatagatgttcaaccttaatcggtctccatcgaaccgctggtatataaacggtacattggaaaaggcaaatctcagtgggattttgagatttggtgggggattgttggaattaattgatgggctaaggcccactcagagattaattctttggaaaatcacaaaagcccacctcatgggatggcatacatgtcgagtttagtaccaccttgcttattctagaagagggagacatccttaaaagggaggatgccctcctatccacttgaagcatgtgtggtggagagaagagggagaacacacgcccgcgctcgttcgcctggcctggcaggcggcgcgcgtgcacgtcgaatggtccgcaaaattggctcctcacccttgcgcagatgtagccttcttttgcagttttgttttgctgcaggaaattcgtatttgttttgttttggaaacattccgaaaaatccggtgcgtgaaaacggcgtggagtccggataagttacgcgtgacttatctggttcggttacgtggagtggagatcatgtgggtgccctgatcaagcgacctatctttatataaaccgagccgccgccttcacgcaagacacgcgaaatcaatctagtgtttgcctcctactctgtactgcgccgtcgctcgtagactactccatcccgctcgccggcgtgcaccggcgatcgggagagcaggtctccggaacctctgccttcgacgtcctgcaccgggagaaggcggcaataaggtttttgggaagcgcttcgcgcgactgctccctgttcgtccgcaacggctcgccttcctcttcgctcgcgtgctgcgcgccttcgtcgacgctcgcaaccgcaagtagttcctgccgagcaaccagtttttccgtcacctcggtacgtgttcgacatgttgcgcatatttgatatgttcatgttttactgcttagtttacatgtgtagatctaataatgcgttcaggctagtttacatttgcaatgtcatgatttatttatggattaaattaaatcattatgtgccttatgatttcaacacaatatagtcttccgtctgggcgctatctttgtcgctcttg

SEQ ID NO: 22306 - DNA, 649 bp, Oryza sativa
cataataggccagccgtgcaggcggaaacaccagtcggcggcggacgaggcggccggtcggtgaagacgtagacgcccaacaacggtggcataataggccagccgtgcaggcggaaacaccagtcggcggctgacgaggcggccggtcggtgaagacgtagacgcccaacaacggtgacataataggccagccgtgcaggcggaaacaccagtcggcggctgacgaggcggccggtcggtgaagacgtagacgcccaacaatggtggcataataggccagccgtgcaggcggagacaccagtcggcggccgacgaggcggccggtcggtgaagatgtagacgcccaacaacgacggcataataggccagccgtgcaggcggacacaccagtcggcggcggacgaggcggccggtcggtgaagacgtagacgcccaacaacggtggcataataggccagccgtgcaggcggaaacaccagtcggcggctgacgaggcggccggtcggtgaagacgtagacgcccaacaacggtggcataataggccagccgtgcaggcggaaacaccagtcggcggctgacgaggcggccggtcggtgaagacgtagacgcccaacaatggtggcataataggccagccgtgcaggcgga

SEQ ID NO: 22307 - DNA, 2118 bp, Oryza sativa
aagtggctctattgggaaaaagtggctctattccagcgactgccccttcacgccagctatccctatccatttcctcgcctcatctcttcctcgcgtcgtctctctctcgctcctcacaaccccgcgccctcgccgccgtcctgcgttagcccccaccgcagctacgcgctagctagtcctctgcccgccgcttggttcgccggtgtcgtgcaagccgacgccgctcgcgtaagcctcacgaatcgcgcatcagcaatggcgggtggaaatcctcacgatttcttctcccagtcgttcaatgaagctccaacgggccacatggacggcttctcgcaggggtcttcaggatatggtggatctggcaccggcttccattttgggggagggggatcggggggcctcgatctgaactcccaggctgacgcctcctaccaacagatccttgaaccgtgtagccttgtgttacctccgattcgggcagggagcagatccacagtccccccgtcacgtcctcctccagcggcgggagggggacgtggcagaagtcgtggagggagaggaggaggacgaggccgtggcaggtcgttgaccaatggcgctggatctagcaggggaatgcgaggatttgttcctcctggctcatcgtctggccaaggaggcgtccgaggtcatggggcatccatgtcgcacagcgggccacccgccttcaactttggagtcttcggaggaggacggcgagccggtgcctcgtcgtcccaagggacaaatgtgttcgaggacgacggcaatgaagaagacgaagaggactttggtcctgatggtcagcacatggtaaaccccccatggttactttctgttatgtttgatttgtgctattgcgaaatatgccaattgttgctcatgatattgatactgctatgcatgccgtgatctaagcatttgtattacagtatatgttgttcattgcttaatttagggttaaatcatgtttttctttcctagaatacttatgacaaggcaaattggacagaagaaaaaacttacacattgtgtgaaatagcatgtgaggaaataagggatgggcattgtcctaatggagcatggacaactagagggtaccagaatttgaaggccaaatatttccaaagggctaacctaaggcattcaaccaaacagataaagaatagattcacccatctaaagaattattacatggcttgggtgtggctgaaccaacaaactggagctggtagaagtgctagtggagaaataattgcatcaaatgcttggtgggaaaaaaaattaaggtatgcagttgtcaaaaatttagctagtttacatgattttagagttttctgtgatattgatttagtgtcaatacaggagaagggggacgccaagaaatttcgccatggcaaccctgagtacttagattttcttatagagatatttcaaggagttgcagttgatggttccacagcatacatccctggttttgaagatgaagatgaagaggaaggagaagaagaagcaggggatgcaggggaggcagctagaggggaaagagctgtaggggatggttatgagaacagccccatgagcactaacagcaggaagagagggagtagcagctgtgatgtgtccacagcttctagtcctgggaaaaaaagcaagagcccagtggtgaagctcatgaaggggctgctcaattctttcaactctgattgtgataagtcaaataccctaattactgaacttgttaacagcaagaagttaaaggagcagaagaaagaagaaattgctgagtcattgacaaactgtcagaggttggcagtagagtgtggtgcagcagaagacagtgtggaatacttttgtgccacacagttgtttgcttccaaacataacagagttatgtttaagaacattagcactaaagaagcaagatttatgtggctgaggagatggtgccagcagaagaatttgtattagatgatccctttctttagctgcatatcatgggtctggtctgcattagttgtgtcctagctgcattagttatgatctacttttgtgttgaactatcaacttccttgatgtgatgtgacgtaatgaacatgt

SEQ ID NO: 22308 - DNA, 1038 bp, Oryza sativa
tttttttatggatagtcggtgctccccaatcagttaggcaagcccaagacagatttgttaggtctcttcaaacagtacatagtaagttcaatgcagttttgaccgctctactgaaacttgcacaagatatcattaggccaaaagatcccttattcacaacagtccataagaaattgctttctcctcagtacacaccatatttggataattgcattggagcaatagatggtactcacatccaagttgtggtgccaaattcagctgctgttcaacataggaatagacatcaggagaagagtcagaatgttatgtgtgtctgtgacttcgatatgagatttactttcgtgcttgctgggtggcctggttcggttcatgacatgagggtattcaatgatgcacaaactagatttagtgccaagtttccaaagccacctctaggaaagttttatctcgtagactcgggatacccaaataggccgggttatctagcaccatacaagggtataacatatcatttccacgagtacaacgaaagcacattgccaaggggaagaagggagcactttaattactgccattcttcgtgtcggaatgtcattgagaggtcatttggggtcttgaagaacaagtggaggattttgtttagtttaccaagctactcgcaggaaaagcaaagcagaattatccatgcatgcatagcacttcataatttcattagagacagtcaaatggctgatacagagttcgacaattgtgaccatgatgaaaattatgatccattgggtggaacctcttctccatctagcgaaccaacaaacgaattggactcgcgtgtcatgaaccaatttcgggactggattgccgatggattgtggtatttgaaaggaatgtaatgaatggttcaatttttcttgtgaattgtatttggtttaacttgtcaattgaaccatgagtgcttgtaatttctaacattgaaacttctgtgatgtatttgaacaacttgagatgtatatgagcttctttgaatttctgtgattg

SEQ ID NO: 22309 - DNA, 6427 bp, Oryza sativa
gggagttgctgaagcctatggcgtctgcctatcaggctatcagccctaggtggtagaacatgtagagaggctatgggccaagcaaggcagcacgatggtccaccataccatctgacagcccacaccctcccccgtagggatgatgaaagcatggcggccattcaagcgtcgtcccgtggcctcagttacacgtcgggtaaatatatgtcatattgcttttaatgtaaggtacactcaagataataaatagcgtttttagctgccactatagcggtagcggaccctaccactaccggtacgacgtatactagatatagcatcttggaacttagcacccactattttcacttagcggactgctacagcggctgcaattcgattttgtggactgctgtagtgtgagcctattttatatgaccactaacccataacaagtaacgagtttattaattgttttgtctcccaaaacattgtattcttgtgagtcgtaacatctaacgagttggaacacaacatcaactcttcaagtgctactaaatctctacttatcctcataggttatacatgtattaatctatcactaatttgtttctcagttgatttgttaatttttataaagtcactattcattatatatacattcaaatatgtgcgatgattaaatgccgctattgaaacttagcgtctgctatccgcgatccgctacatacgcaccaatccggtaccgacccgctatacgctatctattaccttcggtacactttttcgatggcagcaatcagcaagatgcaacctgtcacagttaatgcgctgttgttggcccgagtagcctacaagagacaagcccgggggcaagtggcagctgtgcccgagctcctgccccgagctcggccaatactaacctgttgtcatatgaatatctccatggcaggccccaagaccatgtcctatcccacggccattgaaatagacccgagctgattaatagcgacatggatcatcccaccagataacatgtcgttaggtgcaccgagccgcaaccggtagtgggaacctggttcccacttcaccgacacacatcaatatgggaaatagaaaatgcatcatcgcatatagcattagagaggaaattaagagaaccattcgcgttgatttgcgccatgtgaacgatcccatatatgcattttttgccaccttatacttgccttcacaaatgaaatttttggaggcaaaattggttcctctttctaaaaaaaagctcttggtctttagaaggtttcttagcttttagtttttttattgtttggcaaaactgtttgaaaggtgtaccaaggcaaaggcagacagatctatacgactatacgtgcaaaactgaaatctagtagtaggtggtactaaacatttgctgacataaatttgttttagaaactgtcatatagccatttcaatggaaactttcaccacatgcttacttgttgtgttaggtaaacagcatatatagtcctacatgtggcaacggcgcaaccccatgtggcccacatgccgcggcaccaaattcagaagaaaatatccgcacgcagcatcctacccaaaagtctccactctccacaccacctaagctcctacgccgcggccgccggcgactcaacttcgctcagctcgcctctgctctggtcaacagccatacccgcctccccttaccacccaccccaaacaaaccactatgcaaatagtaatccaaacaccatcacttgtcagatttatcatatcgcacaagctttcagtcgactgtgccatggattcttttaggcaggcaaggcaatgcgtcgagcacctggtgtgcatacagcttatctatgaaaacaggagatgatggaggtgggggtgtatgtacttacagtttgttgatgtggcagagggtcccgttgttgtacttgcagtcgcacttgatgaacgggttgagatttgggtagtcgtcccagttggacaggtcggaggcgacgccgctgcagagctcgccgctgatgttccactccggcgacgccgtcttgccccatctccccaggatcgtgttcaacgccgccgctgcaatcacgcgcggggttagcgaactcaatattaaccaaagaagctaactagtaagacgcttgaacagttgaagtaacaattactgcgtgatgatgatcacgtactcaccttcgactggatcagttcgcggctgagcctgagcagctgcgataatccgccatgagcacagcacaagcacaagcagcggccacgcgagatgggtgaagacaccggccatgctaggccgcatcgctatcgatctgtctccacgcgtttgtctcttttctggtctcgctctctttgctggactggagactggactggcggcgaggcaacattgttgggattgttaaatagatttgaagtcgttggagcagtagttgtggccaataatttttaattttgcaaaccaagcgacgccaaactatatacgtgtgtgccaaaccgtatattgacgtttatttcatgaaaaaaagacaaataaaatgtcaaggctaaggagaggttgaaatatttgtcgtattggataacactaatgtcaaattttatctatgaataacttctcaaatatttgcgttagaaacatgaagactatgcatatgcgcctgtttgcacagctccaactacaactccaccttttctcgagctagagctcagccaaacagttttagaggggagctaggtgaaccaaataaactagagaggtggagctgagtttagacagctccacaacttcactacagaaccaactactggagttaaatttaaaagttggagttctaccaaacggaccttatatgtgacaccctggttcaattaagatttaacatgtgtggtccattagagctatgagtgttaagagcaaagttttaaatctccggctaagcctcttagctgctgaccttctcaacagctaagcacagctatagctggagatagctgcagctaagccatttagctgtttttgcaaataaataaataaataaaagacatgatcttggcataacttcataaccattaccaattgatacataaccaattcaaatgagtacattacaggttcatatgagtacattacatcacaggctaagtggttaacagaatactgaaacatcagtttcacaaaagtacagcattctagaataaagacaacagtacaacacaaaggtcatcaagaattctggatagtggatactaaattactaatatgaggcaatattgcaatcttcatttcttctagtcatcaatcatcggtctcagagacatagggagagggagagggtgacttatcagaatcagaagtctgcattggaataccatcatcacaatcttctgagtcggatgatggagcttcaggatgcactggggcattgcgcatcaaagactgtaggcttctgactttcctcttcttagcgtgcacaggccttttccttttagctggtgctggtgcttgtggtgttgtgtgctgctgtgactcttttgcacattgttgatccatttcacttgatgaaggcacaacaccagtaatgaattcattgtcaccatctgccacaacatcatccacttccttctctataggatctctacccttgttctctctcttatttcttaacttggagttaaatttaacaaacaccagatctcgcatcctttcatgaagtagcctgttgcgcttctttgtatgaacctataagccaagtagtgaacacaaagctgcaggtcagatctaaattccataaataagcattataattcaaaatagacagcatgcacataaagctacaggtcacaaatttctttttacctgttcaaaaactgaccagttcctctcacaagctgaggagctgcaggtcaaactcaaaatccttgcagccaacttcctaagatttggtgtgcttgtgccatggttcagccaccattttgctgcataaacattacacaaattacaacaaaaatgatattcagcaataaaattaagttcacatgttgagatctgaacctggattgaaatttttgttctttcactgccttacggcaatttcgtgtccaaaactcccatgctgatcttgatacaagttgagttcttcaattattttgtcttggatatcttcatcatcagccaacttgtcaatacaggaaatcacacctgctctaaatgatccatcactctcgatctcttgcttatttgggaagtagtagtaggggttcaaatagtacccagccaggtgtagtggagtcttgagcttgttgtcccatcttttatcaatgatattccaaacttctatgaagcggctcttatcattatcgaatctctgagaaatttctttcttcgcctcaagcattaaaccatggaagaatcccattgatggtacatcgctgtccattcttctcaacacgttagccaatggctcaaagtaattaactgcaatgtcaacatttttccaaaaggtttcagatttgatcactttgctggctttcttccccttggcctgcttcaagtaacccaattgctccatctcatctgatttaaatagtcttactaactcttttttgttgtctaacaagctttttagattcaaataagctgtggcaaatcgtgtaaccccagagcgaaccaagtctctgttaagaaactttctcatcaaatccaacaccctagtatgagcatacaagaaaacagtcacttgtcttgcattagcaatggtttcctcaactggtccaagcttcccaatatcctcgagcatgagatccaagcaatgagcagcacatccattccaaaatattgatggtctttttgctgtcaatagacttgctgcagttgtgttgacgctagcattatcagtcaccacttggacaacatgttgttcccctatctcttctatgtacctgtccacaagttcaaagatatatttgtcatctttcctgtcacctgagcattccactgaatctaagaagagtaccccatgagcactatgcacaactaaattcatcactcccctacccttcctatctgtccatgcatctgtcatgatagaacaacctgtgagctcccatgattccttgtgctccttgaatccatccatcaccttttccttccttttctgtaagaacgatccactcatctcatagggactaggccctttcagacttctaccaaattgtccaatggcctctaacatatgagcaaagctaggaagggttactgtgttgtgtggaatactagcttcatagaaccactgacatatgtactcacaagttctattcctcctctcttctcttttctgagttgtcaatgctgtttgaaccttattgcttagcttaattactctttgtgtcatactggcagattcttctatagaaggaggcttgtagtacttgtcaatagtatgaccacctgctacagatctagagctactagatcctgttgtctcctttggcttcaccacaagaacattattgccatgatctgaaccttcactgccactttcacaatctgaattttctatgtcaacttcagctctggccacttccttttctttgtttttctgttccttttcactagtcttcttggtaagcaaatcaaacatctcttgctgcactggacttggaactttctgacacttagtagtattgaaacctttaattccagcaagatggtacttaattcttgtaattccagcagtgcagaccttgtcacaatacttgcaccgtaggtgatgtttcttggttatgtctgggcagaaacagtgagcccatgcaggatcatctgagttgataccagcttgttttggtccagcttctactgagacagaggcagcactggacggattacctatacaaaaagcaaacttagcccacattaatgctagcgtcaaagctgcctaagcatcaaaataatgcaaactgatatagcacgtattatcattaccacctaaacaggcaaaacaagcaaacgagagatctcagggagtaagaaaatgtcgcgtcccaaatcgactctaaaatctatcctcgaaattgtgcaaaagaataattaaaattcaatgtgaaagccttcaacaattaaaatgtgcaaagataaaagtcaaatgaggcttggaggatttttgtatatttcctaaaagcctaaaatgcttaaataaattttagtggaattttcagagcacaaataataattgaaaagaaatgaacaaagttaaaaaggtttataaaaagaaaatcctaaaagaagtcttttccccctcccccttccttcttgggccggctcggcccattccctccctctctctctctctttcccctcggcccatcggctccccgcgcgcgcgcgcgccgctgacaggcgggcccgcccgccact

SEQ ID NO: 22310 - DNA, 2423 bp, Oryza sativa
gggtagcacccccgtcactgagcaaaggttactgatgtgagaaaatatctcaatcgggcatccggccgtcacggatgacacacatctcaatcgggccaacaataaagcccgtcacggattactctcatctctaacgggcctaaactatagcccgtcacagatgactcttatctcaattgggcctaaactatagcccgtcacggatgactctcatctcaatcgggtctaaattatagcccgttacggatgagtataatcaaaaaaaattgttttttggttagcctcaggcctttgctaggcacgcccgtgggccggtcttttctacacctggaacgcccgtgggccggtcttttctacacctggaaattctttccgggttggtcacccatcccgaaattgctccaccctaagcacgcttaacctcatagttctttggaatcgactttcggagaagtagttgtacattcattcacatacacaaccatcaatatatttaacacaaccacattcacataacatctattttgatcacatatttcacatccattcacatatttcaccagcaaaaccgagttaattggatcaaatatatatttagcaagtattaacatgatgaggaggcaaatcagacttctaggtaaaaataaattttgaattgaattttatgatactaaattaactcatatgaaaaaactgtcaaaaacaaagttgtagaactcattgagatctaccaattttattttggtcatttctccatccgggtttgattgaactatataaaatttggattttaaaatataagaaattcaaatattttttcgggtactaaatgatttcaaatagaaaaattgtcaacaacaaagttgtataactcatcaagatctataacttttattttgatcatttttctatatgacattttttgaacagtttgaatttgaatttgaaaatatgacaacttcaaacaatattttcaaataccaaatgatttcaaatggaaaagtcatcaacaacacagttgtataacttatcaagatttacaacttttattttggtcatttctctatgtaacatttattgaacagtttgaatttgaatttgaaaatatgacaacttcaaacaacaatttcaaatactaaatgatttcaattgaaaatgtcatcaacaacaaagttgtataactcatcaagatctataacttttattttggttatttcttcatccgataaagtgataataacattgttcacaaaattcacatatctctcatctggttttataaactataacgtagatatgaccatcatctgtgacgggcgccaacttgaggccagattgagatgtggaatgttatctcaatcgggtctaaactacagcccgtcactgatatgtgtcatccgtgacgggcctaagttatctcaatagggccgaaaaaaggcccgattaagatgactttcatgtgacggccgctaatttcaagtatgttagaggccgtcacagatggaaggttctgtactgatgctaattgtccacctcattgcctcatgtgtcaaccatttattccatgaagttttgtttcttatgacactattgggtcgccccttattacagtttaaacttattacagctttgttcctgaaatatctataaatatccaaataccactaacatcagcatgcaactatatatgtaagtaagaacgagcagtattcaatattgtcacatcaacccaaaatcgaccatctgcacaattcaactttgcattcaccttcccgctttgattataggtggtgattgctgcagaggttcgatctcgttctgcctgccgaactcatgggtggtagaccctgagtagctgctggtgacatagcttctattaccgtccatcatttgccactcagtgatgtagcttggctttgtgaccaccttaggtacctcaacttctccggtgagcattgccacgaccttcgacattggtggtcgctgatgtggtgagccctgcgtgcagtgcagcgcaacacggatgactctaaaagcttcatccttgttgaatcccttgagatttgggtcaaggattctgagagcttgctccttttcatactggtcccaggcctatagatgaccataggtttagtacacaagagataatacaaagaaattaactttttttatcgcttagggggttcatggagggcaaacacaaaaaaggatagatgggcaagtgttggcttgatctaggatgaaatgagactagattagttcatattgattgcttgcttgctaattgatgcatgctatacccttttgtaggtatgtctagctagttgattcaattgatctatccctaatacatggaatatatccataaggggtaactcgacaataaggaaattaactattcttatctctaattttaaactatt

SEQ ID NO: 22311 - DNA, 6434 bp, Oryza sativa
aaatcaagtatattcatatgtgctggcaatttgcagaagtgaaactcaccaaagattgcttgatccaggcttccattttcaaggtactcataaaccaacaatggtgtgttgctgtcaatgcaacatccatgcagtttcacaagattccggtgttgcacagcagaaattgttgcaacctccgtaacaaattggcttttgccttgatgagatgattcagaaagttgtttcacagctataactcttccatcgggtagcttaccctgttgaatgaagaaccgtctaaagttacatgtatattttgaacgtggagaagaaagttgcacttaataccaaatcagacaattgagggaaatagacaaccttatacactggcccgtatccgccttccccgataatgttttgagaattaaaattgtctgtggctagcttgagttcagagttactgaagacatcaggtcgtccgaccaggttgtacagttctgtatttttcattccagcagatggtaaagaacaaataatttgaaaattatgttgtctgaataactgtactaaaaaggataccttctttctgctttgccattgttcttcgcttctttatccacataaatattccaaataagcctgctaatcctaaaactgaagcgccagtcaatattccagcaatttcacctgctttgcttcccttttttggtacaccatttcgcacagttggagtaaaatctgaaaataaatgtttttacttactagagccaatgtagcctacattgaagttaatataacaggtttgcttacttggagtgacgcttaatgctgagatcatcggtccgtagtaaccttgggtaggtatgccagaagtgcccttgccagcccagaagagatggatctcgaggaagttttttaacacggttgccgtgtaagtcctgttaattgcggtaaaagattttccaccagctgtcttccttatatcgaaattcttttctttcagagcaccctatgcaaatgttagtaatattttcagatatagaataaaagacttggtaaaccaattgctatacaatgcactcaatctgtacctggacatatatgtcaaaaattctccttcctaagcttagccaagtttgcgtgtctggaaaagcaaactctgcgaattgaagcataacagtgtaatttccattctcaagtccaagcccataatatctcagtgaagatggtgacatccttgcagtctcgaacaattttgagtcgactgcagtctgaaaatgctcagagctatatattatgtccattctatccgtggcttggtaaaagtatccaacattgctgacaccccatcttatttgatcagtaacataatatgatgcatccccaaggtttgtagcatctgcttcatatatggtattatctgagcccctagtagatatatcactgccgcagtcaaccgcaaacgaataatctggaattaagatgtgcaaaattatagccagtattcaaaatcatagcatctgtgcaaaactataaccattatccgaaatcctttcattctgttaactactacagataacaggagtggcaaatatacatttgggagatccacggaaacaaggagtgtcttgttggaggcagtttagtccggaaggtatactgtgcataatttgaattgaaaagtaaaagccatgaaaaagattttattacagttaataaatggcgaaagtataagtaaattttataagtacctgtttttggtgctaccaagaacaatgttgtttgccaccaaattccttgttcaaataaaacattagaatatctatttttgaacttggaaacaaaaatttgaaacttttacactcacaattgcaaattattctgggtagcccaagaaggagaggttccggtgagatgattgtaggaaaaatctctggaaacagcccagtattattacaattgaactgaatatatcattctattatgaaaatattttgtgctataatgatatgtcgatacttattgacgtacatcacttttaaagaagagcttataacatcaggcaaagttcctatgaggctattgttcccaagaaacctgaattgtgcagaatacaaaatgatgaaacatggacataatcttatcaggtgtttctatgaatttaattcatttaaataaagaatttttttacaggaattgaagcattcctagattcaggatggactgaggaacttggcctgtaatattgttaaaactcaagtccctgtgccacaggaaagaaacattacttgaacaaatacttatcaattccaggaaatgaccaaaagcattatagcaggcaccatggccaataatgaaaacatacagcatggttaacgctgcaaacttcgaaaaatctactgtttcaaggttttccgatatcctgcagttccttaatactctgtaaaaatgaaatcaaatataggtgacttgtaactttgacaatattgtaagctctaatgctctatagaaaaaggcatcacatacaagttggtcaaagatgtcagattactgataaatcccagtgaagaactcccatttacaatatcaccaatccgtctgctcaattgtatttcacaaatcagttatcaagcttgaccttctaactttctaagccatcaaatgtccaaagatgtcaaaaaacaatgtacttacaagtttgttagtttggtcagattggacaaacttgcaggaattggcccttcaaaagaatttccttggaaagccctacaagttcatactttcagaaaataaagtagggacttgcaaggtccaaattagtataagagaatgcaagctctatgtatcaacatgccatgtagacaaatttaatggtatgcagatatctgcatttctattcagtgacaactgaaaggtgaaaaatgctattgcccgagttcaaatggaaaggacatatacagaaaatttatgcttgacaatttccccgtctctaaaataagacactgtataacgctttaccaatttaatatagtaaatcttacagatcttccaattcagtcaagctccccaagtaatccggtaatttccctgtgaattcattatctgacgctttcctgcaaacagaccaaaatatttgacatttagcatatgaaaacacaatgaaaataacagttgaggatctgttattgactttacaagtacttcaggttcttaagcttggagatcgtcgaaggaaacgggccgctgaatccagaactatcaatgtacctgttattgaaacatgcagtaattatcaagttgaacactagatctctccattccaaatttagttcttagaaattggaagttataagtgaggcatttacaactgctcaagtttggtcaagttgcccagttcttcaggaagttcaccagtaaagttgtccaggctaatgcccctgaatcaagaagaaatatttcaggagtgatattaattatttgggttcaactgctaacagaagaggggcatagttttccaaataagccatctgagccactgttcaccagtacaatatttacttgaaaatactgacatgccaaacatatgacttatgagttttttttatagcttattgtcaataagttatgcgattaacaatttccctataattatattagtttacctagtccataatatatatatatatatagctctgattgatctcaaataaaagatctcttacagtgagaggagattggtgaggttcccaagttccttcggaagttgtccagacagtggattgaaacccaagccccttcaaatgatgaaagataattaaaacataacacccaccaatggatggtgtattaatccatagcttgacatgtaactcctacaaatatttcatggaagcaaattttccaatgaatgatgggatggcaccagtcaaataattctgattcaggttcctgaaacaacaccgggaacatcaagtccattagcaaacacaaaatcttgcaactaccatttgctgttttttgccttgcaatcaaaagttaattattcaaaggattttttacggtacaccaactctttccaaaccatgtattttgcatcgacggttcatattactcttacctcataggtggtaagtggacctttatgtgttctaatgtcgattattatgatagaaggaaatgaaatatgttttcaaatttgaatgtatacaatcagttctgtaagaaaacaaataaaatgctacaactgaaattctgaacttcaaatatatttggcatctaattatatttcctgtctgtttcacaagatatcaatcaatgattcagagtctaataagagtatcagttttcattcttctgttttgttttagtataaaactttgtgttatgattactttggatcctagatatatttggtatatttatttgaactttgaattcaggagcttcagttgagttagtgaaagattccacgtttttgtagctagacaacatcactgattacattagaaggataatacttttgcctgatttattaatggcaggacagaacattttctcattagggcaaagccatcaatatcagtatagtgatgagtattttgttagagctcttacctctaaagatgttagatggagccccctaaaaagaattcttatattcatggggttaaaactatgtattctacaaaacattgacatacagcttaacaaacttcattatcaatattaacattacaagtcatagatccatacaggtcttgtagaaaggtgagattctgtagctctgcaggtattcgaccaacaacgtttaactttcttactctcctgcaaaacacacaagtaatattgataagtaaaaggaataactccaatttttccacttttgaaaatagaagtccaattttggaccttgattttgcccctatataaacaaccatttgattttgccccaagaacatgcaaaacaaggtcagttgaccccggccggacaatggattactcttttttatctccaaaaaaatggattactcccgttgtgattcagcatgcactaactttgggatggactggtgtggttcatcttttcctcggagacattcatattgaattataaatgagaaaatcgttggccagtaattgtgaagaccaaattcctgattggatggggaaccaaatgcctctgcgtccctctaatggaatggtgtttgctttagcttgtatgcaagagttggtaaaaggcctttacataagatctataataaattatatgaaaaggtagacacatgaattactgctaaatataaatatattctagtaacctgattgcaaaaacagtaatgtaaattaacatggtaaagtcaagcacgtcaagctatggctctcaatctagtactatcctcaggtgtaaatagatctgaaaacgaaaggaagaacttttatatcaatggtattaaggaggtgagtctctaaatagaggataagattaatacactcaatagcatataaataattctcaaatgacacaatgtaattctcaatagcaagtggcatgtctaaagagagggatcaaaattttctgacaagtcaacagtacacgaaaatattgataaccatggttaagcatgactaagtggccatcttagatgacaattgcacccaacctagaggcaggatccgaagcatctagttcctggagatacaacgtcattctcagtaattcgggtcaacatagggtctagaaggagcagtaattctcagtaaataaaggtctagaaggagcagcatacagtaacacatagggatttgtgtgctggccacacaaagacaagaaagcaaataacgaatcagcagcaggaacgcatgcatgcatgcataaaaattgcttcgtgcttcacagtcatattgaatggccagccgattaatgctatcagctcactacgatcttttcctctcacaaaaacatgtgggctctagattttcttatttccaattagtttccagaaaatatgaaattcacaagttggaacttttattaattctctgttagataattctaacaatatacactttcacagacagattagtctggaatgactccaccattatagaaactcatagatgggttagggacagcctgtgatgaccctttcagacctttttcctagtagtgtgccggtttaagtctcaataggtcatttaatatactagccaaatacccgtgcgttgcaacggattatcaaaaatagaaaaaaaaaaagcagttctcatggttgaaaaaggaatatttatctctacttggttcaaacaagattcttcatattaaaaagtaaaacataggccagctattcttgtagaggttggttagtacaatgacctcatgcagtgtaccttatgacctcatctgtcaatggtgatggtggtgtagtgtaccccatggtcccatatgtcaatgg

SEQ ID NO: 22312 - DNA, 19270 bp, Oryza sativa
tccaaactcgtactgttggaaaattgtgcgcgtgaaaatattgtaaccaaaatctgaaaagaaatgaggtacaatattgggagtgttgtattgtagtaatagaagacttgactaattaagtcggatcctatcaatccctcttagggattgacttgactaattaaatcggatcttactagtctctcccttagaaaaaaaataaacgactcgtacgagacggtgcgaaattctattgatagtgtagaaaaagtctctcccttagggcttctatcaacgcttcgttgatagtgagcatgcgtgcgagtgaatgaccgagcatcccaggcggccctaagttgggcacaagctggatgtaggaagacttgactaattaagtcggaccctatcaatctctcttaggaattgatatgactaattaagttggatcctactagtctttctcttaaagacatatacaaaaggtagagtctgatatgagctcttagttaatacatactcacttatacaatattctcctagaatagttgagacaacaaaatctcttcacctttaatgcacacaaatatttttttattactctttttttcgttttattcttcccaagaaacaaaatattacgacttgactatgactgttgttatgcgtagcaaccatatcccccctccccctcacgttacttaatttactttgcatgaaaacagaagaaatacgttaatgagtagcgttgtatgtgcccttagagcatctccaacagtctcttcaaatctaactctccaaatgtctatttgaccaactctctgtctaatttagcaagtcaaacttgtgtttactccaacagcctcctcattcaccctctctattgcaagtatatgacagtgggacccacacgtcagtctctataaccctcttttcccctagccccctccgacctcatctgcagctgccatctaccgcggtaccgccgccgctcgggctctgctcccctctgccgccgccgctctggctccgccgccaaccgctgccaccatccgctggcgccggcgccactaccgctctggctccgtcgccatcctccgccgccatcgccactcgggctccgtccccatccatcgccgccatccgtcgccgctattcgggctccatcgccgccgccgctcgacggcgagggacgacgaagattacagcgacggcgagaggggagaagccaacggcggcgaatccgtgcgcaacgaaggcccctcttcgcctgcaactcgagaggcgataatatccgcgcgacggcgactacacagacgacagcggtggtggctcatgacgacaacctcaacaacggcgaccttgacgatgacccggggcgtgaaggcggaggccgcgcggccccgaatccatgccgccggccaaatccgcgcgaggtcgtgcggctggccaaatccggcaggggtggataccgcgcagaggtagagtcctccagacgacggcggccgcggctagcgccgacgcagacgacgacggcggtggttggcgacgatgaccttggcaagcacagttgatgggcgacggcgagcgtacaggaggccggggcggcgtcggacagagaagactagaagaggggagatggagaaagagatagaaagtgggacccacagtggggcccaccgtttggccaggggaggaggctggctacatttggccatccaaatagcttagcagttcaaatagcaagctgttggagtgagttttttcactgtttgagctaaaatttagcttggagagccatctagcaactctgttgagttgctcatctcatacggccacaagctgcacgcaggaagacttgaacgagcatctcatacggccataggctgcatgcagcttaatgcttgacttgactaatgaagtccgatcctttcagtctctctctcaaggctttataccaatctctctcttggcttcttcgttggtggtttgggtgggattgggcatggtatatttccgcgtcgacctcgcgacggtgctcttatcgttccgaccaccgctgcagcgcgcgtcccaggttgttctctcgcaagtccaaaaccgaattgttctgatttgtttctctataatgttacactgttttaagcttatttcctttttcactgtcgaattataaattcgatctcgagtttcaggatgaagaacgagcatgccggtaaactaaatttgctgccagcacttcaccgggcctgcttgccatgcggtgagacatcctaaatttcacccctagtaagcatgtgcacgtaattagaacgcgaatcaaaagcacaatacgatacagacgaaggatctgcccaaaactggatatatatttatggtcaaagtaaaccaacaacgatgaaaacagaattaagctagtattgcagtataaggagccctcgattgctgaatgtacaaaatctcttgagcatctaaaaatctggatctccagtgcaacaagaatgtctgagaagcagtacactgtcagtagctaaacactgcaccttagtctcttccacatgacaggagatgaaacatcttcccaaccaaaaggtaccttcggccttcctcaaatgcagcctggatacaagttgaagaactggttaggccaacggcaaaagcatcaagctcacacttccaagattaagggcccctatgaatcacagaaatgagaaaacggagaaataggaaaaacataggattctgacaggaatgtaagtgtaaaacagaggattgcaaaacatagaaatgactgtttgattgggccgtaggaaaaacacaagagtttgagataaagactcgaaggattctttccattcatgttaaatttcctccaaaacttgcatggaaagagacattccataggaattttataggatttcataggattcattccttctatacaaagggctatatatgttaaatttcctccaaaacttgcatggaaagagacattccataggaattttataggatttcataggattcattccttccatacaaagggctatatatgttaaatttcctccaaaacttgcatggaaagagacattccataggaattttataggatttcataggattcattccttccattcaaagggctatataggaaaaattcctattaggaatgaagtcatctaaaattcttatgaatttcctttgaatcaaagaggacctaactcacttctatgtgtgtataatagtgtaaaatatatcacaaataattgcaaatgaacacttgactacttgagcaacttgaataagagtgctgtaaaaaacatactgagcctgttaagatacaatgttaatgctttgctgctgaaggacatcttactatatcacaaataattgcaaatgaacacttgactacttgagcaacttgaataagagtgctgtaaaaaacatactgagcctggtaagatacaatgttaatgctttgctgctgaaggacatcttacctcagagtttcacaacttcttgctttaaatcttgatgttgaagtagtcagaatcaaaatggtgcagccttacatatccatcttcaccaccactcgagaagctgttaacaccgtattatacatgaagaactgaagctcaaagcaaaacactttctgaacaacataaattaaccatgacatgtgagaaaatatgcttgaagaatataaactagctatcacataaagcagctctcataaattttctttttcaccaatagaaatcagaatagcgtatatgaccaaatctgattggcaacaatcactgagccaccatgagataaaataaaaatatacagcaatcatcagaaggccagcttagtgcccccagcaagacatcaccaaatgagaccaagtataaaccttcatcaatctaacttgcaatttaaaaaatatatattttgacatactttacaattttcagataaagaaatagtggctcccaatggaaaatgcattgcaaatggtcatgaagccattaccttatgcacatacactcaatcaatacatgaaaccttgcatcaacataataattatataaatatggaggtgatagatacactcaatcaatacatgaaaccttgcatcaacataataattatataaatatggaggtgatagataactatgtttcttcctaggatgcctcgtggatgttgaggacagaaaaggtagctctcataagtcttatttttcaacagctccaatcagaatagcgtataaaaccaatgtgattggttgaaatcacagagctttgaaaccaacaggcacatacgacgcttcaaacagctatactaagaatgcaactcaatttcacactaacaggttatcaaattaaatattggacatggcatagctctcatattcttatttgtcatcaaacagtcagcatagcgtatattgccaatgaaaacggctgcaatcactgagctatgtatgacaagaaaagtacttcaacaagacaaatagaaacaaaaaaaacataaggattcaatggagaacaaaaatgtcaaacagataggaagaccaatgaaccaatttaagggacaaatctagagaggcggtgggttaaaataacaggtgaatgatgaatagttgtacaacaatataaaagtcaaaaaaacttttgagtaaaaagaagagaaatacccatgtaaacacagccagtagaaccacaagaatgtgctaaaaatccatgtggcaggttaaaatacaaaatagacacctgctctcataatgtttatgacatcttaatatgattcagaatagcgcatattgccatggattaacatggcttaatcattgagcagaaaacacacaaagtaatatgaaacaaaaagctaatcgagaacataagtgcggtggtagaacataaatatagcattcatataatattacacatgtattaagaatattacctccgtccatcaggattaaatgccagtgcgttaattggtccaaaatggccttttacaccaccaatttcctcttgcaaaatctgaaagtaaaatataagtgtcttattgctaaacgaaaaaataacattgcaaaagaaaactacactatcattgttctcactaaaacataagatagaaaccatgtgcaaagaactgaccttgtgaaagaatttcgcttcaaattttcccgctcgacgatctgtcatagtcacattcatcgcatcttgaccacctccgataaccacctaacacaacaaagatttcttgtgacttatatagctggaataatgataacaagaactgactactcattacagcaacattacaggtggatagttcagatgtagccaatagtacatttttccaatggtagtaaaaatacacatccttgatagccaacagcactcaaataaatatggaattgtgctaaatccagggtcaaaagatgtgctggacaggtatataggtgccttgaacttcccattgtatattaattgttatttatgcatgtaaaagtactaattgcagataataaacatgtgaatgaatcatttgttgctctcgtcttggtgaaactaatcacacaaagaaaatgatttgaaactgagaacaaaaaatgtggcagcaggagaagagaagaaaccagaatcttcggaaaaaagcacaagtcatatccaacttcaacttataaggaggaccacagcaaagcaaaatacagagacagagagtaaaggtcatttcaatccctactacatattgagatcatatgcatgtagcatgagataacaccaagtaatttaaagcatgaccatgtattttgattaaaaaaatctatagaagaacttacgaaaatgtagataaaaattaggtattacataggcacatacatggtctagaagaggagaaatgtcaacagcattaacaggtcgctcggtgacatatgtcttgatcagggtcagagttcttgtatcccatagctagccagatagcaatgtgcatgtcaggaaataatcatatttgtagcacaaagtgcaaacaattggaagacatgattatgctagccacatcaacaaaatatcaccttagcagacttatccaaggagcctgttaggaaatgtgaccaatctgcagattttgaaagtgaagtaattgttttctggtgtccttgttctttgtctgactcattcagacatgttccagtctgcacatgccaaaccaaacagaatttaaaaatgcattcaatgatagagttgacggaaaaacatgttcctacccatacaattaaatagttggcatgtttaataaaaggtaaaatgacaacccagcgtacattatgtatgaatgtagcatgttttcaattagtgcacaaacacaaactaccattttgtcgttggcaccatattgccagagtcagtttaaataaaacaagaaacctgaaaggtatttatcgctggttcaatagtcactaacatatgtcatgttaattcataatgttgccatcaataacaaactgacaatcacacatacgtaacaatgatttttcaaccatatcgatgagcatttttaactattaaacaacttttcacttgtcagtccagatacatgtcaaatgatcctacaagagcgctacaggtccacataccacagttataagcaaattatcgcattcctgaaaagcaccagaagcctagtactagcgatgagtttgtagcaccaacgatggttagtagaactatgtgcaaatgttgtaaatgcaagctaacctcagtgtcccaaatgcggatggtggcatcctcaccggcggtgatgatggtcctgttcaacggcccccatacagccctgttaatcctccccttgatgccagaaatcacgagaagagactcctccgactcttcatccacaaccacacacttcagaacccacgttgttggggggaattgttagggaggaatatgagtttgaggggtggggattaagtcaattgtttggttggaggacatgggagtttttaggagggattgggaaggggagtttaagagtgaactcccaccttttcaatacctggataggggcacgtaattggaagggaatttcctcctaagtatcacgagatgtttctcatcatctcatctctactactccctccatttcatattataagtcgctttcacttttttttccctagtcaaacttaagtttatagaataatttagcaatatcttcaacataaaacaaacatattatcaaaatatattaaatgttagtttgaatgaaactaatatcatgctatagatgttaaatttttctataaacttaatcaaacttaaagaagttcgactagaaaaaagttatagtgacttatattataatgtgaaacggagggagttactaaaatgaaactcccatgaccaatccctccaactcccaatccaaatagaagccaccagaagctttcgaaacataaatagaaggttagagaagaggcatcttacggtcatcggggtcgtcggcgatgcgcttgacctgggcggtgggcacgttgcccatgaagttgtcggtggtgatgacggcgaggccgtcgccgatggcgaactcgacggagcgggcgggggcgtcgaagcggaaggtgaagagctccgccccggtctggacgtcccagagcttggcggtctggtcggcgctgccggtgatgaggcgggtggagtcgcgggagacgtcgcaggaccagacggcgccgttgtggccgctgtaggtgccgaggcggtcgccgttgtcggcgaaccagacgttgggggtgtggtccttggcgcacgagaagaggaggtccccgtcgcggttgtaccggaggaacgtcagcggccgctcgtgccccttcatcaggatcggcctcatcttctcttcgccgccgccgccgccgccgccggggaggatgggtggttagggttagggaggtgggggttctggaactctggaaaaccctagctcgcgggtgggttgggctgcctggtagtgcgtgtctgtccgaacgggagggagggcttattaatagccgagttgttgggccgtcctggcccaatagcttactcaatattttggattttcgagtttgtttacttgaaaatcatcttaccaacatttagtaaaaaaaaatttggacatgttaccaaattttgttagtattggatatgtttagtttgaacctttctaaaatttggtagtgctatatattgtgaaacggatgaagtatatgttacctactaaaatttgatacggttaaaagtgaacatcctctttaattattttcttcggtgtccaatacgcacgatggtaggctagctatttggtggacgtccgtcaaatggaagattagtctaattagctcaaaaccgtatgagaaacgctacatgcgtgttgtatataaagcatatgagaaacgcgcagggatttttcagctagctccacaagatgtgggctagccgatctgtgtttgaagtctcacttcttttcattatgtgatattagatcattccctaatattcgcttttttatatataaagcatataaatgttaactatgatatgctacatatgcagattgacttagctagtagtagttctttattggtgagaggccgttttgttttgcatgtttagtttttagttgatcggttgatcattattaggctcttgagtagaaaagtactcgcgtgctgttgtaaggtaagttcgcatgagtattttatgtaggttaataatactcttgtttcggacaaggctatggttaaaatttaaaacctttaactacaaataatatctaaaatattttatcttacatatatgaaaccatatgactagtcttataaaatactttaacaaaaacatgtattcattgatattattatatactcccttcatccaaaagttcaaagacctatttcttctgtcaccaagactaagaagtaattaactcatctatcatgtgacaaaacctataaaagcaagtttaatagtacagctaactattggctctaaattacatagtcaatttaatagtcaattcatacaatatgtacctatgtctggtcccacctgtcatgcacacatgcatcttagagtccgtgctgtagctggctacaaatctgtaacccgctgcttttctctctcatcttttatctccttaaaatatgtttatagctgacttatagtttgctattgtacctactctaaactatacacatgcacgcatgcatgcaatcaataagtattaagatggtttcttgattctggttaacaatttaatttagcacatagatactatagataaggtttagacttttggaaaaaccaaaaaaattaaataggtcataaacttttggaattttttagaactataaacttttggatagagggagtatatattgtactgaaaaatggtgatcaaagttgctcttagagttttttttttttcaaaattatattactatcaacccagagaaaataatttgtaaacttccgcgtacacacaagtattcaaacttaaatgtatggcataaatgactcatgctaatactataaaatttcaacttttggacacaactgtctcctacttacccctcccaacatgtacttaccagaactagtgcatcctccatctctgttgaggcagagtagatgaggctattgtacttaccataactttcagctggaccggctggatgcattcagagtaaagtcatatagggtgtgtttggttgcctgcatcaggcttggcctatatccggagatgcaacttccgcttgtttggttagtaagtacgagtaccgaacatctcgattagtaagtactgcacagccttgctgcttgactccagaagcatagcaagacgcttggaggatttggtgcgtggaatagatagatatgtctaaaccattgcttacactttgcagagacacatattgagtttgttatccttgccaagtttatatatagaagccgtgaaaaggtaaaattcttcggttgcatttacgtttcccctatatttacccacttgcactactgttctatacctcacctcagttaccaagtgagacttgtcgcagtctcgcacataaactcgtccacgcatttgatcttccacatctcatcatccatgccccaatcggaatgcggtctgagccatatgcttctcaatatacctagcatgttggcttttaagtgtcagcgatatatatacttacgataccgagatacgtacaaccactactaacaaaaccattttttgtgaaggcaattttagatttttgcttgatggaatttagagccgccacaaagcaaagaccagtgaagattaagatctatcgaccgccaacaaaaattcgtcttaaaccacccgccaacaaagatccatttttactggcggttgccttacaccgaccgccagtgaaaattcattttcgctggcggctgtgttaaatcgaccgccagcgaaaattaaaccatgcagttgccctagccgccagcaaaaaggaaactcgaaaagcaaaaacatataaaataaaacactgctccgtccacctccgtcaacactccatccacaaatctacataaatttacatcaacaatttacagccaaaaatttccattcacccaagcattcaagcatcacaaatatcaccacattaagagggagagggggtggtggcggcgggggaaggggaggagggatgagcgggagagagagagagagagacagagagagagacctgtggagatgtcgcctcgcgcctccccgtcctgagcgccgccgcccgcgcccgagcccgcgccggtgcccacgcccgagcaccgctgccctctcctccatcgctcgcgcccaagcgccgccgccctttcctccgtcgcctgcacccaagcaccgccgcccaagcccgagctcgccgcccggcgccgactttggaccgtcctgagctcgccgccgtcgtctcctccgtcgcccgcgcccgagagccgccgcccacacccgagctcgcgctccgccgcctgcgccccgtgcccgagggataccgccctgtggatctggagggaggaggagatgttggatctggagggactagggaagaggagagagttgttggataaggatgggtaggtggataattaaagagcggtgggggcgcggtgaatttttaatggcgtgattctttcaaggcggcgctcttcattaggttaagaagaccgccagtaaaaataggattatttttgtaagcggacttcttgacctacaaccagcgaaaatggatttttattggcggtccaaaaccctctatccctcattataatttcgcaagcggatttttcatttaatcgccagcgaaaaaataggataccgtcatgaaaaatcgtttttttagtagtgaaccaaacttatatgctatagaaaataacattaaaatcaccataaagtacaggagtgtagtaaatagtagatgggcaaataatgtacattattagataaatagtggtctcatttgtccactttattatagctaattgctatgggggtgctaatcagcgcatgcgcgctggatgggcaagtctcccacattgtctccattgtatattttcccgggcgtctctctgtccacacagagaatgagcagagcggagcgagtgacgatgacggcagtgcccctcttcggcgctagcgagaccgtttggtaaccagggtactctttctgtaccaccgcttaacaccgtgacaccaccccgcctcgccagcactgacatgcatcaacgggtctacgcaaccccactgagccagcctcctcccgactcccgtcccatttgcctcgcttttcccccacaatcagcaccaacgtatcaccgctaccgaccccatggctccggctgcacctccattgtttgcccttgtccactatctaccaccggtccaccgcctcccaggccactcctgtaagcccgatctccacttccaagtgccaccctcccctaaccccacccctgaaaccctgacctgacacttgttgtcatgctatcgaaaagctgttcacgagatggctaggtcatgcaattaagctttccgcggttggcctgcttgaattgtaaagataaaaattccatttgttaaatatatatgctgcatatttttttaatataatgtattgctagtttgcgccatgaatagatttttgtgatgaagttacagctgatgccccttcccccgctcgagcattttctttttcttttttgcgattttcttttttcgactttggcgactccgtccctcggcacgttttccttttttttttgttttttcgtttttcttaatcttcggcacacataataaatcttgaaagttttcaaatcttgacttaaaagttttcaaatttcgagttgaaagtttcaagtctaagttaaaagtttttcgaatttgagatgacaagtttaaagttttcaaaatttgacttaaaaatttaaattttgagttgaagttttcaaagtttgagttgaatgttttcaaaattttacttaaaagtttaaatcttgagttaaattttttttagttttaatttgaaagttcaaatttagagtttagagttttaaaatttgggtatgatttttaatttttttaatagaaagttttaatttttatttgaaagtttcaggtttaatttttttttaatccgttagtaaaaataacgaccttcgaggaaaaaaaagaaaaaactaccttgattactactcccgagaaagaaaagggcttatcgtagatgggctgaaaaacgacgtgcgtgtgacctcccttgccaacgtgaattaggggctattcagattatagccaaaataaaccttaccaatattaaaattttggtaagttagtgatattattaaaattttggtagaatttcttatgtatttaccaaagtttggcataaaactaaatatatacacatttttgataactttatttaaaaaaggtatggtttgaaaatggaaaaatggcatcaatctgaacagttccttatgaattctgcgggagacaagcctatgctttcaccatgcagaaatctaccagcaatctttgcaaaactaaaaggagacaagatgcatcctaatgaacaatctgttgggccattctgacaatccttgagctttggcaaatatagtaccgaagtatatttttgcaactgtaacccttaacccaacatatatgtattacaacctcatcattaacgtactatatgtaccaaaatactctcagatgttcaactagaatactactagtaggaatagaatcatagggttgaaaattgtagacctaggatcatcatcagactaaacaagatgggcatttgatcgacccgtctggtagtcatcacgagctatctcataattctgcttgagctcctcgtagtgcttcagtgaagcctctgagaactttgtcaggcgatccagaaccgtagttagctttgactgcaacccttccactgcttccacgcttccactcacctcctgctcgttattctccagcatcccacattcctgcgactcgtttctagactgcgattcggtcgtcgttttgtcctgatgatcggccgggtggtcaaacgaaccgcgcaggagctgcatcacctctttgatggacttgcagagctcatctgtggggagtgactgtgactccatcatggcaagccagtctctgcagaggacaaagatcggaggggagagcgcgtggcggggagggaaagagaccttgcgcttgcgcctccgtctgtcctgggctggctgcaggacacacttctggagccacgcgttgagggactcgacgtaggacttgtgagcagtgacccagatcctgaagctggacgagaagcagtccaactcgttccagagatgcgctgcggccctgcggtggtgctcaccttgctgcaccatggtcgaactcttgacatggtatgccagtgatattgtgatgaattgtttgtggtggcattctaacattgctttccacattctgattaacctgcacgaggtatgtgtggtcagttcaaggtttaatatgcaagaaatgagttgaactttaaaatcaacataatccaagttgttttttcactacagcttaagttagaaatgtgagacttcaaattgtccaacaaaacatggttcttgaaagatagtgaatcgttatattctaattttcaatgttctagcaccaaacttaaattgtgagtaatgttgacagttcaaatgctcctaccaaacgcacgaaaaaggaaatatcaaacttcaacaaatgcactgtatccaacaattgtgataaagtatgcaagatcaagttacggcactgctaaatcagctcgacaagtttgatatttaagtacaagtaggtgatgtttaagtacaagtttatacccttggatcagctcgacaagttgtggctgcagttcttcatcccttatcttctctattctttttgatattgcatcaacagcctggatcgcaacagacaccctggaatgaagatccttcacaacagctctggtcttatcaatcagttgagcatttagacctcgtgcaaattggcgccggagaaggttacatttctcatcataagtctttctaacatgttcactagcctacagaaacaaaataatgcagtatcagtgatccattatgccaatgacagtcctacagagagggcaaaatttcatattaataactttcagcctgcatactgtctttgctaattattgtacaagagttcaattctgctgacaaattagaaactaaattgtattatcaatacaaataactatacaaaatatgctttgtattgtcaggtcttctggcaagagatatcttttaaataaaaatttgagaactgcaactaaaatagaccaaatttcacttgaggtatacaataaagcaaatatcttttgtagacaagtgacactaatgatgaattcccaatcaacagccaggagtagagacttgcacgcaatactaaagaaatctcactgcacaagtgcacatgtactgaaaatgtaccttgatttcatcatgtagttttctctcccaagcatgtaacctatccaaggtagacgagtggcttccagataccatggcgaattgctcaacaaaatcactgttactatcacccacatcatcagtaatcattgctgctgtaagtggactcttagatgatgaggacaaagatgatacagaacgcttccaagtgacaacttttgagatattctgtgcagtttctacagaaaacctcaaaattagtacttcaaacaaatgttatggtaaaaatatgagaagaggtcagtaaagcatcctacttaccctggttgagaatattctcacgattgcagcagactcgaagtgcggacacaaatcgggcagtaggtggcttgcctggagaacctggtatttgaggaataaaacaaagatatggagttccatcaaacaatgtcgggcatggtgcaggggaaaaaacagacaagacaatgactcagcatatgattatcacctggaatcttagcacatatatcaagtctgatcttctttgtctcaagcattctggaaacctcattcccagcttctgcggcacgtacaaaccgagtttcaatgtctttcatgcttgacacaaaatcttttgctctatgagtgatgaactctgaagggtcttctgcttctgtgcacaattctttttccatgtcatcttcctccacctttgctccaacttgcccagaagtagtagcttcagttgtaacctcaaccgatccacttggcttactcatcccacctttctttgcttgggcttcttgcttaggtgctgcattatcaccaggaagctctgggtgcattcgatcagacctgtttgttgtttcttctctcagcgagactgcttcagattcccttgaatctctcaggcccttcaatctactaaaatttaatgtcactccattctcattatttgaggtggcactaccagaagtataattggaatcgaagaagtcccacgaggtacataattcagggggcaatggtggtggtggtggcacaaaggtagataccggggattcttgccccacaaagtcagcagcagatggtcaatagtgaacgtcaaaggttttgttcctgctgctttcatgtaatggatctttgttgagggaggagtcagctgactacctcgatgtactggggagccagtgctctctactgctcgagaaggtgatggagaagccatagaagaatgtgatggtgacttatctgcttctgaaatggacagtgatgattctggtgagatctcagactctgcataccgccgcaatgcagtacccacactacggagggactgagtatatgataggtgtgatgccgacagtgcatctcttgaatcaatagctcgcctgatatggcgcattcgctccttgcatagaactagggcatcctcaccagtggctttggatggcgaagaacccattgtgttcaacgaaccaacaaatactattctacaatgtttttgagaccaacagattcatcaaaagaccagctacaaccacaagctaccactgagtagaattcctccctgaaactggcagtagtcttcagtccttggatctaatcgaaacaacaaagaagaaaggtcatgcttccagctagtagaaataactaacaatagaaagaacattaagtaaagcataatcttaaaataaactagtgaaatccaaattacaccaataaaacaattttgaacagaggcacaaaattcgtcacatatccttctaacttgagctatagatgcccaactcaacagaaagtctttaaaaagttcactccatcaggcaattagccggcacatctgcaggcctcacaagaattactccacgggcaacattcatctctatctttgttgaaaactcagcctcctcagacctccaaagttccaactcttcaagcatcatccatggcggccgccggtgcagggaacatgcaccggcaagaaccaatgtcatgggctaaggtaaagagcaaaagaactaaaggaacaacctttgctcccctacccttgctaacctaaaaatgctcaagaaatcattacccaatggccaaatgcaccaagtccattcaagcgaacgcctttgactgagcaatttagggattaaggcaaacaccagagcagcaagagtaaaatggtgagaaaagcaacaagcaaagtcacctttctccgattcctagctctgaccaagtaacaacaacatcatagattcatagattcataaattcaccacctcaaaagcaacacccacaatgccataatctttctcgatgcagataccaaatcctgatgaaatgacccagcaggctcaggttctttagattaaaaaaaaaacaataagtgtgccctaccaccacgacatgggcaaaaggggagaaaagaaaaacataaagagagggctaaaataaaatagttccccacatatagtattctcttccttcttgctagttgctaccaaaatcccagtccaatgtggtcctcacaaatcgcaaatcaccaacaaaatcaacaaaaataatgcagcacaggaagccaagcaacaatcacaagcacactgcaccctaaacccaaccgaaaccccccaggacagcaccaaagaaccctcctttgcctcatctctgagactctctgaccatcacaaaccaagaacctaccacaatctattaaaacatcaagacaagagacctcaccggagcctgaacaggcggcggcggcggaggaggaggaggaggcggcggctggactaaacgggagcagcggcaatgcggtgcgggcgaccgctgtcgatcgatccgggtcacatgcgcacaccagccgcctcctgtcgatttgtttggttctcggagagtggagtactagtcctggtagactactcctaccactagcacactagcagtagtaggagtactagagagataagtaaccgttaatggcggtggagagagagagagtgcggtgcagtggtgtggactgtggagtgaggtgggtggagactggagagttggagacaagggaatgagagcgaggggagataaatggaggtgggggcaggaatctaccctgatggcccatcagatggaggtgatgccgtgatgggcagatctttttaccccctccacagctccactgcattggttgggattacaaatctttttttcagaaagaaaaaaagtgttgtttttactataggtaaatatctgggaaaatatatagtgcaaaaacaaaccagaaaattaccgtatggttaaaaattaatgttttaaatttgtccattttactagaaaaattacttccaaatttaatttaataggaataaaatttttactcaacgtaatatggataaatctcaaatatctatttataaatattttctaggtttgcactatatatattttttccaaatatcttgtgtgcactttggttaggattgaagtgagagcggccatgtaaaactaaaaatagcgatgaaaacggtcggagtcggtatcatatcttcgaaaacgattcttgatctatagaggattaactatatttatcaatttaagtgtttagtgttgataacaatacaatgtttaaagaaattaaaaaaatgaatcactagtacaaaaaaagaacatacaggtggtcaccataggtgctagaaatgctaaaatcggcacttctagtgcttttcccgtccaaaacacgcatccaaggaacaccatcagctagaacagacacctttatggagagataggagccagttctaaataaaaaccgatacctatagtattagtgttagttttattagaagaaacgacacatataatatattacatgtcctggttttttaataagcaacacctatatttatattgtaggtgtcggttagaaaactggactaagctgaatctttccacctctctctctcccttatcttttcctcattctctctgccttttgccctctcccactctatccatctctcagctctctctctcgccccctctctctctccaccacaccaccaggcggaggcagcggtggcctggcggtgggagggtaggcggcagcgccctcccctccaccagatctggcggaagcagaggtggcagcggccccgtggcacgccctcccctccgctccatccgattggaggggaggcggtgacggcctagtgactgcggcggtgccctcctctttgccagatctggtgggaggggaaacggtggtggtg

SEQ ID NO: 22313 - DNA, 18465 bp, Oryza sativa
  unsure (1)..(18465): unsure at all n locations
tgcaacacctatgaggcgcgtcatgggtggggccttgactgcggtgggcgatgagagaggtgtgcggcgggtagaaactcaacggcggcgggctgtggctagtggggagaagggtggtggtcggtaagagaggctcgcagtggccccttcctcttgccttcaccgttgcaaacttgcaatcgcgtgccgccatccagctgtctcgatctacacgtaaatccgaaggtgagaaggacaacgccatggtgtgccgtcccgatttcacacacatctcggaccccgtcgccgccccttgccccttgttcccgttgtcccgtcccgatgggaattgcagtgggcaggtaggatgccatcaccgcccacttctagaggcgatgtctcgttggatccctggtggcaaagcccgccagccagttattcctctcaccacccaccactagcctccatcctcttcaccgcctgccgctccgccgtcctcctcgccacccgccgccgtcctcctcactacccaccgctggtcttctcctcaccactcgccacctcgtgagatgggaacagcggaggaaaagagagataggtggagaggctctaacatgtggggcccatgctgactcagcgattgactcggatcaagttgccacgtcggacaaaaccacccactatactgtcatgggacgtacgttgcaccagttttggcagttgagggacccgttgcatctcgtatttcgattctaggacaaaaatcgaactcgctggaacctataaaatgaacctattcccctcaccatcagggctcagcttccagcacgattcaaggaagattgggcagaattgttcgccgacttcgagctttctgattgcgaggaagacagccaggaggagtaagaaggaaaggcacaagtttgagtcaaattcctgcaaaacttagcgaggaagaaggaaaaggcacaagttgagtcaaattcctgccaaattctcacaaaattcctcagttccaaaggaggcatgagttaacatcgctgctgcggaatccaactcaaattgaaaccaaaaccaaagccagtgtgagagaactaaatccaattgatcaactgcaactgtaatggttcacagtgaattggttacagatggtactagtcaccaatcaagcattctagctgaaacactagtttactccagtaatttggcagcatgatgaccaacgtaggagctagtagaaactcctttgtagatactgttatgggtaaagcataccaactgataacacatacgcctacttgccagtatgaatgaaatgcagctaactaggcagtacattttcaagtcactcatttcctaaccaggttgataatattcggaatacatattacacaaacacagagatattttgagaactagagtacaaaagaaacttgatgttacaggggagtggaacacttcatactcaatcagaatcagaatcttgagcggttgaagatctgaccctcctgttcattgacatataggtttcatcatcttcatcatcctcatccttcttcttttcgtcaattatacctatattgttgtatgttatcatatttgttactatttcaatttttgaagtaattgtgaagacgtaatagatatacctttcatcttgagtatattttccaatgctcttgttgaaaaatcatctttgctgccgaggtcttgaaacccaattaaccgatcagcagcaatgcccttcctaaataacaaaatgtcagttggacagcaaaaacagaaagtgtctgactcttgggttggtcctcaaaaaagttaagcaccaaacagttgagcacatgtgataaaaatccatgggtagaaatgatgaaagtttatgcacttacttgaacagtatcacacagggcaatgttttgattcccagtttcgtgacaaagaacggagcattctggattagttatttacaagattagacagcatctttgttataaaatacaattaactgaatgctaatagagatcgcattctaacttcagcatcaagcttgatgaatttagttcccaaatagattggtgcaagggccttcaaatgcttatccatgatcctaggaaacatttagataggtgtccatgaattatcatcagggtcaatcataaaacattttgtattgttttttaaagaacaacttatgtcctacttgcaacggtaaaattcacggtggtagaaatggcagatgactttttcactgccagtgacctctcctaggaagtccccttcagttatctccctatattcaccatgaccttgcctttttagcacttcacgcttctcgacctctttctgttatgcacaggcaaatgaataacttaaagtgaagagttcacaagcttcatgagggcaatatgcagatactaccttgagagcagcaattctctccgcatgcaacttctcaagctctgggtcctatagtgtagttccacagcatgatagataaaaaggtattcagtgcttcaaactaaagaaaaaaaaacaagagaaatataaaagatactatagttcaactcacatccaataattcgtcaagatcaacttcatcatggcttgcacttgctgcttgggctttctctttagctacaatttcctaacatgattactatgtcagtatgcagaaacaaaatcacaagggggcagagagaatagtattaccctgttctgtaagcaaatttgtttaaaaagatgcaagaggttcacagcatcggaacatgagggtaaaaatactttcacccccactataacaaggaaatgagtgaaaatgacacaaagaataagagaagataagaacttgcccaatcacattacaaggagtaaagaatcaagtataaataaaaaaaaaacaagtgatgtgcatgaaggacagttacatctttttgttctatactttcgatgtaaacttcaacagtttgttgctgtcaatatacagaaagctcattttgatataaaaaaagaataccgataaactttacacaacatgcattcatgtaagagcaaaatgcatcagaagttaacccattaccaaaatacataagaacgcgcagatggagcatgatccactgcagctttgattattgtaaacttgcaagctataccccaagctaaccacatttacaggctaaatgggagaagcccttgtttttgtgtactctgaggtgtcataaagcattacctcctaaccagcatggaataaactggtctctatagagtctagaccctgcaccatcactctatttcctgtcctagaatacaggactggagctaatccatcctcctaatgaactatgatcccaatcccaatgttcccaaccaaagattggatcatgctactaggcaagatttttcgcatgaaccaacatcactcccatagccaaaggctcaaacctaatgcgcctgccctttcccaagacgaaaaatcacactgctgtagtgctgtattaccaggatcatcctccacattgctatatggttctaccttcaacaatccatgcccgcagcacagctgagccgaggtgaatcagctgccagttccaacgataggtgtaccggactacaactcacttccaatttaaaattgagatttaatcgcctggttctgagatgcagggatctaggagcacaccagctccaccaccaccagccaacctgccagatcagtttttacaccccccccccaccccccaaccccttcttaaaaaaaagaaaaattacaacaaggacataaaatgaaaatgatagaagataataacttgccaatctcattacaagttgtgaaaaatcaagtacagataaaaggataaaagaaacaagttatgtgcatgaaggacagttatatctttttctctacactatgatgcaaaccccacacttttttgctgtaaaactacagaaagacgattttgatattaaaaggactgcctacaaaatttacatgacatgcattcagaaggcaacagaaggtaaaccattttcaatatataaaagaacggccagatggatcatgatcccctccaaatttgattattctaaattgaaataatatcttcaactgagccacgtttattggctaaatttgagaagaagcaacctttgataaatgataaagaattatcatcaccaattcagaacggaacacagtagtctctagaccctactacatcactctactagttgtcctggaatacatgactggagataatccatccccccttatgaactaaacctcctcatgatcccaatcaaagaccacctttcacaacccatgcccgctgcgcagccgagccaagtgctccgcggccgaatcaaccgccagagtactagactataactcacttccaatcaagaacagtgatctgatctgatccccgcgagataaagtggcacgcgagacctaggtgaacgagcgtcgggagaagaagggggggagtgagtgagtcaccttctggtagtcgcgggcggcggcggccatgacgttgccgaaggccaggttggagagcgtcgacttcaccgcgtcgggatccatggctgttcctccccctcttgcgatgctgctgctgctgctactccctcctccgcgagcaccgccgccgccgcttctgctcggccgagatctcctcccctccgatccgattcaggtggcggcgccgcgcagagcagctcgcaccggagcaccagtggccgagagaggtgacgtcggcgctagcggcgggcggacgagcggcgccgcacggttttcttttttctttccttttttttttaggcgagcctcgcacgattgtgctgtgccgtcgcccggggaactgtacgtgcgtatggtgtatagctgggcaaatgggccgtgccaagcagggcccagcccaagcacggcacgacaccgcctgggtggtgcaggccaagcctgtgtttaagcccatataagacgcgcaacccaagtcttacgcacaggagaaatttggtaccacacgggaaatctacgtagtcttagaccattatgctcccactgagctcggtggcgtgagcttgtcaccccagctgcagggggcaggagttggcagggtttgggggattgacggtatagaagatatctctctcctaacccacgatagaagccatggcactgcatggggcgggtgtggtatatataaggtatctctctccgaatccacaaagagatagatgccatgggtgtggtatatataaggtatttctctccgaacccataaaaagatagaagccatggcactatattgccaactccttttcttttcttttcttttcttttctaaattctaaatgggactagctagctatattttataggaaaaagggcactatattgctaactccttttcttttctaaataggacacggggcgggtgtggtatatataaggtatctctctccgaacccacaaagagatagaagccatggcactatattgccaactccttttcttttcttttcttttcttttctaaattctaaatgggactagctagctatattttataggaaaaagggcactatattgctaactccttttcttttctaaataggacacgggtcttttcttttcttttctaaattctaaatgggactagctagctatattttataggaaaaagggcactatattgctaactccttttcttttctaaatgggacacgggtgttggcagggttcgggggattgagggtatataaggtatctctctccgaacccacgaagagtagccatgacactatattgccaactccttttcttttctaaattctaaatgggactagctagctatattttataggaaaaagggcactatatttgggactagctagctatattttataggaaaaagggcactatattgctaactccttttcttttctaaatgggactagctatattttataggaaaaagggcactatattgctaactccttttcttttctaaatgggactagctatattttatagggaaaagtatgaattaccccctccctcgaactatcgcgatcatccgaattacccccctgaaccacaaaaccggacattcttcacccccaactatgcaaaccggacaaattacccccctcgacccaatccgcgggacattcttcacccccaactatgtaaaccggacgaattaccctcctcgacccaatccacggtggttttggtctatgaggcagtccagtcagcattctatctataaaaaaatgtgggacccaatccatggtggttttggtctatgtggtgtacacgttgcagtctctcactcttcctctcttctctctctcactctgtctcactcttcgtctctctctctctctcacggattggcggcggtgggtgatgcggaggcgagggaggagcgtggaggcagggcgaggtgatgcgaagcgagggtgcggcggtgaggtgaggcgagcgcggtggcggaggaggcgaggcggcacggcacgctcttcctcccgtccttgggcccggttcgctgcaccggcggcagcgcatcgccggtggacgaggagagcgtgcgacggacggggagcgaggctgccagcctgttctcctcttctcgccatcctcgatcccctgatgccgctggccagccacgccgcaccgttgttccctccctgagctccgatgtttcctgagctcgtgtgcctaccaccgtcacccaagccacctgcggcattacccctctcaccgagctacgatgccgccgcgctgagcttgccgccgcttgtctcctccttccaggcatcaccgagctcgtgtttggatctggggtggtggagcgggattggcgagtggaaggggctggtggagcgggattcccggtcaccatccacgcctacgtcctcgggtggaaccgcatctgccagtctccgtcgctgatcctggcacggggaggtgggacggggtgcggcgcgacggctcagaggaggagcacgcgcgtggcggcggtgtcccaccgcgtgtccctgcgcgccaccgccgtggaagagcccgccgcccactgcgcatccccgcgcgcccacgacgaggaggaggagcccgccgcccacgcgcgtccccgcgcgcccggttagctccgctcagtcgccggccgcgtcgtctcgggcccctccgccacccacaactggctccttccccgcgcgctgccatcctcacctcgccattcacatcaacaagtcgctggagtcggagtcctccaccgagctagctccgccgatacgctcctcctccgcatccgcctccgtgccgacgtcctgagcaccgatgactgcgctgtcctcgccgaccgcccttccccgcgcttgtcctcgccgtgtgcgctgcgcgagagagaaaagagtgtgagagaaagagaatagagagagaggaagaagagtatgacatgcgggtcccacaattttttaattaaaaaacgctgactggattgccaggtgtacgccacgtagaccaaaaccaccgcggattgggtcgagggggtaattcgtccggtttacatagttgagggtaaagaatgtccggttttgtggttcacgggggtaattcggatgaccgcgatagttcggggggggggtaattcgtactttttcctattttacaactaaaaactagcttatacatttattgtcaaattttataactaaagaaactggtaacttgcccatgctaatgctacagcgacatttagtaatgcaaattaataaatgctcaccacaggtattattgcaccatgaagtgtgctaaatagaactatccatgttttattcaggtcacttgcaacaaaagttgagtaaatatactacagatacatttcaagcccatctatcatgcaatagaagtattttcagaaagtagaccacatacaaggctactgagtttaagggtaaactaagggtgatacatacatctaaaaatattactccctttatcctaaaatataacaacttctaacctcaaagtttatcaaaaattataacaacttcttcaccatattctcttctcaaccgatcataactctccaccatttaattttctcacctacctctacttctcaaccgatcacaacactctcatttaattatacaaacttttttaatacccgtattcaatcctaaaaatccttatattccgggacggagggagtagcatatttgaccattgactaagctcttcatcggaaaacatgtaagtggccttgtttaacaagttctcgagcacctgaagccccagtgaacttcatttgatttgcagtgaaatctgatatccaatagtcataaaaataaaggggtatccagatagtgttttcttcacgacatgctgagtcggtaacaaaaaaaaaattgttaattagtccacgcatcacgttgagattggcgcaagaaaaaaagaaggcaagatttcaatcgaattaatgacttatagaatactatgtcagcttattcaatagcttccaacatctctgacctaaaggaaagttatccacaacctagtaaatattctgctaataatatatcttttgataatgaaacctataaaggcttataaacagaggaattacaatcgtgcagcaaaagtaccttaaggggattgatagccacttcaataaatcaattaaagaaacatcataaaccacaaataaccatcaatcactggtggagaaatgatctttgctgggttgacccaagaccacaatagtcccagttccaaaaagaaccgggactgaaaatgatctttagtcccggttgaaaaccctaccgccattctatgatctttagtcccggttggtgttaccaacaccaaccgggactaatatcatttttagtcccggttcatcccctgtcagatgtatgtgagggggccgagaatctttagtcccggttggtgttggtaaaatctttagtccaaaaagaaccggaactaaaattgaacgcgtagtatataatccctttcacttatcctctcctccacaatcgcaactcacacagatcgaatctctccccctctcctctcctacatatcagatctatcctctcttcctcatcccctctcctccacctcctccccttcctcctctcctccctctcctccccttcctcctcttcccccacctccctttcccatccggcagggctgtaggcagcggccgtggcgagcggcggcaacggctttgtttttgttttttgttttttttataatttatgattcactgagatgtataaatttgtgattcattgtatggatctgtgatgcatttgatttgtgtgtacaagtaactttaagatttgtgatgtggatttggtgatgtgaatttgggatgttactttgatttggggatttgggtttcgatttggggatttctatgccacttgattcgggagaaaataaaaaggaaaaaaaatgaccttctattactgccactattatctctttactcccggttggtaacagcaaccgggactaaagatccctctctttagtcccggttggtgttaacaaccgtgactaaagatccatctctagtcccggttattttaaccagtactaaagatgttcatctttagtcccgaattgctactcccggttggaaaaccgggaggtttccaaccgggagtaaaaatgggttctccaccggtgaatgtttagtagaccaattatgtatttgtcacatgggtaaagcagaaaatgtcaggagtactgcaaaaaatgctattatgcatatctaagggtagtagatcagtttttaacttgacagcaaccaaaagccatgcagaaatctacaaatccatgtgtgtctcagtcatggagtgcgccccatttccttggtgactaaaccattataacgggatcaaagtacgacgtcagattcctttatactgcaaactcggtatctacatttgcatacatctgagcaatcaaaattttaaattatcaaatagaataaaacttgaacctattgtgtgccatcatatatctacaatttatccatcatattccatgaaacagtccatttatcttcaaattcctagaataattcaatctgatccaatttagaaagataaaggcactggtggagaaaccatctttcgtcagtcggccgaattccacaatagtcccggatacaataaaaaccggggctaaagatgatctttagtcccggttaaaaagggtaacgggcatatttgatctttagtcccggttggtaacacaccaaccgggactaaagatcatctttagtcccggttcaaatgctgtcagggtctgttaggcccctcgggatttttagtcccggttggcaccaaccggaactaaagatcgtaactttagtcccggttggtattaccaaccgggactatagatctcgtggatctttagccccggttggtaacaccaaccaggactaaagtcccacccctatatatgtcttcttcctcctccagctgcccgagcaagcttcaaaatttcttcaaaaaagaggggaggtcatgccaaaatttctagtgaatttattttggtgattacatacaaatcggaggtgcctaaaaggtttgcaacttcatcctccaatgttttttttgtcatattacatttgtagctatgttttgcacacttttttgtctccaaaatttagttgtaagttgatgagggagaaaatttgtgtggggaataaagaatatatagaaatttagttgatttgctaaagaaggttttataaaatagttgagaaggaaaactatagtgaaagttaatcttgaataatagaaaacaaactaaaatgaaaattaaaagaagtaaaacacattaaaattagtttaaaactttagaaatagtaaataagaattatttggtgtaatattttatgatttttgtatgaataaagatatgtcattattgtatgactgttgaaacagtttgtaattatcttataattattgtatgattgtcattattgtaagaataattatttttgtacgattttttttcgactcatgtagatggatcggcaatggatgtacactgaccggtggtccaaagagtttattgacgacgtgcactattttttgagagtggccgaagctaacaggcaaaggggttttatttgttgtccatgcaataagtgtaagaatcagaaggagtattctgcatccaggactattcatttctacttgtttgagtcggggtttatgccaagctataactgtggacatcccacggagagcaaggtgttgaaatggaagaatatgaagtggaagacgacaatattctggactttgctcagtgtcacaccccgaagttttcctcccaagccaaaattgtaattcttataaatgaccctaagaaaatgnctaggtggaaaaaccaggnagaaaaccncnntaagnaaagtaatgcaaataataatcggatttgacatgtggaatttttcttgagttctacatgtcgaaattcattaacaggatttttagtggaattttcagagctctagaaataattttaaccaattaaaattgagcaagcaatattttaattccagggaaaatccttttttcttttttctttttctttttcctccctttttcctcctttttttcgaatgggccgccggcccattctctcctttccttccccctcctccttgctgggccggccgcaggccaaggcccagccaggccgcctcgccgcctcctctctcggggtcgccgacaggtggggcccacctgtcaggtccttcccccacctcccgccgatctcgctcgcgccgccgcgcccgcaaccgccgccgcgccctcgtctccgcctcatccaggccacgtcgaccacacccgcgcgtgcgccgcgtctcccgcgcccactcctctccctctcccgctcgcgcccgcgcccgagatggccgggattcgattttcgaatcccgcctctctctcctcccccactccccacgtcggccggcgattcccgcctctcccggccacgtccgattccctctccccctatttaagcatcgccgtcgtctcctctcactttttccccatttcgccgcactctctcgagcctcccatcgctcccgcgccgtgcaaccccttgccgccgccttttccgctactccggccaccgctagccgccattagggtcgccgccaggccgcgccgtcgccgccgtcgggttcgcgtggccgagatccaccccgtccacccctcctccgtcgaggttcgtcgccggagccctcgttcccccgcactcgggtgagcaccacctccaccgccgccttcggccatggtttccggtcgccgtggtccatctacctctctctaatccctctcttctccttccttagggcaccccgaagctcgtccgcccgccgacgtcgtcctcccgtggcttgccgtcgccgttcgccatcatcttcctccgcgccggccaccctcggtgaggcacccctcccctcttttccccttcctctccttctagtgccgtgccgccgcttcgcgcagccgccttcgcgtcgccttttgcgccgtcgccttcgccgccggttgccgtcgccggcaacgcgttcgcgcgccgttgccgtcgccgcggccggtcggtctgccttgagccaagccgagccgggtgccgccgcccctttcctcccaagccgctgaccagtgggcccgcgtgccggcgcttttcctccctctcctgagtcgctgaccggtgggccccgcatgtcggcgccgcgccccctccgtgctgacgtcagccctggaatatattgcgcaataaatgatttaaggtttttcttttatagtaataaacacagtgaatcttctaaaattcataactaattcatccgagctccgtttaagcccattcaagtctcagtaaatcaagaaaagtgtgtagaatccataaaaaatggttttgttccctgtttcagtagtcttatagcctgtttgcaatgtttgctttgtatgtcgctagattccgatccctccgacgctccggtgtactttgagatagtcgccgaggttcctccagcagcagagcaaggcaagtcatgcttgtcacttgaacatgttgatcctatattgcaaatgctctattgttttctttcaaatattgcattgttttataatattactatgagatggttacctattgttacagccatgcttgttggataccatgctcctttgttagcttgggttataacatgattagagtttggactaggaattgcttagctatgcttagttcaactagttcacaatgggaaaaatcatattaatgtttagactgttggttctaatggtaatgttggtttagtaccaccgctctggtgtgggttaattaaaatgaatcacatggtgggctgtgggtgcatggttttgctggtcgcacccatggcagttaaggaccggtgcgcgggatgccctggaagaacttatcgtacttaccacaagccagcgtgggcaacggctgggcttgtagtgtagctttcctctagtcgacgcatccaggcaagggtgggcgtgatggagcggggcgggccctgcgacggcctctgtcgcttccggattcacctaggcacgagaggggactgcccgttgcccgctggggacgggggtgaaacctgaggtgtggtgtgcttggctagagggggttatgcgaagggtcctgtcacggcctctttccggtatgtcgtggtggcatgtcggcgcacggaaacgtgtcgtggggctgtgtcttgtgggtacagttgtacacctctgatcagagtaaaactattcgaatagccgtgcccgcggttatgggcggtcaaccagattcaccgtgattagtctcaccctagtgtaatcttttgaatttggatagtttaggtggatggttgggcctgtcgcaacgtgggttagcgttggacagcggatgattaaaattaattaattattacaactgtttaaatctttcaatttctgtttataaatgctcgctttatgcaaatgaactacttcagctcttctttgttaattccctgcatcatacccctattccggtatgacttgctgagtacagtgggtagtactcagtcttgctctacttttcccaaccccagagttcgagttcgggtcagatgaaggtttctctgaggagtaggcttcgtccgtgccgtcgaggatgcctgtggagtggtgttcccgctgcagtttagtcaaagtttagtcaaggcttagcccctgttgtttttcttttcttccgctgcatttatgtaagactttatgatgtttgtaagacgtggatctgtatgtcaacattgtcgtttgtgtaccccggctggtcctggacggggattttaatgcacattctgcttggaattctattcgggaatttctgggcgtgacactcagtacgttggatttgaaggaaatcaaacgggcgaggaggaaagggatgctgatggtaacgacgttgcggatgatattggtcagatgttgcaggacgccaaggaggactgcgaaagtgaaaagggggcccataaattggacaagatgttagaggaccacagaatttcgttgtacccaggttgcgagcaggggcacaaaaagttggataccactctggagttcttgcaatggaaggcaaaaaatggggttagtgacaaggcatttggcgatttattgaaactcgtcaagaacattcttccagagggaaacaaattgcccgagacaacgtacgaggctaagaagatagtctgcccgctaggactggaagttcagaagattcacgcatgtccgaatgattgtatcctatatcgcggtgaggagtatgagaacctagaagcatgccctgtttacaaagcactacgatacaagattagacgagacgatccaggagaagttgacgggcagctaacaaagaagagaattcctgctaaggtgatgtggtatttccctataataccacgactaaggcgtttgttcaggaacaaggggaatgctagaatgatgcgatggcacgttgaagagcgtcaacaggacgggatgctgagacaccccgctgatggttcgcagtggcgaaacatcgacagaaaatttaaagaatttggaaaggacgcacgaaacatacggtttggtttgagtacggatggcatgaatccttttggagagatgagcagcggccataggacttggcccgttacgatgtgtatctacaacctcccccctggctatgtatgaagaggaagtacataatgatgccgattattattcaaggccccaagcaacctggtaacgacatcgatgtgtacctaagaccactggtcgaagatcttaagctgttgtggaagaaggaaggtgtccccgtgtgggacgaggacaaacaggaggagtttaacatacgagcgctgctgttcgtaaccatcaacgattggcctgcacttagcaacctatctgaacagtccaacaaggggtacaaggcttgcactcactgtatggatgaaacagaaagtacgtatcttaagcactataggaaggttgtatacatgggtcatcatcgattccttgcagcaaaccacccggtacggaagaaaggcaagcacttcgaacataaggctgaccaccgtatgaagcctaaacatcgcagcgggaaaacagtgtttgctatggttaaagatcttaaagtagtgttcggaaaggggcctggaagccagcctatagagagcgaagatggtcacgcggcgatgtggaaaaagaactctatattttgggagttaccctattgggaattcttggacgtacgccacgcaattgacgtgatgcacctcactaagaacctttgcgtaaaccttcttggcttcctaggtgtatacggaaagtcgaaagatacactggaagcacgtaataatctgaagcatatggaacaacgcagcgaccttcacccggaaccaaaggagaaaggaagccattacttgagtccagccagctacactcttagcaaggcagagaaggaaagtatgtttgaatgcttggagagcataaaggtaccgtctggatactccacgaatatcaagcgaataataagcacgaaggagaagaagttcacaaacctaaagtctcatgactgtcacgtgttgatgacacaactgctaccagttgtaataaggggtatccttccaaacaatgtctgggcaacaatgacaaagctatgtgcattcatgaacgcaattttgcagaaggtcatcgatccggatagattagaagcccttcagaatgatgtggtgcaatgtcttgtcagttttgagttgatatttctaccttcatttttcaatataatgacgcatctgctttgttaccttgtgaaagagatcagtattctcgggcctgtgtacctatacaacatatttcctttcgagaggtacatgggcgttctgaagaagtatgttcataaccgtgctcatccagaggcaagcatcgccaagggttatggaacagaggaggtcatcgaattttgcgtagaatttatcgaagatcttcgcccaatcggggtacctgaatcacgccatgaagggagactacggggaaagggaactctcggaaggaaagcaataatgacggtagacaacaatttattccgtaaagcccatttcacggttctgcacaatcttcatttgtagctccttatatcgaggagcacttggctctagttcgcgccaggaacatcggtaagtccgatgcatggattacacggcatcacattgatactttccccgcgtggatacgacaacatctcatgggtaacgagtagatcaaccaacaacttgccttcctggcgagaggaccgtcttagtcgatcgcgacattccagggatatgagatcaatgggtacacattctacacgagagctcaagacatgaagagcacgaaccaaaacaacgctgttcgtgtcgatgccatgggacacgttggaacaactggcacgtattacggtgccatcgaggacatatgggaacttgactatggtcctctcaaggttcctctgttccggtgccaatgggttaggttgactggtggaggcgtaatgattgatgacagtgggatgacaacggttgaccttaacaaggttggatacttggacgaaccttttgtccttgccgatgatgtaacgcaagtctttttcgtgaaggacatgtctagcaaaggaaagaagggtagagggcctgacgagcctaagaatcacgtggttctcccaggcaaaagaaaaatcgtcgaagttgaggacaagactgacgaggattacgatcagttggatgggcaaccccctttcacggtgacgattgaccttagcatcctcctatcaaatgaagacaccccttactcacgtagcgatcacaaggagggaacaatattaaggagaaagtacgtgcggtcaactgtcaccgtcgatgtattgccgtaattattttgtacacgatgtaaactattttggatgtattgattatccatataaatcaattgatgtatggaatatgttaattacgcacgattattagaggttttaacaagtttaaatcatgtatatgctagttatacgcgatacttacaatttttaattgttttaaatcacgcaggtggcaatttcatatgttaattagagtttttaacatttaatttactataattcatatgctaattataattgactaaagaatttttaaaagtttcaaatcatgcatgtggcatttacatatgttaattagagtttttcacaatttaatttactatcattcatatgctagttatatatgactattcgattttttaaaatttttaaatcatgcatgtggcatttacatatgttaattagagtttttaacaattaatttaatataattcctatgctaagtatatatgatgtttacaatttttattaattttaaatcatgccgtatgtatatacatatgttaattagagtttttaccaatttaataatatcattcatatgctaagtatatatgattattagaatttttattaattttaaatcatatatttgcttattacgttttatccacttaatttattacagacaacaataatttttcgaagtaattatcattaatctttgtactttaaataattttaaataattgtaatgcattatcttctattttagaaacacatatgtaatggaaaataatattcagtgcgcttatcagtagttccggttcttaaccctaaccgggtttaaaaagaatttggaaatagcgggaaaagatctttagtcccggttgatgagaacaatcgagagtaaagatatctttactctcggttgccgccagccaccgagtttcagacgccgacgccgacctcatcacgacacgatgccgcgccacgagacgccacgacgccgccacggcacggcaccggcgccgcgccgccacg

SEQ ID NO: 22314 - DNA, 10252 bp, Oryza sativa
tcccgctcctgccacaccgagaacgtgaacgagcgaacgaacgtgaacgtgaaatgcaattataggcaggtgaatgaacgtgaacgaacaaacgtaggtgaatgaaacgtgaccttaacgagaacgcgtacgtgaacgatatcgtgaacgaaacatgaacgtcaaatgcaatatatgttacttcgcgtttatgctaatacatctttttgtatcttgcagaaaagacgttgttggagtcgtccctcaagccggagtggtagagctagccctcgaaggaattcgcgcaggcaagtaacgtaattatatatatatatatatatgattgttatatttgtaatgcaattaagattattagatttgtaattagacttaattagcatataagattgtgtagtgttctaatatacgacagttatacttagaatacatgactatttgagttttagtataagattattggagttttaatataagattattatatttgtaattagacttagtatataattattgactagctagggtcctataatatacgtcacctagacttagcatatatcatcactatttgagttttagtataagattattagatttgtaattagacttagcatgtaagattgtgtagggttctaatatacgacagttacacttagcatacatgactattttagtcttagcatataagattatttgagttttaatataagattattatatttgtaattagacttagtatataattattgactagctagggtcctataatatacgtcacctagacttagcatatatcattactatttgagttttagtataagattattagatttgtaattagacttagcttctaagattgtgtagggttctaatatacgacaattacacttagcatacatgactgttcatttagtcttagtatataagattatttgagttttaatataagatttttaaaacataaatgtctcatgacttagcagatgtttcctgtatgaatagatggctgatcgcgatgaggaacagatattatacgatacaatcgcggagggaagcagccagtactggaacgaagaagaggggaacgaggatccaaaccagtatttgaacgaggaagggaacgtggagagggatgcggaggggaactaggaggggcacgtggaaagggatgtggaggggaaccaggaggaggaggtgtcaggcccagaaattctcgaaccagaatttctaagctgaatgtgcattaaatccctgtccaggaccagccagggtacacaaacgacaattgttgacatacagatccacgtcttacaaaaatagaaaagataacaaatgcagcggaaaagataaaagcgagctaaaccgggaagcttgacttcagtagcgagcggttccattccacaggcaatccttgacggcagcgacgaaaccaactttgacaaaacagctccaactaggaaaatcttcagctctggtgtgggggaaaagagagcaagactgagtactacccactgtactcagcaagtcataccggaagaggaggtatgatgcaggatacaaccaaaggaggctagaggttcttttgcataaagctagcatttaaaagcagtagttgaaagcagtaaaacagctgtagtaattaatcaatattaaccaatcactgtccaacgctacaccacgttgcaacaggcccaaccaaccacctgaactacaccagttcattaagctaaactaggggtgagactaatcacggtgaatctggttaatcgcccataaccgcgggcacggctattcgaatagttttactctggccagaggtgtacaactgtacccacaagacacgattccacacatgtcgccatgccccgaagtatcaccatgatactgcaaagggggaaatcgtgacaagaccctccacataaccctcccctaaccatccacaccacgctaaggtttcacccccacccctcaaaaggcagtgggcgatcccctcttgcgccgcggtgaatccggcagctggacaaccggacaccccggccgacccaactccatcacgcccaccctcgccaccggtgcctaggaaagggtcgaggtatacttcagatcaagcagttacccactcccgcttgtggtaagcacggtaagtctcccagggtttcccgtgaaccggtccttaattgccatgggtgcgaccagcaaaaccatgcacccacagcccaccattcaatgtattttaattaactaacaccgttgcggtggcaccaatccaaagctatgctcatagtcaaagtctatgtaataatgtgatccccatatgtgtgctagttgaactaagcatggctaagcatttcctaaaccaacatctagtcattttgatacccaagttgtcaatggcatatggtaaacaataaatggctgagtaataggacccatcccacatgatattgtaaaagaatgcaacatttaatagaaatgcgggatattggtaaattgggtacaatatgatcaaacgtattgcatgacttgccttgctctcgcactgatgagatcacagcaacgtcttcgagaaactgcggatcgacgaaacggccgaaacctacgcgacaaacaaagcacacaagcaaaacatgctataagactacagaaacaggaaacaaaaccatttttaatggattctttgcatttttcttgatttactgagacttgaatggacttaaacggagctcggatgaattacttatgaattttagaagataaactgtgtttttactaataaagaaaagtccttaatcaatttattgcgcaataaagcccagggctgacgtcagcggaaggggggggcggcgccgacaggcggggcccacgggtcagcggttcaagagaggggagagagaagcgccggcaagcgggcccactgggcagcggctcaaagggggtcggtccaccgtggaccgggaccacgcgggtggtccaccgccggtccacgggaccgacggtccagatcggccgggagaccgatcggacggcacggcggcgactaggcacgactcggctcggcttcaaaaccggccggccggccatggcgaggcgacgacggcgcacgaccgccggcggtgcggggagacggcggcggacggcgcgaaaggcggcggcggacggccggagcggcggcacagccaaaggcggcggcgcacgcgtgaaggggagaaaagggagggggagggaggcatcggccgggctcagctcggcctcaaggccgaccggggcgaggcggcggcgaggcacgaccaccgacggcggggaccggcggcgcgggaagcggcggcgacggccgaaaggtggcggcgcatggctgaagcgcggcgatgcacgtgcggagggcggcggcatgcacgggagagagagtaaagaaagaaggagagagaggtagtcctcaccggcgatgtgggggaatcggggtccggcggcggcggacggaaagcgagcggcggccgaggtagctctcgcggcggcgaatctagcggcggtgattgcgcggcgaggcgatggctctagcgacggcagcgtgcggccggaggcggcggcaagcggtggcgctagcggcgagcggcgcgggctcgttaggagacacgggaggggacggcaaatgggggaaacgagagagggagctcgggagagtgatttaatggtgcgggaggaggcggacgtggccgggaaagcctccgatttcgccggcgacgtggggtggagagagagagagaggggtgggattcgaaagcgaatcccgcccatttgtgggcgcgcgcgcgagcgggaaaggcggaggaggtgggcggcgtgggcgcggggtgcgggcgcgatgaggggcgcgacgtggagcggagaaggcggggcggcagcggcggttgccggtgtgggcgcacggctggaggttggggacgacccgacaggtggggcccacctgtcggcgtcccgaagggatggggagggggcgcgggccggcccaagaaggagatgggcgcacgcggcggcggggtggactgggccgacggcccaagaagaggaaaaaaaggaggaaaaaggaaaaagaaaaaaaaaagaagaaaggatttttcctgggattaaaatattgcgcttgctcatttttaattggttaaaattatttccaaggctctgaaaattccactaaaaatcctgttaacgcattggagcatggggaactcaagaaaaattccaccacgctatttccgattattaattgcatttattaactagggattcagctctaggttaattaagataatttcttcggacaatttatttaaccaattttttaaagcaagcaaaaggggaaacttccgggcgtgacaaacctaccccccttaaacggaatctcgaccccgagattcggaagagctggcgaagaggtatgggtgggtggccttcaactcatcttctctttcccaagtggcctcttcctctgagtggtggctccactgaaccttgcagaatctgattactttgtttctggtccttctctcgctggtttcagggatacgggtcggcttctccacatacgtcagatcttcctgaatttcgatgtgatccggacttgcctgttcctcgggaactctcaaacatttcttcaactgagagacgtggaacacgttatggatgccaagcatgttggagggaagctcaagctggtaagcaacttcacctctacgttccaagatcctgtatggtcccacaaagcgtggtgccaactttcctttggtttggaagcgatgtactcccctgagcggagtgacacggagatacacataatcccctgtttcgaaagcgagctcccttcggcggttgtctgcatagcttttctgccgagattgcgcgattctcaatctttccctaacaactctgactttctcttctgcctcatttaaaacttctgtcccaaacaactggcgttcccctgtctgatcccagaagagcggagtacgacacctccgtccatacagtgcttcaaacggtgccatctgcagactagcctggtaactgttgttgtaagagaactcggcatacggcaagcttttgtcccatgctccaccaaagtcaagcgcacatgctctcaacatatcctctagtatttgattgactcgctcagtctggccatctgtttgtggatggtaagcagtgctgaaattcaaccgggttcccaattcttcttgtaatttctgccagaactttgaagtgaattggcttcctcgatcagacacgatcttcttaggtacaccatgtaaacacataattcttgccagatagagttctgctaatttcttccctgagtaggtagtgtgaaccggaatgaagtgagccactttggtgagtcggtcaacgactacccaaatagaatcatgccccgatgacgtcctgggcaaaccggtgatgaaatccattccgatttcttcccacttccattctggaatctgaagtggctgtagcaaacctgctggcctttggtgttctgcctttactcgttgacagacgtcacagagtgctacgaattcagctatttcccttctcatgctgacccaccaaaacttctctttgaggtcttggtacatcttagtactaccgggatgaatggaatactgagtttgatgagcctcggttagtatcaggtcttttaattccttgttttcgggtacacacaatctttctcccgtccagattgttccttgttcatcctcaacaaaacctcgggcttttccaactctcatgttccttttgagctccgctatttcaggatcacttgcttgagctatgcgaacctgctccaccagtgtgggctgtgcctctagggcagccacgaatccgtgctcaactataccaaggttcaaatgttccaaatcacgttgaacctcacagcatagttcctctacccatgcgacgttgcagtgactcttcctgctcaaggcgtctgcaaccacattagccttgccgggatgatagtgtattcccatatcataatctttgattagctccaaccatcttcgttgtcggagattcagatcaggttgggtgaagatgtactttagacttttgtgatctgtatatacctcacaacggatactgatgagatagtgccgccaaatctttaaagcatgaacgactgcggccaattccagatcgtgcgtcgggtagttgccttcatgaggacgcaactgccgtgaagcataagaaaccactttgccatcctgcatcaacacacatcctagcccctggcgagatgcatcacaatagacctagaaatctttcgtctgatcaggcaggattaagactggtgcagacaccaaccgtcgtttgagttcttcaaaactcctattgcattcagcggaccagataaacttttcttccttcttcaatagctgtgccattggcttagcaattttagagaagttctcaatgaaccggcggtaatagcccgcaagtcctaagaaactccgaacttgagtgactgtccttggtggggtccatttggtaactgactccacatttgctggatccacagctactccttgagcattcacgatgtgaccgagaaactgaacttccttaagccagaagtcgcacttgctgaacttggcatatagctggtgctcttttaacttttcaagtaccagccgaagatgctgctcatgttcttcctcggacttggagtagataagtatgtcatcgatgaaaaccacgacaaacttgtctagaaattccataaacaccttgttcatcaaattcatgaagaaggcaggtgcattagtgagtccgaaagacataactgtgcattcgaacaacccgtaccgagtgatgaatgctgtctttgaaatatcctcttcgcggatcctcaactggtgatagcctgatcgcaggtctatcttagagaacacagtagctcctttcaactgatcaaacagatcatcaatccttggcaaaggatacttgttcttgatggtgacctcattgagtgcgcggtagtcaacgcacatcctcttggttttgtctttcttctccacaaagataaccggagcaccccaaggcgatgtgctcgggcggatgtatcccttctgtaactgttcatcaacttgcttcttgacttccgccaactcgttggctcccattctgtaaggtctcttgtggatcggtgcagttccaggtaccaagtcaatccggaactcgatatccctttttggtggcattgttgtcagatcatccggaaaaacctctggatactctctgactatgggaatatcctccaacttcttagtggttttctccactgctacctcttgttcttcaccagcagcctggtttaaactaatccctggcttccgcggcactggagactggaaggttacctcctctccttttgcattggtcaacttgatggtgcggctggcgcaatcaatcactcctctgtgccttgtcaaccaatccattccaagtatgacatctaggtccttggattcgagaagaatgaggttggctggaaaaatcaacccttgaatttcaactgtcacagatgggcagtagtgagttgtggtcatgccacctccaggagtatgaactcgcattggtatcttaagcttcactaaagataacccatgtgcaccagcaaaacgcttggaaatgaaggaatgggttgcaccagaatcaaacaatattactgccagtgtcgagttgacggggaatgtgcccaatataacctctggtgctgactgcgcctcctctgcagatgcatgattaacacgggcctgaacgaacttgggtccagcacgtcttggcttcgggcactttccaaccgtgtgtccgggtttgttacaattgaagcagagtttgggtttttctcccaacctcttgggctgttctggcagagctggctgaactgattgggctggaatctttaatgaacttggagtagggttgaggctgtgctgctcactgttgttgtgactgccactatggtggttcttgttgaagctacccgggtggtagggacggtactgccggataatcatggtggaaggtccaccgtgatgtcccatcgtgaaacgaggcttctgactcttcccctgggaagtcctgaactgagctgccttcctcttacggtttattttgttacagtgctcctcctgacggatagccttatccaccagcttctcaaagtcctcataatctctagagatcaactggttaatcaattcatcatcaagaccagacagaaacttctcctgcctctcggcatcggtacgcacgtcctcaggagcgtagcgcgcgaggtggttgaactcatgcaaatactctataactgttctggttccttgttgcagggaacggaactctctcttcttttgtgccacaattccctcgggaacctgtgctttattgaaactatgacaaaactctgtccaagtaacttctgcccaagctggacgggtcaccatgtagttgtcccaccaaacagaagcgggaccttgcagctggtgtgtagcaaaagcaaccttctcttgctcgttgcattgcaaaagattcagcttcttctcaatggcatgaagccagtcgtgggcctcgattgggttggtggtgcttgagaaggtgggcggcttgacacgaagagattctaacagtttggactgaggaggtggaggaccaaactgcaggttctgctgctgctgctgtgcttgctgctgcacctgctgcagcacctgatggtactgttgctgcatctgttgcatcatcattgccatcatctgagtctgattgtccaacacctgagcgatcgttgggttctcgggcggtggggacggactgctattaggtgcattgctggcacgtggtccatcgatcggctcttcgctgccactggcgttgttggagtcacgggaaccattccttgtcttcaccatctgagggggataggtagaaatatgagaaaaggaagaaaaacaggaggctcagaaactaatcttgtttatgaatttaagtgcaattatcttaatcttgattaaaacactgaaaaagaggcacgcaactcctaattgaggcagtcataccactgacacatgatatcgaccgccgactaaccctcaagcaacaaacctaaacacgaaaactagcaagcaaacagactaagaagacgataaagctaagggcggcgactctgaagctcggggcggcgcttgcaaacgagggataggactgacatctaaagtagacaagggataggaaccaattcatgctcaaatccaaattaaaccaagcaacagaagactcaaataaataaccgagcatgatgatttttatgcatagaacatttttcatgaactcaaatgaggatactgatgcaactggctaatcaataaattaatgcataaaataaatgcatagtcataccgatacgcataaacttaccccaccgaacatagacacaacctaatgcatatcacccgacaattcccgaccgactgccgaataaattccgaataaatttttactaactccctagactgtccctagtcgagaaatccaattaaataagcgaccaagatttttcccacaaatcaaaagaacaaaccccaaaattttcccgaaacaaaatccaagtgcaaaagggcatatgcatatgaaaaggggttcagagggctcttaggttttccagttggcttgtcctacggtcaaggtcggctctgataccaacttgtcaggcccagaaattctcgaaccagaatttctaagctgaatgtgcattaaatccctgtccaggaccagccagggtacacaaacgacaattgttgacatacagatccacgtcttacaaaaatagaaaagataacaaatgcagcggaaaagataaaagcgagctaaaccgggaagcttgacttcagtagcgagcggttccattccacaggcaatccttgacggcagcgacgaaaccaactttgacaaaacagctccaactaggaaaatcttcagctctggtgtgggggaaaagagagcaagactgagtactacccactgtactcagcaagtcataccggaagaggaggtatgatgcaggatacaaccaaaggaggctagaggttcttttgcataaagctagcatttaaaagcagtagttgaaagcagtaaaacagctgtagtaattaatcaatattaaccaatcactgtccaacgctacaccacgttgcaacaggcccaa

SEQ ID NO: 22315 - DNA, 2539 bp, Oryza sativa
tattgcgctgctcatttttaattggttaaaattatttccaaggctctgaaaattccactaaaaatcctgttaatgcattggagcatggggaactcaagaaaaattccaccacgctatttccgattattaattgcttttattaactagggattcagctctaggttaattaagataatttcttcggacaatttatttaaccaattttttaaagcaagcaaaaggggaaacttccgggcgtgacaggaggctagtggaagtcaaccctccgttggacagaagagggcacgcggcaacgaggtgccgcgaagaagcttgagggtcagcacatcataacggaagtggaagaagatgggcgacctagtgccccggcagaagccgccaagaactatgtacgtcacagcggttgggttgtgcggaataacgtgcctgtcagtacggtgtactggcgaagaacaagggcacgcggagatcatgagagctttgtcacagattcagagaaagagatgctgtggaccacaatgctcgagacattcacccttcccgctggtacagaggacaaagtgaaaaggtggactctgaagaaaatggcagaacaattttagagcttcaagggagatctgtaccagaaatatatcctgaagggccagacaccgaacttcgacacattccgaaagctaagggatcactgggacgagttcgttgcatataagacaggtgaacaagggcaggcgatgatggaaagaaacaaagaaaatgccgccaagaagaagtaccatcaccacttggggtcaggcggctatagcgtcgcgatgccgaagtgggaggagatggaggctagcttgcttgagaggggtatcgaaccggccaccgctaattggctggaacgatcgaagttttggtactatgctcacggtggaacgcttaacccagctgatggctcactggtcttcggcgatcagatacgagaggttgcgtgtcgactaacagacgcagtggaagcctcttctcagggcacgttccgaccggacagagagagggacgagctgtcactcgccctgcagactccagagcatccaggacgaacacgagggaaatgggtgattccttggaagattgggttcaaggaggacatccacacgtacaggagtcggatgaggcgcaagagagataccgaggcgaagattgcagatctagagttcagggtatcgagctacgagcgcagcatgcaagaggaggtggcaaggaaggttgatgaacgcatggccgcacatcggtcccatgatcccagccgaccattcctcctgcaatggtgagcccgtcaggaaaccgtagcagctgcgcctcaacggggcaagtaggatcacagagcatggacgccatgcaaacccaggacgaatccacctgccccgttgatgacatcactcagcggacaccatgtgagctgcatattcctttcaagaacttatcaataaaggtaagctcatagtttatatattttagatttggccataccgatagttgcagcttatatatcgttgattagtaataaataacctctcaccacatgaaggtggcgtcgggcatggccatcccaacggacccttcaggtacttaccactgcaggccgattccagcaggatactccaaggtcgaagttgagttggtcgaaggcgcgtacgaggacctcgagctggattaccctggaggagacggtgagacgcatctacgagacacaagccatgccattattctatggcgcaggcggtacatcatcctccctgggcgacaagcggcgtctcgtgcaccgtctcctccggctccaccatctcctcctcaggatcctgcaccgtctcctcctcatgctccagcaccgtctccacctcaggctcctgcaccgactcctcctcaggctcctgcaccgactcctcctcgggctcctacactgactcctccgcaaactcctcttccgacaccttcaaagtcaagggccccccaagctccaccgcctacccacacaagggcaacgaagaaggtgaaagttgacgccgccaagaacaaggacccggggtacgattgcacgcaagaggagcttgacgcttacgtggcatcagaagtcaagagacaattcaagcctcgaaggccagaaaagaagattcctatagactcgagtgtcatgaacttcttcaggggtatgtctgcacctgccaaggaggccattaagctatcggactatgagcgaacgctgaagaaagcatcttctggaaagtccaaaccagtccctcagcttggagagcaaccaaaccaggagatcgagccgttggtgaccgataaagaaatgacgatagaagaatttattactgataccagtctaactacggatcaattgctaggagtcgcactaatcgaaaaggcggaagtgaaatacatgtacgaactcggtaaaccgcttgtcaagcctgagctgctgcagtccctacccacacaaatgtacaagttccatcagctgtacctggagatgagcgccaccggtagagagatg

SEQ ID NO: 22316 - DNA, 3449 bp, Oryza sativa
tacgaactataccagctggacgccctcgacgtctctatgatgagttgctggattttgtaagtatatcgttcagttagatttcttactacgtcacctttaattaattaggtccttgtatataagtagactatagaaaataatatactcccttttatcgttgtagaatggagattcaaagggcccgacggcggggggtttttgatactggattcatcgaccctcggaaagtaaacgtcgcaatgctcgaccaatatccgcaagccacagaggacaatctcgtctatttcctgaaggcgcagcattacaagacgttcatactattgccgtacaacacagagttagtttaattttactgtcttcctataccaaatttcattcccgtacgaacttgctaagtgtttcatatgtaatgcatcccacgcacattgcagattccactaggtgcttttactcttcgacctgtcggcctgcaccgtcaacgtatatgactcaatggataaaaaagagtctacgtttgacaaggttttcgaacttatagataggtactgtcataagttcctctgttaattaagaaaatcttgttatgttaattgctactacgaatcatagctttaaactccatatagggcttggtatcggttccgtcatttggtccgcggcaaatggagagaaagacttaggcggaagttcaaatttcctgtgagtatacatgctctacatttatatttctccgattcaaatacatacaagtgtatattaattagatctctcgtcgtttgtcatttatttgtagtgcgcaaagcaaaagcagggaactaacttgtgcagctattacgtgtgccagtattgccactgccttgcagaccaaatcatcaccacaagagagctcgatgtacgtataaataaattcaaaatttcattacatattgatttcttgtttaattactaatcaatttcatacattcatatagtttattcgcatgagggataacctgaccatacacaaggaatttatcgtggcggttcaagaacaactcatgggattcatcaacgaacaaatccttgatcccaagggtgaattctactacgacggaaacacaattcataggtccttagcttctgagctagctactacgtcgaaatcgtagctagctaggacatataatggattgtaattaatacatgactatatatgtttctatatgcatgtgtacacattttctataatgtaaatatattttggtcatatatatatatatatatatatatatatgcatttgtataacatatatatatatatatatacatatatattatgcatgtacatatgtattgaaacatatataaatataatataatatatatatgcatatatatgtttaaatacatatatatgcatggtttatatatatatatatatatatatatatatatataaaccatgcagcaacagggccatgcaagaaaaaaggtcagctcgatctttagtcccggttatttcacccggaactaaagatagcgatctttagtcccggattggtagttccggattagaaaccgggactaaagggggttacgaaatgggactacaaagggtttctccaccagtgaggcttgagcatccacaagaatacaagatcatactaaataggaataagttcaccggaggtccctcaacttaacgaaagatttttgaggtcccttaaccacaaaatcagaaatgcgtacccctaaactcactcaaaccgttcacataaggtcccatggcagtatttttctcggttttgctgacgtggcatcctaatcagtaaaaaaatataaaaaattacatggggcctacatgtcagctgcacatttttttctcctcttttcttctccttctcttctcttttctctcttctctcttcgccggcggagggtggtgatggccgagcgcgggatgcgggcgaaggtgtagagccagtgggccttagaggctggcagcaagtgagcccggcagcggtcggtgagtggcgggcggagcggcggcgggctgcgagcagagcggccgactcccgctgccaccaccgtcgctctcacccgctgtcagctgccgacccccacgcgtgcggcttcacggcgacggctgtattcctcatcaccgttgcgctgcaagttgcccctgtccacgccacccgcgggtgaccacccttctccccgcgcccggccggagagggggagaggaggccgggcggagtcggggaaaatgaggccggttgagagggggaaagaggcggcgcctcaccgccgcttgctgctccgccctcgcccatgggtacgtgctatgatccggggctttctttctttctctctttctttctttctttctttctttctttttttcattttttggatctggttttctctatattttggctgcttcgcgcttcgatacgtcatgggcttcggaaattgcctaattttgttgttgcttgccatgccatggatgcaggtcccgcggcggcggagcagatgaggcgtgtcatcgcgtcgtcggaccgcgacactggccgcgcgctaacgccaaccctgcacctgctccggccacgcgccgccgcccgccctctgtggccgcgctcgcccgccgttttccaccgcctcctgccaccgacgctctgcagacacgcgccactgccactccccctctaaaacagaaagagaagaggggaaaaaaaggaaaagagaagaagattgctgactatatggttgatcccacatttttttcacttacatgtgggtctcacgtatttttttttctgattaggatgccatgtcagcaaaactaggcaataatactgccatgggaccttttgtgaacggtttaagtgagtttaggggtacacatttctggttttgtggttaagggagctcaaaaaatttcgctattaagttgagggacctccggtgaacttaggctttgttgggaggtgggtgttgggaatccatctcccctgcacgaaaaacggaatggttcattagcgcgtgattaattaagtattagctctttttttttcaaaaatagatcaatatgcttttttaaacaactttcgtatataaacttttttttaaaaaataccgtttagcagtttaaaaaacatgcgtgcggaaaacgagaggggagagttggaaaagcatactaccaaacacagccttattcctactaaataaacagggctgtgagcatataatacttgcaggattgtaggaaccttgactgcacaagacaattagcaaaacagttcagaattgaaatcacatcagggttcacctgaaatcagcttaaactcttggatttggacaaacttactcatcaggtctccggccaatcatcgccgtcacccgaggctgctgccagccattagtcgtggcagtggtctgcaggcttactgccgcttgccgaggttctaatt

SEQ ID NO: 22317 - DNA, 7711 bp, Oryza sativa
attatttatgaaagtagtaaaacatagttgtcagggttatggataccacatacctaatagtagttgactaaatctcagcaggacccaccacataccatgtcctatacggaaacaacctgcagatataggaggagttgcggataaggaaagacaaccagagttctacatggaaacgacgaggactactcggattgtatccatattggtttccctagttctacttggataagaggacacctatgggtataaatacaaggcctcctaggaggagaggggacacgatcaacacacacccaccatagaaaacacggaacaatagatcaagacataagatcaacatacaagcctacatacgccaagacaagccgacagatatcgacatcagagatatgcctggatcggccctatccggtacctacagaggccggccgtagggatctcgcgctgtctctgattttgccgggtacgaactcgaggaggaagactaccctgttgtcgactacgagtcagaccttcagaccgccatgtcgacaacagttagataggctaccccaaatattgtactggtgtgattatgatgaataagagcaacgaccggcttcggccaacaagatgtagggttattacctgacaattcaggagcccgaacctgtataaaaatcctcgtctttgtctcttttacttcagtctcgcatatatcctagtaccaacgatccccatactatacaaataccggaatcgtgacatcaaacgtcgacaatagtagtgggctatgggcttttgatcacaacagagcatcatgattcttcattatctggcagagggaataaagcaagtattagaagaacaccacctgaaggcaatagaaattaataataactatataacgtacaactgaataagcagtattggcagcaaaaatcattaaccttttccatttagcaattagtaagtaatgacagatggctgaaatacagagatcaactgcattgatctgaagcatgcagcaatcatgcaattgtagtgttaccttctgctcgctccacacacgccctgcgttaactccagccccaagtctgtttatcagttcctttgtctgctcaatctcctcctgctgcttctcccatgtggcatactgagtctccacccaaattgccttcgccaaaacgtattctgaatagtttgccttgtgtgttttggacatgccgaatacagtttccactatcttggtacacaaactgatccaggaaagccgtcatgagaaagaccattggcacttcctgcgtcttgaggtggctctccagccacacaatcgtatccaaatcgacatgattgatcagctcatcgagcagcaccaaatcaggatcctgcgtacaatcagttacagcattgtaaatgcacacagaaactaaaaaccacaattcatcaccaattggcaataataatatatcattccttactccctctccatcacaattacacataactaaattatacctctatcctgttgcatcaattgattgatacatgtaaagctcaattttcttttttatctgtaccagtgtacctaaagaagaatcttgccgagcgacatcctcatctgccaccgctggaggcgacgaggcggtcggtgtcctggggggcgaacccgagcctgggcatgagcttctggatcttgacctcgacatcctgcgaccgccgctgtagcaggtcgagctcgtcgaggagcctccccaggtccatgtcctcggtggcaccctccagcgcggcctgcaccttctccaggcgagacctcacctccatctcctcctcgaatgcggcgaggaactcctctctgatggtgagcaacgcgcagacctcgaactcctggctgagagaggcgatcctcacgtttttcttggccttgacgacattgccggtgtcggggtcctccagccccgcggcgatgcggagatgggtcgtcttgccggcgctgttgacgctgacgagcctgactttctccccacgctgcacctcccaagaaacgtccttgagtacggtcaccccctttaggacttcgagatgctctccagtcgaaaattataatcatttacatctatctaaaggtggatatattttgtatattatttgatccacatctgagttcaccaaaataaagttcaaactccatgtgaagctaacaagttttagtttgattcattttagttctgtagttagattatgctgtatgttaattattctttatacaaaattttagagattttttcttgtactgtaagtgtatcttttgaatctacaaaataaaagagaataaattttatgagtttactggaactttgttcatctaaaatggagctaggatgaacattttatgcatttctaaagtttgtataattttcagttcagcaaataatgctttagatattttcttggtatttatccagaatttaaacaaatgggtccactggtcagtgacctgctaatatgcagaaaggctcttgagatttctaggaatcaacccgcagtcctgtgactgttctctatgtgagcaaacttttataaattagtgcctagagttttgattcttctcagaagaggtccctgcgacctggacaagggtggcatcgatggccggcggccatatttgggttcgccagtggcgaacggtggccgatctcgccgtgtttccaaaatataaaatgtaactaaggttcttacgcacccgttgttagttgaatcacggctgataatgtatcacgatgtctgcgagacaagatcgaccaaacgatgatcacgaacagcgcgcacgtacaccatgcaaaatcaccgcgcgcgtgtgcattagcggatagctgaacgtagtcagcatgtacaggcagtgctcacgtgcgaaaccaagattttagtaccatatgggaaaattatgttggttgaggcccgcataaaagaggaggcgcgagcgctcctcccgccgagctcggtggtgcgggctttgtaaccccagctgcggggggcgggagtttggtaggtttcggccgtttggggatcgaggtaggcattatctctccaaccggggtgcctgtacttgggtgcctagcatacttatatgctgcttgctagggcgggtcaaacggcgtcccaaaccggagatggattctaatagctcgagtgaacgtccacctgcttattgcatgttaactaaatggctatgaaaaattttcaaaaaaattggtaagatagatcaatatgtaatatatcactccacaaacaaacatgcaagttaaaattcaacttctacagattgtaacaaaaataacaagctatgaaaaattttcaaaaaaattggcaagatagatcaatatgtaacatatcactccacaaacatgcaagttaaaattcaacttctacagattgtaataaaaataacaaacaaaactcaaattactatagtatatttatagttaaatttgatctaacttattcatattttttcaatttttttcataaccatttagatgacatgcaataaacgggtggatatccactcgagctgttaaaatagtttcccgtcccacacctgccaactctcttttttttttgttattttctgataaggcgaatccgaccgtgcgcggtggcgtggcccggagtggatcaggaacacgagggagcggcgttgatggcagcggcggtggtgggcggaccccgagaggcgctgtactcgccgcgcgcgtggagctcgtccacgggctgcggatggaggccacgagcccgttcagcgcgtgcagcggcgccggcgaggcggacgcggaggcgaccagcgcgccgacggcgcggcccatcagcaccggatcagttgaaacaacccacatctgccaacacactctcttttttttttttgttattttcgcttctgataaggccttctgataaggtgacggtggcgtggcgccggaggggataaggcggctgctgctgcaacaacgctggcgcctggtgccatgggagaagagacgcacgcatcgcccgagaccccaaacaccttcgaccagcgctcaaagcgtgcgtatctgcatgcgctgcgtatgcgatgacgtagctggatggtctctcaacttttcgccgttggtggtggtgacggcgctggtgcggggagggcggctgcggcgaaatcgaacacccaggtcgagaacgccatgccgacgaagagcgcgcttgtccttgtctgagccaccggaatcttgcacgtaggtttttcccggccgtgcgcctgtgccgattgttgacgttagtcctggcttgcttcagaagtttggctcggtcgtgtggagcggagcgagatgccaggaggacgtcatcttcttcggatcaaataaacagaaataacagatgcaatgcagtttgcgagagttgcgtggagtgcgcggtgtgcgtgtgtgttccagagtcctgaagaaccggatcgtgggatggcacgatttttgggcatagaattcgtttttctgttgagtatatttaggagagtagctccaatttccgttttgcaagtttacagttcagttcaatgaaagaaaccagaaaattgccccacaattcctctctcattttcgctactctgaaactctgcttttctctgttttgtatcccgctctgaatttattcgtttccctgtctgttgccgtgccagacgcgcatagtttgcacgcgaggtgttcgatccagtgcattgtcgctaacaagtggtatcagagcttcttaggttgggggggagggggtggatctgacactatggcgttggttccggtgacggcggatccagcgagggggagctcgggaagcgtgttcctttaccctcaactcacatcaaccaactacactagttgggtgatacgggtgcaggcaatgatggaagatcaaggcatatgggaggtgatcgagccagcggccggagcggctgtcgacccgaggaaggacaagaaggcaaaatcccatcttctccagtcactgccggaagatctcttgatgcaggtggcaaagaagcggacggcgaaggaggtttgggactgtctcaagacgaggttcgtcagggcagacagggtgcgcgacgcgcgcctgcagactatgaaaggagaattcgctagcatggtgatggaggccggggagtcgctggaccagtacgccggccggatcaccacgatgggggtccggcactctgccctcggcgcgacgttgaacgacgccgccatggtgaagaagctgttcgacaccgtcccggagaagttcgtcagcctagtcgcagggatcgagaattctacaacgtcgacgacatgccgttcgaggaggcagtgggccgcctcaaggcgtacgacgagcgggtgcgcaagaagaaagcggcggctggcggagtgaccgccgacggccaggtgctccttactcaggccgagtgggaagtgcgcttcaagaaaggcgggggagaaacctcgtcgccacaaaagaacaagccctctagtgatggggcgaattgcggccaggccgggcgcggtcgtggtaggggtcgcggacacggcggaacgcagagcagcggtggcggctccggcggtggtggctgcgacaagagccacatcaaatgtttcaactgcgaagagttctgccactactcaacgcagtgcccatatccgaagaagaagaaagctgaagcccatcttgcgcagacggacgacaccggtccagctctgctccttgcggtgacggaggcggtgcagaacgcgccggggcagggcatggactgtgggcttgtcatgcacgaggagcgtgtatggcctcgcctgatgctggcagagaagagagcaactgctggtgatctgtggtacttggataatggtgctagcaaccatatgactggggatcgacggaagttctgggagctggacgagactgttacaggggtggtcagattcggcgacgcctcatcagtgcagattatggggaagggttcaatccttttcgcatgcaagaatggtgaccagtggctgcttgatgacgtctactacatccccagcctctgctggaacatggtgagcttagggcaactcactgaaactggccaccgagttgtgatggataatgatgaccttgaggtgttcgacaaaaatccctggcgtctggtgatgaaggtgaggagaacctcgaattgtttgtaccggattgagttgcaactagcgtcccggctagtcgatccatcaaaacactccggacagaccgcggtggcgagttcctgtccggcgagttcgcgcgggtgtgcgatgaggctggcatcgagcgacatctgacggcgccgtactcaccgcagcagaacggcgttgttgaatgccgcaacagatcgatgatggcgatggcgcgctccctcctgaagggaatgtctgttcccggcaggatgtggggggaggcggtgcggcacgccgtgttcctgctcaacctgctgccaaccaagtcgatgggtgaacgcactccgttcgaggcatggacggggaagaagccacacttaggacacttgcgagtgttcgggtgtactgcgcatgccaaggtgacaactccaaatctgaagaaattggatgatcggagtgagcagttcgtgtaccttggcatcgaggaagggagcaaggctcaccggctatttgatccacgacgccgccgaatccatgtaagtcgcgacgttgtatttgatgaaaacacaccttggcagtggagtgctgctgtaggagaggagaattccatcgagtttgtggtagaggaacctgttggcgagcagcagccggtgccggcagaacagtctgccacggtaccgttgtaccgggcgccgccggcagggaggcgagccgacaaggagccagaagtggcggaatagcgaggaacttctccggcaagcccagtgacgttctcacccacgttgcccagcacgcccacacccggcttgacatcaacacactctgccgaggtggaggcgtcaccgagcacggccggcagcgacgacgacccgctgcggtacaggagtctggcgggcatcgtgctggaggcgccacgcgtagacttggtggatgaagaggatggtgaagcactgctcgcagagacggaggagccgtcatcgtaccgcgaggccgcagggagccggcgtgggtcgacgcaatgcagaaggagctggaggccatcgagaagaactcaacgtggtcgctgtgcacattgccggcgggccacaaagcaatcggactcaagtgggtgttcaagttaaagaaaaacactgccggggaagtaatcaagcacaaggcatggctggtcgcaaagggctatgtgcagaggcacggtatagactttgaagaagtgttcgtgccggtggcgaggttggacacggtgcataccatacttgctatcgcagcggaccgaggttggcaggtgcatcaccttgatgtcaagtcagcttttctcaacggggagctagaagaagaggtgtatgttgcccaatcggaggggttcattaagaagggacaagagcaccttgtgctgaaattgagcaaggcactgtattggcttgaggcaggcgccacgggcctagaacatttgcttggacaagagtctgaaggaacttgggtttgtgcggtgcaagcaagaacaagccgtatacacccgaggtagaggagcagtagctgtgattgttggg

SEQ ID NO: 22318 - DNA, 35337 bp, Oryza sativa
agtagctgtgattgttggcgtttacgtcgatgatttaattgtgacaggggagaatcctaccagggtagaagcattcaagaagcaaatgatgggggagttcgagatgagtgatctagggcttttgagttattatctgggaattgaggttggacaaggtgtgaatggaatcacacttaaacaaactgcctatgcaaataaggttctgtcacagttcgggatgttggactgcaattcgacctcagttcctgttgatccaaagacacagcttcagaaggatgcagatggacaccctgttgaagcgtgtgatcggtgtgatcggttgtctttggtatttgctgcatacaagaccggacctatcatatgctgttggagtggcgagcagattcatggagcatcccaccatgatgcacttgaaggcagtgaagcaaattctcaggtatttgaaggggacaatcgactgtggccttgtgtataccgcaggaagtggtgagatcacaatcacggggtacactgacagcgatctagccggagatgttgatgatcgtcggagtacaggaggtatggcgttctatatcaacaacagtttggtggcatggagctcgcagaagcagaagacattagctctttcttcttgtgaagcaaaattcatggcagccactgcggctgcctgccatgcactttggctaagggcattgctgggagagctactcggtgaggagccatcttcttcggatcaaataaacagaaataacagacgcaatgcagtttgcgagagttgcgtggagtgcgcagtgtgcgtgtgtgttccagagtcctgaagaaccggatcgtgggatggcgcgatttttgggcataggattcgtttttctgttgagtatatttaggagagtagctccaatttccgttttgcaagtttacagaaaattgccccacaattcctctctcattttcgctactctgaaactctgcttttctctgttctgaatcccgctctgaatttattcgtttccctgtctgttgccgtgccggacgcgcacagtttgcatgtgtggtgttcgatccagtgcattgtcgctaacatcgatgttctcaagagtgagcttccctgagagagggatctcgttggtcatgttgtttcttgtgtcaactaacatactgatgttctacgcaaccaaccatgccatgttcgagagaaatgattatgcgtaagcttatgtactctacatgtttttaaacatatatatatatatatatatatatatatatcagaatcaatcgagcagaaaagtttgattgagagagagggaaagagagaaccagaacttgaacagaactgattaccgatacccccatcgttggcttgttcatcctgctgagccatttgttcgagtgcatgcatttggtgcgttttatttgacggaatagcgtggttcggtattgcgccataattttattatttccgctagctcctctcagatatttgtagtgaaggattttctcaaccgcaaaaccagatatgcggggtcccctaactgtacaaaaccggtcatccgaggtctttcggcggtattgaccccggttttggtctacgtggcggctgagacagcgtgggacccatgtgggccccacatgtccggatgccaactcatcacctctctcttatttccccctcttctccctttctctctctttcacttttctcatgccggcgatgggcggcgctgtggggaggaggccgccggagggaggggagaggaggtccggtggccggcgtcgcgccgacggaggaaatgccgccgtccgcatccttgttcttcctcccattatcatcatccttgtggtcatcggagggaggcgggacaacacacggcagggcgaggcggcgtcggcaggcgagcacggtggcgcaaaggaggcggcggcggtggctgctatgcgggaggggaggccggttccgacccagaagcaacatcccaagggcacagcgtgcgtcagtggaagtcataggggatcgtcacaagacgggtccactgcgtctggcgatgtgtgtggctcttggcatttgcatcgccggaggggtagtctgatccgccggagacaagcagcgccgccgcctacaagtctttgggcgcctcggtggtcgggcccgggagcaggtgcgcgaggtccggtaagttgagggaaatgggcttttatggtgtggaacaatggagacagtttgttgcctcgccgtacatctgcatcggcgtcaccaccgtcgcaaagtacagggcagtcatcgggaacgagctgcgcgtgggcgggtcgggagcggcgctgatggcggtgcgggagctagttgctcggtgtcaccgagagcggcttcaggggaacctaccagaacgaacaaccctcctcctcgcccgccgccgccgatggcggagcacgagggagcagcgctgatggcggcggcggcggtgggcggacaccgggaggcgctgtactcgccgcgcgcgtggagctcgtccatgggctacggatggcggccacgagcccgttcagcgcgtgcagcggcgtcggcgaggcggacgcggaggcgaccagcgcgccgacggcgcgcgcccatcagcaccggatcaggtgagagacaatgtatacatctatcttttctctgaatccttcatctctgttcagttcaactccatctctgaaaagactgaaacattttgttgattggtaggtatattactcatgtcaaaagtgtcgatgcgtgtgatcgataatcacagtgtttgttgtgtgtttgcatgatgattgccaatttgccatgcgtgaatgcgtgcaagcttgagcccgggcctggtaatcacatgccatggttgtcctgttcttgtctcagctcgttgctgcgtttggattatgttggaaatatgatcacaatttggcatattttaatccaaaatattaagacaataagtatgacttttgcagggagtaaactagtgatcaaagagagtaaactacagatcatgcttaatatagaataagcataagaatttgtcacaacagaatgcaatgaaaccattgcacctaacaaaaatatagaagaaaagaacatgaacacagtgaaaaacgagttataccctgagaatggccctccgctggtgtttgaggcagtattgcctctgttggtgttatctctaggtgcaccgccgttggtgtcatctgttgacatgatcaccgatcacctggaacaggagctgaagaagttgattcccaatgaataggagaagaaccgtgagtagtcgtgcggaagcactccccaaaaacctgatcgcccatctaccgatgcaggtactcaggcaaaggcgtggttccggaggccctgctcgtcacgatcactagtgcacgcaagcgatcagaaccggggagaacagaagcaacgcaggaacagatggaagatgaaccaccgaagagtaaaccaacccgaacgtggagtaaaccagatcagatcgagagtagagatcttttctcctctcatctgtctctatgacccttgtagggtgtaggagggggatgggaagagaatcaatcccgattgcttccgcttccgttaccgcagtaacaagtaatcgttgcggaattatttggattcaattctcaactgttgcaaaacttagagagagagagagagagagagtagcagccgccgctcgcctgcctcgccacgccacgctcacggctcggcgcgcgtgcgcgtgtggctgtccgagccccacctcaaccggtcaacagggaatctccaataaactcacaccacttttaatctccaatgtgctattattgtcacctaacatttattgtggccccggactctttcgcttcgcccacgccgacgccaacctccaccgtccgccacgccctcaactccgtccaagagaagaggataagagaaaagatacaggaggagggagggagtgagatgaggttgcatcttgacatgtggggcccacgtgggtcccacgctgactcagccaccatgtagaccaaaaccggggtccaaaccactgaaggacctcgggtgaccggttttgtatagttaagggaccccgtatatctggttttacggttcgaggatattttttatcccgatgacaagttgagggaccttcggtgtactttttccaaaagaggatgcgctcgtttggcttatgccgagcctggttgtgtgggcttgtcacctcagctgctggcggtaggagttctcctcctctttcccccaggagggaggatgggatttaaaatttcccttacccatagtatttttgaattttgatatagaagtatgtataatttgtgggttatttttaaattttgatatagactagaaaaaatgtatgtataatttgtgggttatttttaaattttgatatagactagaaaaaatacccatgcgttgtaacgggtgaagatattttaattttattattgttatatagtttagttaaggtgaaattcattgtgttaaatttgcttggttgtatattctgttagcaaatcataagccgcaattaggagtccgatcatcccaagttagcatgcgagtttttttaaagagatttcttgtacgattccttttgtatttccaaaagcgaacgatcttaaaaaccgagtcaatatagatttgtatttccaaaagcgatcaaacttaaaaacaaacacataaacggatgacgtactaaagtaccggtaaaaaacatcttcaaattttataatagtacagaagtatgtaaaatttgtgggttatttgacatgggttatttgaaggaaaaaaccctataattttgtgcaacttaaaccaaaacatatgcggtttcacgtgggatactccagaccgctctaacaaataaccatgcatatatctcccaccatggggacaggtttactattccggtatgcataaatctaggggaccaaaatttccgaaattttggatattttggaaccgagagaaacaaaattgaatttatttttttctaaattcagaaaaatatgtaaaaaattgggccaaatagttgctcaacggtggggtctgatattttggaaattttgaaccaaaattgcgaaccatccatggggcatgcattattttttttaaacaacccacgaaagattagtacgacgtttcttctaacagagcagaaaaacattacaatactatagccctggaaggctatagctaggaaaaaaaaaacaaccacaccattcgtctacagccagatcctgccactgaaaggcaataaaagcacgacacccataaggaaagggccttctcgacgatgcctccgagaaggaaacgacacctgaaattgccgccactggccatcctggaaaaccaggacattgttttcattcgaagaaaatccataaagaagagcagaggagatcacacagtaacactctgagagaaagctgcgcccacatacatcgtcattgctggctggaaggctgggtttttgcccatgatctttctgccctccccgagtcgaggtcatttgccggaaactgcagcccaccacccatccagcacatcgttgctagtcggctatcaaggagctcggtcaccgacgcgctccgaatccatccacgcaattggtttcgagagggagagggtaagagagaagaatggatcccctctcccctatactagcccaccaatgcggccattttgtggcgggcaaggcaccgccgcaagatggctagtgtttggatcgtggcctgccacaggcctgcaccacccacctcacgatgtcaccgtagatgccgcctcggtcggacaacccgtggtacctccggccgcctaaggccacccaccctcatcatcgtcgcctcgccttgtctccccttgccgtcactgcgggcgttaattaattgtcaatactagaaatccaaatttgccagtgacacagacatgtaattgagaaatttcagccagccggcatgcatgtaactaaaaaaccatgttctgagaaccaaagattggaggcagtagatctattgggcgggtggtcccggttcccggacctctgaatatttatgtctactacttaaaaaatttttaaagttgtttccgccgtccgtccgtgaaaaaagggcgaaaaaattagggcaaaaaattcgaatccgattatatgtgacgcggtaaaaaaatgcgacatggtaaaaaaacaaataaattgaaaacgtttccatcgtccataataacagaaaaaggcgaaaaaattaaaacaaaaaggaaaatccgattcaatttgacgcgggaaaaaatctgtaaaaaaagctcttaagaaagggcgataacaaaacaaaaaaaacccgtagagaagggtgaaaaaaagaaggatgcatacaaaatccaatcggagatagaacgcagaggaagagaaatacttacaaaattaaaggtttttctgtcgtccgtctgtgcaaaaagggcgaaaaaaatcgaattcgattatatgtgacgctgtaaaaaaatgcgacgctaaaaaaacaaataaattgaaaacatttccatcgtccgtaataacggaaaaaggcgaaaaaacattaaaacaaaaaaaggaatgtccgattcaatttgaagcggaaaaaaatctgtaaaaaaaagcccgaagaaagggcgataaaaaaacaaaataaacccgtaaagaagggcaaaaaaaaaaagaaggatcgatacaaaatccaatcagacatagaacggagaggaagaaaaaacgaactagaggaataataaaaacctcacaaatcaggattttcgtccgtcttagttgcggacctcctccctccgattatctatcaatgcaccaataaaccaatctcaaataatcacaaatctaaccaaaaaactaaagcccaatcccaatccaatcgaaatcatccaatctcaaattatcataaatctaacccaaaaactaaatcccaatcccaatccaatcgaaatcatccaggataggagacaatcaaataagagagaagaggctgaaatcacaaaataaatcacatcacagaggtgatgagtgtagagggaggggtgagcggacgcttctgctgctcctcgccacctcgccgccgtggaggtctcgagccaccactgcgctgaggagccaccgagtagctgctgcgccgggagctgccgacccgcgcccctgcaccgctgctgcgacaggagctgccaacccgcacccttgcgccaccactgaactggggagatgtcgagaaggagggaagaggaagaaggcgatgacgaggccgaggaggcgcggccgcgcggcgaggtccggtggtgggaggcagatgcgacaggccataggggtggtggtgaggaggaggtgggcggtgctggggtcgggcgggagtcgggcggcggtgtggggtggaggtactgagggaggaagaggagcgggtggttgattggtaggtcggctccaactggtttattttaataggggtcggtatccggtttttaaaataggtgttggttttttttagaacagtcacctataagactaatatagatcattaatatatttgttggttgtgaaaaaccgggacctatatatattataggtgttggttcttttttttaaaaaaaactagcatttctctagtacttaaaaaattgaaaacgtttccgtcatcacatccatcttaaaataaagaaagagcggattttttttttcgcactatccgattccgccaccacacgaaaattggatacatactcgatttggactcaaaatcggatgaaattaaccccataaatacgaaggattccacgacaatccaatcgggctggactactacttaaaaaattgaaaatgtttctgtcctccgtcttaaaataaaaaaacagtaaacaataatctccgcccagtccgattgcgccaccacacgaaaattggatacaaactcgatttggactcaaaatcggatgaatttaaccccatatatacaaaggattccacatgacattataatcggacaatccagctattgagaaacagaatgggaagaaacatagaaacatcagcgtgaagctgccaacgccgtcatcaccacctgatctgtccacgggaagctgccggcaccatcggtgcagccggatcggcgacgtctacgtcgccgttggatccgctggacctttgtgcccaaaaatggtggtgctagcagcatcaaccacctctcccggtctgtgcttctctggttcaatcctccccctatcactttcatgtccttgactttgtttgggaggaaatccgttgggcttccattcagtatatgcaggggttggtctatgcccctcacatcatgaggatgattgagacagtcacgcagctacggtttcatcatgaggtgcctcacctgtagcttcacttgcacctcatcaaggccgatcattcctcccgtgcgagcactcctgcagctggggacatctcttccacctccactcagcctcctcctactcgtgagtgcccctctcctttggctcgtcgtgagccgtgtcccttattccactttttgtggagtctctttggcctttgctctgcggaggccaaaaagaaccgcaaagcacggaatgaggtgaagaagatggttaggcgcgtcaaacacatgcatgcgcagctcaacgagcatcttcacgtgaatgttccttcctccccaccgggctttgaggctgagcccgatgagcccgaggaggagatagaggatccttttgctgggttgcctccggattttgacttctttgggtttagccatggcgatggctatccccctcctcctcctccagaggatcctcctcaggccccgttcgcttgagctcgttggatcgtcctctctttttggtgctttgatgccaaaagggagaatttttctattcattacattccatctttggtcgaaccatgtggtttttatgtgtatgagactatgtgttaatggtttgagtttttgtaatccctttatgcattagtgtaagactatcatttgtgatattgggatgtaatgactattatgccttatgttaatgtgctgcaatgttctcatttctttatatattgtgcatgtgatgagtgaaatggcttatgattgttgtcttgtgagcttcaatatcgatgcaaagatttatggagctctccacttgccttaatgcacacttctagtgggagttttcactaaacctttacaccaaaaccttctattatattcattcccaattgtaatctaatcatattgtcatcaatcacctaaaagggggagattgaaagtgcatctaagcccctaatgattttggtgattaattacaatgcgattagaaaggataacattttttattcaagcaaatgtgaaggttgttatgtcctcgatgagttgtagtgtaatgcatatcccgcaaaaatcgtcgttatgatgagatgcggcaaatgaacaaatggtatattgtactttttcatctctttgggcctataggaaaaccgcactattaagagggatgatgcattgacatatgacgagtgatgaatgtgctcaaaatcaatttttaaaagtgtttctcctctgatttgtgtgttctggaaattttaagagttattcaaaactgattttcggaatttccgaaaatacacagaaccaaaattcgcttatggaaattttcggatatgtctaaaagagattttcggaacttccgaaaatgactaagtttccaaacatggttctgtatattttcggacttgtccgaaactgattttcggaacttccgaaaatgacagtggagtcaaaaaatcgtttctgtaaattttcggagttgtccgaaaccattttttggaatttccaaaaatttttggacttgtgcgaaacctgtgaacccaaaaacacttctggaaattttcggacttatccaaaaggaagttttataaggttgttttggttttggaaatttcggatatatccgaaaaattttcggaatttccgaaaatccttcagttgatttcgttgtttcactgttctagaaattttcagttatatcttaaattatttttcggaatttccgaatattgcaattattgtgcctaatgggcagatctggagctgtggctataaataggccattcccctcacttgtgagggctactggtgacattggatattttgtgtccttggcttgttcatcttgagattcacttttgagccttgctttcttgtttctcctctcacccgtgttcgattcggatttggtgtgtgtgtgagagttgtggattcgagtttgtgtgagtgcttgttgttaacttcatgaagattcgagagcacttgtatcatctctgggagttccttgcatcatttgttactcttggaggttgatgactcctatgcggatagatgtcactctcaagccaccgatctacgtgtggttggccgggagaaatttgtgaaggtcggatctcatctccgaaagggaagagataccactagtggaagggggagtgatttgtgcaacctcttgaggaaaggattagcaaagacccggctctttatcagctactcaacatggagtagaatcccctcaaggattcgaacttcgggaataacttcatatgcttcattcttggtaatataacttcctacctctcctctagctttgtttgattatgccgctagttgctgtttgtgctagcatattcttgttgtaggcagctagatctataatttactttgatttgcccttactctgctattttcggaaattccgaaaaatcatttttggaaatttcaaaagttactgctttgcatttacttgagtttttgaattagcctattcaacccccctctaggcctaattgaccatttcaatggaaatcaagtttaagaaattatgcatctaacaaaattataatcatctcattgagagttggaaccaatttcttatgtattataatcgtttacatctctctaacggtggatatattttgtatattatttgatccagatccgagttcaccaaaataaagttcaaactcacgtgaagctaaaaagttttagattgattcattttagttctgtacaaattttataagttagattatgctgtatgttaattattctttatacaaaattttagagatattttcttgtactgtaagtgtatcttttgaatctacaaaacaaaagagtatagattttatgagtttactggaactttgttcatgtaaaatggagctaggatgaacattttatgcatttctaaagtttgtataattttcagttcagcaaataatgctttagatattttcttggtatttatcgagaatttaaacaaaggggtccactggtcagtgacttgcgaatatgcagaaaggctcttgagatttctaggaatcaacccgcagtcctgtgactgttctgcatttgagcgaacttttataaactagtgcctagagttttgtttcttctcagaagaggtccctgcgacctggacaggggtggcatcgacggccggcggccatatttgggttcgccggtggcgaactgtggccgatctcgccgtgggtccaaaatataaaatgtatctaaggttcttacgcatccgttggtagtttaatcacggctgataatgtatcacgaagtcagcgagacaagatcgaccaaacgatggtctttttttttgttattttctgataaggcgaatccgaccgtgcgcggtggcgtggcgcgagggagcggcgctgatggcggcggcggcggcggtggtgggcggacaccgagaggcgctgtacttgccgcgcgcgtggacgagctgcggatggaggccacgagcccgttcagcgcgtgctgcggcgccggcgagacggacgcggaggcgaccagcgtgccgacggcgcggcccatcagcaccggatcagttgaaacaacacacacgtcacacgatcagttcagagacaatgcatacatcgatcttttcgttgaatccttatctctgttcagttcaactccgtctctggaaagactgaaacattttgtcgattggtaggtatataactcatgtcaaaagtgtcgatgcgtgtgatcgataatcacagtgtttgttgtgtgtttgcatgatgattgccaaattgccatgcgtgaatgcgtgcaagcttggagcccggaccgggtaatcacatgccatggctgtcttgttcttgtctcagctcgttgctgcgtttggacaatgttagaaatatggtcacaattcagcatattttaatccaaaatattaagacaataagtatgacttttgcagggaaggaaagagagtaaactacagatcatgcttaatatagaataaacataagcatttgtcacaacacaatgtaatgaaaccatttcacctaacagaaatatagaagaaaagaacatgaacacaatgaaaaacgagttataccctaagaatggccctccgctggtgtttgaggcagtattgcctccgttggtgttgtctctaggcgcactgccgttggtgtcatctgttgacatgatcgtcgatcaataggaacatgagctgaagaagttgattccgatgaacaggagaagaaccgcgagcagtcgtgcggaaacactccccaaaaagctgatcgcccacctaccggtgcaggtactcaagcgaaggcgtggttccagaggccctgcttgtcccgatcacttgtgcacgccagcgatcagaaccagggagaacaaaagcaacgtaggaacaaatggtagatgaaccaccgaggagtaaatgtgtggagtaaaccaaaccgaacgtggagtaaaccagattagatcgagagcagagattttttctcctctcatctgtctctgtgacccttatagcgcgcaggagggggaggggaagagaatcaatcccgattgcttccgcttccgttaccgcagtaaaaacgtaatcaatcaaggaattgattctctcgccgttactaaagtaatcgctgcagaattatttggattcaattctcctgtcatatgtctctgtgacccttatagcgcgcaggagggggaggggaagataatcaatcccgattgcttccgcttccgttaccgcagtaaaaacgtaatcaatcgaggaattgattctcttgccgttactgaaggaattatttggattcaattctcaaccattgcaaaacttagacacagagagagagcagcggctactcgcctcgccacgcccacggcctcggctcggtgcgcgcgtgtggttgtctgacccccacctcaaccggtcaacagggaatttccaataactccgtatttaagttgagatactacacttttaatcttcaaggtggtattattgtcccctaacatttattgtgggcctttgagattttaattgaattaaattgggcctagcctatttattccaacagattacagccatcaccggaggacagcgacggcgtgctcgccatgccaaggaggtcgccgaccatggacgtggtctcggatctggtcaccgccgtggcgggcgacgactggtgggtccatgacatcttcttagctggttggtgcatccacacgccgccgccgtcgccgccgccgccgtcggcggcgccccccgcggtggccccggactctgtcgcttcgcccacgccgacgccaacctccgccgtccgcagcgtcctcaactctgtccaagagaagaggagaagagaatacagagaggagggagggaatgagatgaggtggcatcgtaacatgtggggcccacgtgggtcccacgctgactcagccgccacgtagaccaaaaccggggtccaaaccaccgaaggaccttgggtgaccggtttcgtatagttaagggaccccgcatatctggttttgcggttcgaggaagtcttttatcccaatgataagttgagggaccttcagcgtactttgtccaaaagaggatgcgctcgtttggcatctgccgagcttggttgtgtaggcttgtcacctcaactgctggcggtaggagttctcctactctctcccccaaaagggaggattggacttaaaatttcacttaccgatagtatttttgaattttgatatagaagtatgtataatttgtgggttatttttaaattttgatatagaccaggaaaaatgcctgtgcatttgcaaggggtgaagatattttaattttattactattatatggtttagttatggtgaaattcattatgttaaatttgtttggttgtatattctgttatcaaatcataagctgcaattaggagtccgatcatcccaagttagcatgcgagttttttaaagagatttcttatacgatccttttgtatttaagaaagcgaacgatcttaaaaaccgagtcaaatatagatttgtatttccaaaagtgaacaaacttagaaaacaaactcataaacggatgacgtactaaagtaccggcaaaaaacatcttcaatttttataatagtagagaagtatgtaaaatttgtgggttatttggcatgggttatttgaaggaaaataccctgtaattttgttcaacttaaaccaaaacatatgcggtttcacgtgggatgctccggaccgctctaacaaataaccatgcgtatatctcccaccatggggacatgtttactatccggtatgcataaatatatatgggaccaaaatttccggaattttggatattttggaaccgagagaaagaaaattgaatttatgattttttctaaattcaaaaaatatataaaaaattgggcgaaatagtttctcaacggtggggtctgatattttggaaattttgaaccaaaattgcgaaccatccatggggagttcattattttttttaaacaacaacccacgcaagatagtaagacgtttcttttgatagagcagaaaaacattagaaatctatagccctgaaggctatagctaggaaaaaaaacaaccgcaccattcgtctacagccatatcccgccactgaaagggtaacactatctcgacgatgcctccaagaaggaaacgacacctgcaattgccgccactgcccatccttgaaaaccagtacattgttttcatttcaagaaaatccatcaagaagagctgaggagatcacacggtaacactctgtcagaaagcggcgcccacagacgtcgtcattgctggctggaaggctgggtttttgcccatgatctttctgccctccccgagtcgaggtcgtttgccggaaacagcagctcaccacccgtccagcacatcgtcgctagtcggctatcaaggagctcggtcactgacgcgcttcgaatccatccacgcaattgggttcgagagggagagggtaagagagaagaatggatcccctatcccccatactagcccaccaatgtggccattttgtggcgggcaaggcaccgccacaagatggcaagagtgtttggatcgtggcctgccacaggcctgcaccacccacctcacgatgtcaccgtagatgtcgcctcggtcgggcaacccgtggtacccccggccgccttaggccacccgccctcatcgttgtcgcctcgccttgtctccccttgccgtcacttggggcgttaattaattgtcaatactagaaatccaaatttgctagtgacaatgacatgtaatggataaatttcacccagcgcgcatgcatgtaactaaaaaaccatgttctgagaaccaaagattggaggcagcagatctatagggtgggtggtccaggaccgggaccgggaccaggacctctgaatctttatctctactacttaaaagttaaaagttaaaggtgtttccgtcatccgtccatgaaaaaagggcgaaaaaatcgggaaaaaaatcgaatccgattatatgtgacgcgataaaaaaatgcgacgtggtaaaaaaacaaataaattgaaaacgtttccatcgtccataattatggaaaaaggcaaaaaaaattaaaacaaaaaaggaaagcccattagaaagagcgataacaaaacaaaaaacccgttgagaagggcgaaaaaaaagaaagatccatacaaaatccaatccgacatagaacgcaaaggaagagaaattcttaaaaaattaaaggtgtttccgttgtccgtccgtggaaaaaagacgaaaacaaattgaatctgattatatgtgacgcggtaaaaaaaagtaaactgaaaacgtttccatcgtccgtaacaatggaaaaaggcgaaagaaacattaaaacaaaaaataggaatgtccgattcaatttgacgcggaaaaaaattctgtaaaaaaaagcctgtaagaaagggcgataagaaaactaaataaacccgtaaagaagggcggcaaaaagaaggattgatacaaaatccaattggacatagaacaaagaggaagagaaaacgaactagaggaataataaaaacctcacaaatcaggattttcgtccgtcttgttgcggacctcctccctccgattatctatcaatgcaccaataaaccaatctcaaataatcacaaatctaaccaaaaaactaaagcccaatcccaatccaatcgaaatcatccaatctcaaattatcataaatctaacccaaaaactaaatcctaatcccaatccaatcgaaatcatccaggataggagacaatcaaataagagagaagaggctgaaatcacaaaataaatcacatcacagaggtgatgagtgtagagggaggggtgagcggacgcttctgctgctcctcgcccaacctcctcctcgccacctcgccgccgtggaggtctcgagccaccgctgcggtgaggagccaccgagcagctgctgcgccgggagctgccgacccgcgcccctgcaccgctgctgcgacgggagctgccaacccgcacccttgcgccaccactgaactggggagatgtcgagagggagggaagaggaagatggcgatgacgaggccgaggaggcgtggccgcgcggtgaggtccggtggtgggaggcagatgcgacaggccataggggtggtggtgaggaggaggtgggcggtgctggggtcgggcgggagtcgggcggcggtgtggggtggaggtaccgagggaggaagaggagcgggtggttgattggtaggtcggctccaactggtttattttaataggggtcggtatccggtttttaaaataggtgtcggtttttttagagcagtcacctataagactaatatagatgattaatatatgtgttggttgtgaaaaactgggatctatatataatataggtgttgattcttttttttttaaaaaaaactagcatttctctactacttaaaaaattgaaaacgttcccgtcatctcatccatcttaaaataaagaaagagcgaaaaaaaatcttcgcactatccgattccgccaccacacgaaaattggatacatactcgatttggactcaaaatcggatgaaattaaccccataaatgtttccgtcctccatcttaaaataaaaaaagagcaaaaaaataatcttcgcccggtctgattgcgccaccacatgaaaattcggtacaaactcgatttggactcaaaatcggatgaatttaacccccaaaatacaaaggattccacatgacaatctaatcggacaatccagcgattgagaaaaagaacgggaagaaaaataggaacaacagcgtgaagctgccagcgccgtcgtcgccaccggatctgtccacgggaagctgccggcgccatcggtgaagccggatcggcgacgtctacgtcaccgttggatacgccggacctttgtgcccaaagatggtgatgctagcggcatcaaccacctctcccagtctgtgcttcttaggttcaatccacccccccatcgcttcaatgtctttgactttgtttgggaggaattccgttgggcttcgattcagtataagaaggggttggtctatgcccctcacatcccgggcgagcacttcttcagctagggacatctcttccacctccactcagcctcctcctactcgtgagcccatctcctgtggctcgtcgtgagtcgtctcccttattccacattttgcggagtctctttggcctttgctctacggaggccaaaaagaaccacaaagcgtggaatgaggtgaagaagatggctaggcgcgtcaagcacatgcaggcgcagctcaacgagcgtcgtcacgtggatgttcctccctcccaaccgggctttgaggctgagcccgaggagatagaggatccttttattgggttgcctctagattttgacttctttgggtttggccatgactatggctatccccctcctcctgctccagaggatcctcatcaggtcccgttcgcttgagcttgttgcctcgtcctctctttttggtgctttgatgccaaagggggagaatttctctattcattacgttccatctttggtcgaaccatgttgtttttatgtgtatgagactatgtgttaatggtttgagtttttgtaatccttttatgcatttgtgtaagacaatcatttgtgatattgggatgtaatgactattatgtatgccttatgttaatgtcatgtaatgttctcacttcctttatatattgtgcatgtgatgagtgaaatggcttattattgttgtcttgtgagcttcaatgtggatgcaaagatttaggggagctctccacttgccttaactcacacttctagggggagttttcactaaacctttacaccaaacccttctattatatttattcccaattgtaatctaattgtattgtcatcaatcatcaaaaaaggggagattaaaagtgcatctaggcccctaataattttggtgattaattacaatgcgattagagaggactaatattttttatttaagtaaatgtgaaggttgttatgtcctcgatgagttgtagtctaatgcatatgccgcataaagcgtcgttgtgatgagatgcagcaaatgaaaaaatggtatattgtactttttcatctctttgggcctataggtaaactgcactattaagagggatgatgcattgacatataaggagcgatgaatgtgctcaaaatcaatttttaaaagtgtttctcctctgatttgcgtgttctggaaattttcggacttatccgaaactgatttttggaactttcgaaaatactcagaatcggaattctcttatggaaattttcgcatatgtctgaaactgattttcagaacatccgaaaatgatagtggagtcaaaaaatcatttctgtaaatttttggagttgtccgaaaccatatttcggaatttctgaaaatgtctgtgaacccaaaagcgcttctggaaatttttggacttatccgaaaggaattttttaattttcaaaattatccagaaggatatatccgaaattatttttcgtaatttccgaaaatcgcaattattgtgcataacgggcagatctggagctgcagctataaatagcccactcccctcacttgtgagggctgctagtgacattggatattttgtgcccttggcttgttcatcttgagattcacttttgagccttgctttcttgtttcccctctcaccagtgttcaattcggattttgtgtgtgtgagagttgtggattcaagtttgtgtgagtacttgttgttaactctatgaagatttgtgagcacttgcatcatctccgggagttcattgcatcatttgttactcttggaggttgaggacgcctaggcggctaggtgtcactctcgagccacctatctacgtggggttggccgggaaaagtttgtgaaggtcagatctcacctccgaaaaggaagagataccactagtggaaagaggagtgctttgtgcaacctcttgaggaaagggttagcaaagactcgggtctttgtgagctccacaacggagagtagaatccacaactctcacacacaaaccaaatgaaccacaattctcttagcgtgtgtttggtttcgggactaggtgggatgggatgaaaccattcctgattttggggttgggatgattccatttacgtgtttggtttgtaggatgggataatcccaattttttgtttggttgaaaggatgagctagagatgggatgagcgccgtttgctatcaccgtcagcgagaaagaggagagcgagcggaggtgtgacgacagcctagtgggagctcggcgggtgggtggatgagcgcgacgatggctggcggcgaggaggagcggcgcaatattgcgagcaggtggacgaacagaggaggagaacggacgggcaagcaggggtgcagttggaggagcaagccggcggcgagcaggcagaggacgcggatccgcctccaccgccctccccaccactagatccaccgtcgccgtcgctaagccccccgcagtcaccgtcgctgagcccccgccggtcgccgtcgtccaggcccccgcggtcgccgtcgctgagccccccgcggtcgccgtcgtccagtcccccgcagtcgccgtcgctgagtcaagccccccgcggtcgccgtcatcgagcctccacggtcgccgttgtcgagcctccacggtcgccgtcgccgagccccccaccgtcgccgagccaagcccccgcgaccgcggtcgtcgtcgctgtcgccgagccgagcccccgcggtcgccttcatcgagcctccacggtcgctgtcgccgagcctcccgcagtcgctgagccgagcccccgcggccgcggtcgtcgtcgccgtcgccgagccaagcccccagcggtcgccgtcgccgagtcaagccccccgccgtcgccaagtcgagcccccgcggccgcggtcgttgtcgccgtcgcggagcccactgcggccgccatcgccgagcccgctgcggtcgccgtcgacgtcgctgagcccgccgcggccacggtcaccgtcgtcgagcccgccggtgtctgccgctgctcctgagggcgagtagggcgtgcgcgcaggctggcctcgagctcgagcatgtcacaccgttcgctcgtcccaaccgggacgagttcgtccgccagaatttgccggatcggttggtcccggatctgagaggaatatttctctccagggaccaacccatcccactcacccctcaacgaaacaacctcaaaagtgggttcgtcccatcccatccgattccatccttgcaaccaaacgcacccttagatcatcaacacctaaatgcctaggcttactacctacaattctctttccatctccatcgtaaaccgattctctcattttcttttttttttatctccttctcgtccccccatttctagtttaactgtacgacactgtatttcaagaatattcgtatctctatagaaatagtttgtcctggtcagtctttttataattagggtcctccgcccgcttcatgaaccactcgcggtctgcccccacatggccagccccttcgtattttaatgctaacggattttcttcactatcaggtggaccccatctccaacatatattccttcagatggatgaaactgaacactgaacttgcaggatggagttgcgggtgcaggaattgtcgcacgggataatacaggaaactttgtcactgctgagtgtcgaagatatgaccatatcagtgatccgagcacagtggagatgagggagtgatgtccttttatagggcagttatgacggttgtgagaaggggaaatgtccgaactgccccacaacagtcattgggagagtgtttggagcgtccacgccaaaccctaggatcaatggtgatcaggggggttcggccgaactaggggattcggccgaacctgggctgggccctcctggcctggctttcggtcggtggactccctggaccttcctctgtccatttctcaaagttttgggttgattcattgatgtttcgatgaagttcacaacccctccttgtatggatatatgattctcctctcttttagtctagatttcctcccaacatcggggtttatcacctgcatacaaatatataccaacacttgtggaataggtgagattaagcacctatcactatgttggatgttttattatctgaactttaggaatatgttggaggtatggaatcagcatttaacagccgccaacagcgtcatcgaactctaagggagcatccttagctaacagtttggtcagaggtcaggcgattgtagagaagtccttgatgaatcttctataaaagccggcatgtcccaagaaactgtggatccccttgatgttcataggaggaggaagctgatctattacattgattttagtatgatcaacttcgattcctcgttcgaatactcgatggccaacaactatcccttcacggaccatgaaatgacactttttccaattgagtagcaggtccttctcttggcatcgttgtaagactttgtctaaattttgtagataatgaccgaaggtctttccataatgtcctcgatcatgtccgagaaaatagacatcatacacgtttgaaaagatgcaggagcttacacagtccgaaggacatcctacgataagcataggtaccgtacggacatgtgaacgtagtcttactttggtcctccggatggatgggaatttgatgatacccggaatacccatcaaggaaatagaaaaaagaatgatttgccagccgttccaacatttcatcaatgaagggtagcaggaaatgatcttttttcgtagccttgttaagttttctgtaatctatgcacatcctccatccggttatggttcgttgcggaatgagttcattttgagcatttgcaacgaccgtcattcctccctttttcggcacaacctggaccgggctaacccactcactgtatggtacgggataaataatcccggcatgcaggagtttcaagacctctttctttacaacttctcacatcgcgttattgagccgtcgttgaggttccctggagggggtactctcggggttaatagggatacgatgagcacaaagcgcgggattaatccctctgagatcttgaagggaatagccaagagcagcgtgatgcttttctaacacagacagaagacgttgagtctcgtcttcagagagcttggtcgttgcaaatgctcaaaatgaactcaaatgctcaaattctcacaggattggaagatcgagagtctctccgggttccgcttcttccttgatgaagtcggggatttcattttccagaagggtctcgtgagacttgtgagggggaactaccgtaacctcctccgctgattcaatctctaggagagagccggttaaggcgaaccttgcccgcgagaatgggactgagaattcattccctcccaaagttatcttgaggctatccaacttgggcatgtttatgagaagttgctcaatgggaaggccgattagaatgtcaaaatcttggatttttgaagacgtggaaattcaagactgcctccctgtcttcaaaacggacaggcacatattgtacaattccaaatccttcaatgatatttccgttcgggtgcttgaagaatttgtttgtcggggttactgccttatcgctcagataagcaaatgcaaaagactcagagatgagattaaccccgacagttggactgtaaagaataccaacgtcgttcccctccagatggcagggaatgattcggggagcagtatttatctgaattacttcggatgaaagctctgcctaccttagctattcgtcgctcattatggaagttaactcccgagcagtttcccttaggaacccaagttccataggatcaggaggcggcaaggggatgagtggtttctttttactgaagtagttcagggtgttgccataatcttcatcaaaaccgtccctgaacagaactaccgcacgatccggcacgttccgaaaaaaataccgcttccgtatttacttgagtttttgaattagcctattcatcccccctctaggcctaattgaccatttcaatggaaatcaagtttaagaaattatgcatctaacaaaattataatcatctcattcatagttggaaccaatttcttatgaattttagaagttcttcttttatttttaattataatcatttgcatctatctaaaggtggatatattatgtatattatttgatccagatccgagttcaccaaaataaagttcaaactcatgtgaagctaacaagttttagtttgattcattttagttctgtacaaattttataagttagattatgctgtatgttaattattctttatacaaaattttagagatattttcttgtacagtaagtgtatcttttgaatctacaaaacaaaagagtatagattttatgagtttactggaactttgttcatgtaaaatggagctaggatgaacattttatgcatttctaaagtttgtataattttcagttcagcaaataatgttttagatattttcttggtatttatcgagaatttaaacaaatgggtccactggtcagtgacttgcgaatatgcagaaaggctcttgagatttctaggaatcaacccgcagtcctgtgactgttctgcatttgagcgaacttttataaactagtgcctagagttttgtttcttctcagaagaggtccctgcgacctggacaggggtggcatcgacggccggcggccatatttgggttcgccggtggcgaacggtggccgatctcgccgtgtgtccaaaatataaaatgtatctaaggttcttacgcatccgttggtagtttaatcacggctgataatgtatcacgaagtcagcgagacaagatcgaccaaacgatggtcacgaacagggcgcacgtacaccatgcaaaatcaccgcgcgcgtgtgcagtggcggatagctgaacgtagtcagcatgtacaggcagtgctcacgtgcgaaaccaagattttagtaccatatgggaaaattatgttggttgaggcccgcataaaagaggaggcgcttgtgctcctcctgccgagctcggtggtgcgggctttgtaaccccagctgcggggggcgggagtttggcaggtttcggccgtttggggattgaggtaggcaatatctctccaaccggggtgcctgtacttgggtgcctggcatacatacatacgctgcttgctagggccggtcaaacggtgtcccacacctgccaactctcttttttttgctattttctgataaggcgaatccgactgtgcgcggtggcgtggccttcgaccagcgctcaaagcgtgcgtacctgcgctgcgtatgtgatgacgtagctgcatggtctcaaactttcgccgttggtggtgttgacggcgagggtggccgtggcgaaatcgaacacccaggccgagaacgccatgccgacgaagagcgcgctagccaccggaatctttgcacgtaggtttttcccggccatgcgcatgtgccaatgttctcaagattggattttttttatttttaattttttttattaaaagttttacaaaaataattttctatttcaaaatttgacaaaagtagtcgccgccaccctctaggagggcgacttttaaatatcgccctcccagagggcggcaaatgtgacgtggccgacggccgttcactctcgggcgacggccgtcatggaaatttgcaggcgacccccttgccgccctccacaagggcgattttacactgtgcggggggtcgcctgcaaatgggtggcgagggggcctggaattttgcaggcggcccccttgccgccctggaggagggcgattttgaactgggcatatgtttctgaaataaatatttttataattatcaatagatcagttatccaatcttttatattgaaaactcaatacaagattttagtttccaagattggtaaaatctaattttatcaattttttattcttacgcatacaaaaatacaccatcataattaaacattgtaatgataagatagttaagaagtgcaaacctctgttcaacctcacttggacagcggtgatatcggcactgatatcctgtgcggcatcggcctatgcaagatgaaaataaaaaattcagtaacagtcctatattatgcaagataaatgaaataattgtaataagtaatacaaattcgacgtacccccatgaagtagtctcggtcacggtgcgtgggatacgcgtccgtgacagcggcaacgtgcagctctggggcgtctggagtgaaggtcacacgcgcacgagtgcgaggaaggtaccagcggaggtagtcatggtagttctcctccgtatgtgggaagagctcgttgatcacctcctctgtagctaacacccaatcgtcaatgtactgctgtacacgtggagcccaaagtgcgcctgcttgctgtccccatcgagtcaacctgtgaagagaggtaaattatatggctcgatcaattaagtagcataaaaattttgaatcgaacaatccgaactcacgagtggtcggcagggaggacggtcggctccacattgcctaggaacacctgcctcaggccgaactgtctcatcatacgctgcggccaatgaggctcgacgaaagtgtcgaacaccatcagcaggatggttagccagtaagcctggtcgcgtgtgcacaaggacgaaagtcctagcggtgttctcgcagcaacggcctcttctgtgtacggcttctagatgacgtcgctcagctggagatggtcaaactcaaacacaaagtccgggtaacctcatctcacctggacgtgagcgtaacgacgctggaataaacatgatcggaattagacatgttatgtgatgataaaaacgaaagacaacaaataaacaattaacgcaacaaagttccacttaccccacgtcgacaccagtaagtccccatcgtgggaccgtcctctggccactgcacgctgcgaccaaccccgtagggtgcggtgtccaccactggtcgacctatggcaaacctctcggctgcccaaagctgaagcaacattgggcaaccagcaaagatcgctcccgcgtcggtcttcgtgcaggcctcgtagaggccacggtacgtggctgctagcacggcagaaccccagctccactgcggcacgtcctgtggctcagcatccgtgatggaccgtgcgtagtggaccagccggaagtccacagcgtgcccgtgcgtgctagtgaacatcacccacccgaacaaccacagcaggtaagtttcaagggcgcatcggaccgagtaatcattagcgtcagggtggagatggtccgcctacaattaataatgaaatgttagtacaaaacaatgtgttgatcgcaaaataagcatgtatgataataacaagttgtttacttacagtgaactaaagcaaccaaaccttgctaggcccgacggtagagtacgggggaagggtgttgggcactcctaggtgtggaaggcgcatcacgtgcttgaagcgtgcggtgatatcctccttccagccaacaacaccgtccacgggaccaactggggctcctgccagtggtagcctgagcaggtacgacacgtcctgcagtgtcggagccatctccctacagggaaggtggaacgtgtgcgtctcaggtctccagcggtctaccagagcggcaaggagtgaccagtctgcatcccaccgcttcgccaggtcacggtcgtgcgcccccgcctcaacaagcctacaaagtggtagaaggcctgccgcacgcaacctgcatagagtaaactataaacataagcacaagacaaagcaaagttgagttgaaatgtgcttacgtaaaattgaacatacgcgtaccaaggaacgagcctggctgtgcaccctggattgctgacaggaacgagcggtggttcctatcaatcccatggttcaacaacgccggtgtgtcgtacgtcatacctgtatccaatagattgatcagaaacataaaaataattagttcaacataacttacaaatgttcataaatgaattactaacacatattaaaccagagtaaaaacaaacaaaaggtcacaatacagaatatttctgattacaacaatgattgcagttacacgatatgagtacttaggccgaatactcatcacgataacattacgatacaacaccgaagagttcacaatacaataggaccgtcatgaatccgagtactcactagtagtacaacaatagtcggaggtactcattacaacaacatccattgaaattacatgatagaagtacttagtccgaacactcatcacaacacaatagcagtttaattccaaattcgatagcaatgttacaccatggaattgcctgctgcacgacgacgtcttggccttgcgcgcttgcttgttgttccttcaccaggtggtcgccttccatcacttgcctgtccagatggatcagcatccgcgccgcttggaacttctgcattctttgaacatttcttgtaagtatggccgcgcagatcacacttgctgcagcgtaaagtcctcccacctgcttctgactcatccatatcatttctgatgcatctagtttggtgtcaaccctttttcacccttaacttagatggatctggaatataaaaaactttgggactcagcattgtgtaagatcctgacatcccgaacccatatatctcctcactccatgtatgaaagattgcttctttcttgaaataatgtgagacgtacacattgggacatatgccacaatcaccggcagcagcaagaacgtgtgagcaaggaaggtgacgaagcttcggcttcatacaactgcaggtacatccaccatccgccttcaggacacattcctgcacggcttgcttgcgatagataccacgcctgctcctatcaacacacattatttcataccgatgcacttgtgtgcattgagcaacaactctatgtctccgtgcctttctgattttatcttccatgtactttgttaccacgttgccaaacactatgttgttatcggccattgacggaccaattttcttgtatcgatccctaaagtaggcctgcgtgccgtgaaggatgaattcaacaatagcaaccaatggaagtacccgcactcctcgcattacccagttgtacacctctgccaaattggttgtcattatgtcataccaagatccatcagtgtcgaacaatagagaccacttctccttaggctcattctcaatccactgagtgaaatttctgatggacgaccccgacctccttctcattgttggtgggtcgtcatgtaatgcaccaagaggtatgggaggctcgtcaccttcaacttgtggtcagcgagattgctcgtctgtttgcttcattgtcaactcatccaacttgtcccacaactcattaaatttcttctcttggttctgtgcatagagcctcttaaaaagatccataagatgcttgttcttgaattgcttgtagaaatttgcacccatgtgacgcatgcaccaccaactccgaacatcaggccacttagctggaagtcccttctcatcccaactgttctacaagtaatcaatagcccgcaacatacccgcatgacgatcatgtataaggcaaatgttgggcctcatacgcaccactgcaatgtgcattctctctaggaaccagtaccagctttcagtgttctcactctctacaaatgcaaaagccataggtggaacctagttgttcccatcacacccaattgctgtcaatatctgacctcggtatttacttgtcaaaaaagttccatctatgcatagaacatgtcgacaatgcacaaaagcattgatgcaagcacccaatgagaaaaaggctctttgtagcacactctttgttcgatcatcagccgatgtaaatgtatgtaggtcatagtaagtattactattcctctgggaaatggttgctaacagacgaggcaaattatcagaggatgctttaaatgtgccatacctcatctcaataatcttttgtttggctctctaggcctttgcatagcttatggtgtacttgaatttgttctcgatgtggctaataattaattttggttcaaagccaatgttaccaacaacattgttgtacatcttacttgccacaaaagctgaagtgatgtttcaatgatacttctccaccccttgtaagtagcactggtgctcggtcacaatactaactttccaataatcattccatttacccttatatgcatggacacgccacggacaatcttccttcatgcacctcacttcatacacataatttgttgacttgaccaccctaaactctctcggaaagaaaactgcccaatgcttcaccgcctccttcatctcctacttatgagcatacctagcaccctcagttacctcgttctccttatattcccagggtacatgatcaccctctgatataacaagtccagaaaaattctcatttgtccaatcagtggccattacatcaccttcctcatcggatgatgcgtcatcctccgcttgctcattatccgaatcttccctctccatttcatcaacgattatactgactctctccccctcatccgccatgccaatggcctgctcctcccttagtttgattttcctcattttgcatcgatggtccaacaacatcccatgcattgctaggaccctccacattttcggtttgcattgaaacatttgtatctttctcttgtaccgacacaaatataacgaggggccatgaccgttcaaaagccatctccacataccgtctccaagcagcagtgctgtccatcggcattagttcctaaaaataaccttctattacacgactcattacaacagatactgacattgtgtagacttcttggtctattctaaatcctctcaacaaccaactataaattgactgaaatgttctctccgcaggcctatcgatgcccttagacgtcattacaaaatttgatagatcaacaccatctggaccaaatctaagatttccttcaccgtgaactatctgaaatgtgaccatatttgacattgtgcctgatgaaaacaataacttcgttaacctcgcatttctatactacgcactaagttacattctctacaatattgttctctctcctacgtccaaaattctaaaattaggtgacgttctccagatcaaactaaactacatcttacaattaacactacggtctatgtctcaattcatactattatattctgtgctctagatctacacatatgtgctgtgtgctacagatctgctaaaatatatggaactaaaactaaaacgcaacatatattactcaaacataatatattagtacaaatgcaaaagaggtatgggagcaaacctgtgatgaagtgagcaaactggcagggctttgccgctccccttctgctaccctcccctctccatctttcttttttttggattttttagagattataatgagatttcagagaaggggagtgggttatataggggaggggcaaaaatcaccctcccccagggcgacaagggggccgcttgcgaaattccaggcccccttgccgcccatttgcaggcggccccccgcacagtataaaatcgcccttgcggagggcagcaagggggccgcttgcaaatttccttgacggccgtcaccggagagcgaacggccgtctgccacgtcacatttgccgccctctgggaatcgccctcccagagggaggcgggcgactacttttgtcaaattttgaaatagaaaattatttttgtaaaacttttaataaaaaaaattaaaaataaaaaaaattcctcaagattgagtgagcttctgtcatgtacttgggcaggctctaggcccaaccaaacagcaaggagtataaaaccaagccacactacagttctttggatcatggatgaacatatgaatgaacaggcatatgccttgtctcctttcttcccaaatgctctcctacctcaagctccaattctctgattccccaatctcttgcttcttcttcccattctagattgctgattcctgtgtctatgattctatccctccctcaagttgtatctcaaatacttgatatcttgtgttggaattggagtatttcccttctccttgctgttgattgatggaggtcaagagggatcgtaacaatatggtatcggagctgtcggttcatgggattccatgccaggagacaaggtggttgacacacggttgcagttacgacttccagatactgaatccaagcattggaggtagttgcactggaggcgcccgccaggtgtttgatgcaatgccaagctggctgggagctggtgcaggtgctgctcttcatgtccaagtgagccacatcatctacccagtgaccaataaggtattgtaccaggtttatgacatctatggagcggaggaattgcatatactggtggtcgacgcatggcgagtggaggttcttgtttggttccgggcgagaggtgatgcgaagaaggctcggggggccacccatggccgcaacatctatgatggagggtgcctactcgaggctcagcatgcgcagccttgttccaaggatggtgcagtgccgacgcccaccaagtgttcgacgccggtaccaagctgtgccatcaccaagtccgatgccgagagcactcctaccacattggaacatgtgttcccagccaccatgagtcaatctatgccctcagccgcatcagcagcagcggcgccaccggtttccctcaccgcgactaaggaggatgaggccgacatggacaaatctgagattaaaccagaggagacattccaagagttgtgtgccaagatgattgccatgctcaacaacatgctcgtgacatgcgagtcaaccgcgagcgttgatatcaccagagtggtggcagttacaagcaccaacactgaatcagttcccaacacattggaggtcagaaaggaggccaattcaattagcttggttgatactaatgagtcgtgtatggcgacacctaccaagtgtttgacgaaaggcaatgaacaaatgatcaatgatgatgacgatgacatggccaccgaggatttagttgagcacactgaagtgaattccaagttcacattacggcaaacatccttcaacaatccatggtttggccatcaagctatttctgttgtttacttgacttgctatagttgccttgaccggagctcagaatacacagctaggtcaccactagtaccacgttggagagcagtaattccatggaaccaagctgagatgaccttcggttctcggcccttaccacggcctgatccacagctaagtcaaggcagcgaagcgcgtggtggtgaagtttctatggaattggccacctctcaagccaattgcaaaggtgatcgagtggagcaccagccacaaccatggcctaacccacaattgaatgaaagtagcggagacgtggtgtatctcctacaacgatggtcactacctgatctttctcttcgcattggtgtggctattgttcaggagcaggggcagctactacggaaacaagacaagaagaatcctcggtcagcactttttgaagcaggagataaaactgatgttggagcatttctctcactcggtaggacattgagtaaggttcaatggctgtttttgtttcgaccttgggatagtttgcaaactgttgaatggttgacttatatgggaaaattgattgccaagagcaactttgttgtgaggggatgctcagtaaatctttgggaggttcacaagcaatcttatttggctgaaacacttaatctgcaatacattctattggtgggaataatttgggatccaggagaatttggtttgcaaggacttagtgttcagaggaaatcaaatgcagttcttgattcatttgtcattatggagtattggttcatgcagcagcttatgttgaccatgcatactgaaaggcactgggaatttctttttcaccagcatcacttggatggtttacatgttaggtaggacatgcagcaaccacaactatgaccactgcaaattgtcttcccagttagtgtgagggctgacctggaaccattgctgcagatcatggcttcaatgacaaagctaattaaactacgcttttggcctgctcttagaagatggggagatcaagtactaaatcaagttcatgatttgtgcaagtgctgtcaagatcaaagcctattccagctcactttctccataggttgttccttaaatctatgtcacttgggtttcaaagtaccatatgcaattcaggggattataattacagagatgaagatgacatggctttgggatcttgagactgtcaaactgctagtagccaagtatgttcatgcaagctactgcttttcatgaggcccaagttcaagaaaatgctatgtcaaagccatgggatcctgggggaattgcatcagctgggaaactgaattgcatctgctcagagggctcaatgacatcaacaaatatggataagcaaatgtgcattgttaaaatggttgtgcatctcaactttattggggttatgcttcaagttaccatgggatccagctacatctcaatgctgatttctagagcaagagattggacagtgaaggggctcagcaagtacgtaaactcatggatgtatttcagctcaagcacaagagcacagtggtatggagcttcatatttcaccaaaatctggacaaattgctacttaaactacagcaaggcaagaatatttggaaaaaactggtgatgagaatcctacctgcatcgaagatttgcatgttccatgggatcccgatagaaccgctacatcggcttgggcacaagccgattttcgaggaggggagaatgtcatgtacatgggctgggccagctctaggcccaaccaaacagcaaggagtataaaaccaagccacactgcagttctttggatcatggatgaacatatgaatgaacaagcatatgccttgtctcctttcttcccaaatgctctcctacctcaagctccaattctctgattccccaatctcttgcttcttcttcccattctagattgttgattcccgtgtctatgattctatccctccctcaagttgtatctcaaatacttgatatcttgtgttggaattggagtatttcccttctccttgctgttgattgatggaggtcaaagagggatcgcaacagcttccctgagagagtgatctcgttggtcatgttgtttcctgtgtcaagcaacatactgatgttctacacaaccaaccatgccatgttcgaggttcgagagaaatgattatgcgt

SEQ ID NO: 22319 - DNA, 4938 bp, Oryza sativa
aaaatggtaacgaggtgaacacaaccttagtaacaaacatatattgccattaatgaaagctgggtacgaagtggctggtgaagattacctggaagtaggactcccacttctgcctgaggacggcatgctccctcttcactttctggaaggatctcgtgcaactgcataacaatagtagtagagatctatcatcatacgaaataagccaatgaattgaacaaaaaaagatagacggcaagggctaattccagttcactagcaggaggaactttcacccatcagaatatgcatgtgtaactaggtactaacactcataacagtgagggctgacaggtgacacttctacatgcctcgactgagccatgccaagtttgacaaggtggcagactggcacttagccatttactttgttggtttttccgtaatgatcaggccgattggatgctctggttgccacagccactgcagctgcggcagttgaaaccagctgcagccggcagccatttacaactgccacagccgctgtggctgcaagcctgcaagcacagacgagcacacccagtaacagccatgggcatgggaaaatcacaatgctcaagccatgaacttttaccatgccataccacatgtcataaaagtggagagagagagagagagatacccttcggcgttttcttctccacagaaattcctgaatgaagtgcattcattcttcaccctggaggcaccaatgctgtgacaaaccatatcatgtcaagcattgataaagtacacaaaagattatcacatatgtataactaagcaaattgccagcttcttttatcatgtcaaataatgaaataaggagtgagcatgtactcatgatctaccagctgtgcacctgcaaggctgcaccaatcaaagcaatatgggtctctgtaaatatctctgtttaacatattccctgaccgttcactagaatttcacaagatattaagcaggccattatttgaaggtcttttctttgttgtgtgtgcgtgtggtgggagttcaggtacatcaggcttctggaagttctccttcagcttgtgttcgaaactgtcatatttgcttccattgagaaaaggataaacttaatataaaaacctgagaactatgccagttaggaaagttaagctactttcttgaagactgaagggagaaaaactaaggccatatagtttttatagggtaatgttagttagctttttatagattcttgacactctaaattagatttagtgataaaattattatcacatacatagtctttttgaaagatacaattgtgtgcagttaaaaacttaagatttcaaattaagtttacctacagcatatgctcaaaatatagaaaatctaatcatgttcattttcacccaacaaaccgaccttgcgatgtgtggctctccttctccaagcaatgtttttctaaacaaagttaggtggtttgttggaaaaaggcaggattattttttcctagacaaatgggtaattgcactaggcatacactttcctaaaaaggcaataaaattcaaacaccctgtaaaagtccatcagtgccagttccgtcaaatgacaacatggagatctcacaagaaactgagctgaggcttacctagaacagctgcctttcaattgctgcatgtgtgtgtcccatctggcgaagtctttcggatgcttctcactgtgtgatgttagatattagtaaccaacaataatgctgctgaatgtgaaaagataatcaagacaggtctagtttatgaaattgtcaccacttacatagcttgctcaaaattcaacattaccctggttgaatccttaaaaaacaaggaaacaacctcctctgcaaaatttggatttgcttcatcctgcaaatcctcaacctgacaaaattgctcatccaagtaaccctgtcaatacaaaacgatttgttaaaccagcacacttaacacatgttaaactaagataaagaccagaaaagagagttccgaaatggtgaaaggcgttgattttaaagcatttctttgctaactggggtggggataagtacgaaatggaatgaactctacagaaatatcgataacccacttatattaatataatgtgcttcaatctgattctccttagctttgttttcattatctgtgtgcaatagtgtcaatccatggtatggcaattaaaatggcatgactgtaaggtgatgtccatcaaaacactgtattctatgtcttgctgaatgataaatagcagaagaagatatagcaaaaggactgatggatatatttgcagagtctcagatatgcctcaactataatgcttgaaatttgagatgaacagagcacaagcctgatcgaagaggctctttttcaaggaagctgcttgacgtcgcaaattaccgtactccattcacaagtattgaacagtcaggaaaaaaatgaggcgaagtgaagcctttaaagtaggagtcaatcccaaaaatgaatacacaggttgccgatcacctaagttacagaaagtagaacatgaggttcatttatatagcccaggagcctgttactattccttcaccaacataagtgaagatattttaaagttcgtatacaagtgagttatcccagggtgtgcaatatctatccacattttagacagtgacttgaatagctgcagattctggagatactttataggatactattttgtatatttggtgttcagaaatcaaaattgctcatctataactaagtgatcatttatagaggctacagtacaaaaatattgtcagtatttcagttgacataggacccagtattataaaatccgcccattaaattttatagctaaattctactaaaaattataaaactaacaaaaggatttgtgatgaaaaatacattcacaccattttctaatggtcaactagatttttaacaaattatattgcaaattactaaagtatctttcccacatcaaccccaaccttaataatctcggttatttaataaagatccaagatgaaagtatctaacctttgtagttgcttttagttcactcagtttctcattcaatgaaaagacaaaattagtgcctctcggtatcacataattatgtagaagcatgcaagcgacaacttctgatatgtcgtaagaactctttcaagacttgatgcatcaaacttaatatctcacaggcacaaacaaataaccgtccagttgacaatttattttcaaggccataagaattcacacatgcagggcttagaacaagaataatcatttttgggaaaataaaaaaaatgaaaactatgaattacttcatctgatataatgttttagttagtaagtacctcttatattcaaataacatatgttgagtccaaatatatgaatcataataactcctaaaataagaaattttctagggtgacacattgcaggaacaatcaaatagggaaatgatactatcatttttttcacctcaaagttcaagcataatgcggtgataaaatcattgacaccgatgggaggattataataggccgaaaagattcttactttgtacacatcaaaaaaaaagttggagaaagaaagcgatttcaatagctcctttgaagttacaaacaaaattctctcaaatcagtgggccacgtggcaaactagtagcctttgcccttgcagaaaaaacaaagagtatcatttaccaaaaggtgtaaaataagttcattcaatgattggtcgaaagagtacattcaatcacatcttgataagagaatctgacgtgggttcaaacacaaggaaagtttcaaacatatcacaaaagcaaattctaatctatgcagatcaaactgccatggcagcgaatgataaatgaatggggaacagaaatagagtacatgaaagctagcagttgctacctcccctggataacgggtaatgtgtttaaataaagggacaatggcatggctcactattcatccttacagtggcatcgctctccctttagctacgggacattctcatgacgacatctttctacagaacatttcaacctcccaccagtgacctttcccccccaccccccaaacgaaaacatttcaacctcgatatgcagcaagcagtaaaacatctcccaggaccagccacacaagcagagagcaataattgtatttcctgtaaagatgttgaagatagtacaaaaactacaaatacattattcacgtattgcaattctaaacaaaaagcaacagtggagtattgagtcaggaattctgctatgaatagtttacatataatgtcacgacagcaccttagcacacagaattatcaatttacttactgttcattgaaacaataatcactgcccaggttttggttggaattttaatgaatgcttatctctgaagctattatcctgaacacaattcctctcagacgttgatttacacctgcaacatacaccatgtttattatagtgggtcaccatggtatgataagattctctaattgatgaaccataaacatggcatatatatcatgttgctaggtattcataatactcttcaacatatataacaacaaaaatcagtaacttcctagatataatattcatagtatcagcacagcacacacttaaaaactctcatttacattgtgttccaaacatgtttgttttattttctttgtatgcacacaagcttgcttttgctactataatttcaattctgaatatgaatagattatgtatgattgatagccagaaaatattccgtgatttgcaacaatgctcgatgttatccattttaacactttgtaatgacctggcatcatcagattaacagtgactgcaaacatcactacggcagaagtacacagatgatgggtgcaacccttagcccttacagccttactcagggggtgtttggga

SEQ ID NO: 22320 - DNA, 8358 bp, Oryza sativa
ccctcagcaatgcatacatatcatgctgctaacgatataaaaaagctgacacaacggaatccataactacatagtagagaataagaataaatacaaggccccgtttagttcccaaattttttttcccaaaaacatcatatcgaatctttaaactcatgcatatagtattaaatatagataaaaacaagaactaattgcacagttagggaggaaatcgtgagacgaatcttttgagcctaattagtctatgattagtcataagtgctacagtaatccacatgtactaatgatggcttaattaggctcaaaagattcgtctcgcagtttccaggcgagttatgaaattagtttttccattcgcgtccgaaaaccccttcctacatccagtcaacattcgatgtgacacccaaaaattttcttttcgcgaactaaacgggtcccaagctgaggatacgctacctccttttcgatgttttgattccttgtctgatgtggtggcagccaatccattctttcctagtggcatccaaattggggacaaaggtgcaatgatgcctgcacaacacaaccacacaagtgagagttttggcaggtaccgatcaatggataagagtctcctagcagccgatttccgttcgattgaagacaaaatcagcgtggacgcggatataatcacatgacatcgtaaactccaaaacaatatctgaacagttcgcttggctaatcactagccaactgcaccagcgcgacagatgcaaaactagttcacgccaaaattggaagtttggttgaaattggaacgatgcgatggaaaagttaaaagtttatgtgtgtaggaaagtttcgatgtgatagaaaagttggaagtttaaagaaaaagtttggaactaaacaaggcctaaacagggtacaggggtggggacttgggtgtgttgtggtggttaccttccgggttccggcgcatctcgacggcggcggcggaagactgcatcacccgcggtgagcactcatcgccgacggatctcactgctttcgcgctccccaactctacactctggtggaatggtagagccaataggccatggaaaaatacgattagggagcttgcgcttccagcggaagagagagcagcgaggagatgcggcgactccggtggggaagaggctcatggcgaggccgcgacggcgaggcggctgtcggcttcgccggacgagcggcgggaccccgggagagggagatcagagagccaaaatacaaaaaaaaaaaaaaagaacggaaacgaacacaacgtggccctctttgcacggtccgatgcggatcggagcaagggcccaagaagagattagtcgaggacgaataaaaaaaagagagagagagagagagataagtcgaggacggagaaattccccaagccgccgccactaaccctagcttccgccagcacggtattaaaacccttccgctctaatttcctcgcaccattgatttttgttctgtgcgttcgtttcgatccaagtagttccccaacaatcctgctactgcggaactgccgattttgctgtcagtttattttgatcgcaaacagtaaatattagccgagcgtcgtttggcattatctttcaattccatgcttctttcaaatttgacccatcatgcatgttatcaaaatttactagagacccagaaatatgccgatgttctgtggtgacatacctatgtcctgttttttctagttagtttgcatgtcttgaaataggcttgtggaaagaacttgtgtttcgagcttcatgttagagagtggtgggatggcaccctctaataggccacttgaggtctctaattcttttgttttcccagtctgagtcagatctgtgtaagaatcttacatttctagtaatagaaattgggggttactcccttgttttaaaaaaaaaaggaaagacccaaaaaaaattcactagactaagggcatgttgggatggtagccattgccaaaattttggcgaagtgggtttgtttgatttgatgtgaatatatttggagctttttttaaaccttgccaaaatattggcattgcaattttccttgtatcaaaccaaataagtgccttgccgttaccaattttttgtgttgttgatttaggcacataagatccaaagtattcatcgtttcctgcagggtgcagatcaagttccaaatcaacctgattggtcctcaactttgagggtaacatgatgcgagacagcaagaggacgaggtccgcaccacccagagaaccactggaaatgacagaggacatgaccccaagaagcaagaggaggaaatttgtaccattcggagaaggtgcggtgctacctgaggagatgctgacggaggtgttcctacgactgcccattaaatccatccttcgtttccgggctgcctgccactccaggtatgcaatgttgtcttcccaggaattttgtcaactctacatcacaagaactgaggcaatgccaccacaacctaagcttctgtttatctcgcctacagcaaatttcaactccactgcggtgtacacgtgctcgccatcgaagcccattgatgacctactgttcacactcgatgatgtgcgtggaaactatgtggaagtggcaccttcaccatgccatggcctcaccctcctgtataatgctgttgcgccagcttactacgtcttcaatgcaactacacgggcaatcacacggttgccaccttaccaagatgtgattcatgccactgctggcgttgggtttgatgcccggacgaaggagttcaaggtggtgaggctttttcgaggaaaatcgcatgagatccattctgtaaagtgtgagatattcattcttgggggtgaggaaggggatcattggaggcctaccgctggtggagtacctttcaggttctgtagttttgctctttctgctatccgcaatgcagtggcgaacaaacttcagccagtttttgttaacggatttctccactggttgatcaacccctcgtttttactcaaagcaccaagagctgctatcatatcattttctctcactgatgaaaccttcagatggatccgatcaccaccctttgaggtatccagagtgcacttggctgagcttgatgatcagttgtgtatggtccgagaccttcgtaatggcttgcctactggtagcatgtttgaaatttggaggctgaatgactataactctggtgattggtcgcttgattaccgaattggtttgacagggaatttgccaagagatttacttgagccacgaattgtgaaagttattggttcctttggtagctacagatcaagcaagaagataatcatcgctacatctaagcacaaggtgtgtgcctatgatccagtttctagaactcttgaaaccattgtctcaatcatggtgacctgcagtgcctatcaaaacgagaaatctgatattagattcagttcatttacaaagagttttaccccagtgcataggacgaggaaagagatagggttctctactcccttgtctaaggctactaaggagatcctactccgattaccagctgaatcaatcttgaaattggaacttgtttgtaagcaatggcgtggattgataaagaatgaaggttttgttcatgcatactttgagcataagaacatggacaggaggccaaagatcatgcttgtgggtaagggctctgaaaaatcagttttcaactttattcccttgagtaaatggctccaagaggcaaatctaggcacaatgtttctggacaaaaaggtggtttgctccaagccttgccatgggttgaatctggtgagcattgagatgaaagactatctgttcaacccgtgtacaggttaccgcatgatctactagaacagagaccatcagctgtaccaggaatggtccaatttgtctagtgatcgctgcaaagactacaatccttttgtagttggcaataagaatgttggtatggggttttgccaggtgactcagagtcatgccgttgtgggaattttctattactggaaaaactacgaatctcatcagtattacttaacatgcattatatggagttgtagctcccaaggccagccactccccgatccacctctgcctgtgaatgacatgccacctgtttctctggatggtgtgctgtactggatgagtgaaccaaggttgggtcagagttatgagcgggccattgtcttttttaacattgccgctaagatttttgatgttatcccttgcccttcatgcattgcaatctgggacagcagaaatccatgtcacgcatttgtggtcgagcttcagggaatgttgtgtgctgtcctttcaaatccagttgcagataagttagatatatggaagtgggatcatggtctgtggagtatagcatatgcaatcaatttaaaattctggccagattattcccttgcgacaaatgttgtagtgcctctcgcagttgacccaatagatggaaaggttctactgaatactgggaggaagcttggtttatataatccatgtgagcaaacaatcgaaaacttgcacttgatcaggcgtcgcagcaacagaaccctggagttaacagaaatttccacattgccagatgccaagatgttcctaagaagttctctcagtggaaactattattggctccgtgcgagaagtttgctaacccttcaagtgcttcatcagggaagaatccattttactccagagaccaatctaaggagctaaatagtgtgagtcaaaaaattatgcctctggttcctatgttgtacgaggagggtttagcttactatcctacaactcctaaattgagagtattgtgcgattgaagtgttgtcatattatgggcctttttcatggctcttgttctgcctctcttatagctggagcgtaactaatatagatggccataaggcccgaggcctgaaggcccggcccatggcacggctttttggcccggcccaaagcacggcacggcctgacttggatcgggcccgtgccggccggcccgaccgccgggctgtgcctgggcctccccatcggcacgctgggctggcccggcacggtcgggccagcctggcacgatgggccggcaagccaggcccggcagacaaaatatagggactaaaaatagacataaatgtcactgtccaaagaatagggaccttaaatagacttattttagttatttacatatcacagcccaaagaagagggacgtaaaatagacttttttagctatatataagtcacagcccaataggaggaaggaaaattatacttattctgaggaaaagcacgatggcccatcgtgccttcgggccggcccgacacggtccgaggcgtgttgggccgtgagtgcggcacgtgggctggcatggcatggcccgatgcatcggtcgggccgtgctggcccgacaagcctcggcccaggcacgaccgggcctgggccgtgccgtgccgggcggcccacatggccatctatagtaactaaacggttccagctctatcaaaaggaagtgaaattagttggagtgctctcataaaatgaattattagataggtggagagttgggtttaggccgctttcgctccaaatccaacttatgaaattaaatttaagagttgaagctcatatatagtagctaagattttataatgttaaaatgccgtggtatgtcccgttaaaattgtagtcaggggtgaagctagcatcaaaacaaggggggtgcactatcattgagaatctacaaaatttcagtacaacactgtatattctaatttttttaagtgagaaattaggaatttaggggttcatgtgcatcccccccccaaacactatatagcttcgccactgattgtagttgtcatttcaagcccagcttttatagctcaaagaccttaacattatttcctactccatcactgcaagaatgtaaaggcggatgtgaaagcaacttcctactcaaatgcaagatatttcctattttcagctttctcactcgtactacgtattttaacgccccttgtttcacttacatttatacttatccgtgagatttattaataaaagaataatttatgtataaaacttctatatatctgtccttagcaattttaaaaagtaaaccatgatgaaaaattcacaaaattaactcgaaagttaagttttaaaatttaaacttcggcttgtaagaataagcgatagaatggtgctgtagattatatactcgtgtaacgatgaggtttcattgcctgagatcgagtgcatcatgtctcgagcagtcaaatattagagtttcctttagcccaagtcataactagatggattcacagttgatgagctgggaacactgggcgaacggggtgagaacggtaacggtaattcccggctgaccggcgtttgtttctgactttctaccggccgagccatatgaaaatggtaatcgaccgaaaaaaatatgaaaatggtaaaatatatggaaatggaaacggaaatggttttattgttttaccgatcgtttccgtatttaccgtattcttgtggaaattaccgtttcttataatatgataattaccgtagttctaaatatgtcgatatttatagggcatgtctctacttgacccatagtttagaggttgaatgactcttcaatcaaattcctaacttgagtgcatggctaaaatggagttaatttatgatttatatagtatagcttgaatttatttgtacatatatcatacttatgtaaagttttctatagtttaatgttttcatatttgttaccggtttccgatttgtaccgacatgtttccgtccgtattattccgttttcggttttccgatatttccaatatcgttttcatttccgactttaccgttttcgatatcatttctgagaaaaaaatgattatggaaatggttgaggtgttttcagatctttcatatcgtttccgaccgttttaatccctacgcgaacctaatactcctcctagtagtcaagaaagtcactgacaaaagctccctacagaaataaagaacttctgtaattaaatttctttctatagaaatatctgaagactttatctaggaattttagatagagatttttactataaatttagaaatcttttttaacgaaactttctatagtgaatcctttcacaggagttaaaaatagagtaaaaacctctaatgaacattttgaagaaatttctattaaagcctctgatgaaaataattctctaccttaagtagaacaaacaaattgcatttttaagtttcaatcagctaaaagtacttcgtctatctcaaaatataagaatttttagtaagtttagaacaatttagggtgtgtttgtgtttggtttgagggatcatgaatgggagacggtgatccaacttttaagcaacaatcaaaaacataccatgccccttattgaacaggcatggcagatggcatcactcttgatcggtttaattgtcggcccatcttgactggtgggctaatctatctataccttaatagttacacgctcgcgcatatatacatatatatacatatatacatatatacatacatatacatatacatatatatatgtatatacatatacatacatatacatatacatatatatatgtatatacatatacatacatatatatatatatacatatacatatatatatatacatatatacatatatatatatacatatatatgtatatatatatattgagggaatggttagttcatatctaataattggatggttacaaccaaatacttctacatagaatgccaaaaaaaaagtacttctacataataaaatttaaacgctagacatcctaaaatattttgaaacatagtgagtaatattaaaaacaaactggtaggaaatcattagctcactgaaacaagccatcgatcaaaacctcgcctcctagtcctacacccatggtctcttgatcgaggtgttcattttttttcctcaatcgcctcctacaaaacacgccggtgttgcacacccgccaatggtgtggaacgctgcttagagcagatacaatagcagactattaactaattataaacatattttaatgaaataaaagataagagagaagagcaatgggctacagatatatagtcagttgcagcacggactctaagacgcaatgtggatatgatgggtgagaccatatattaatagtatagtaagtaactattttatgaattaggtattaggtttggttatagatgaattggaggtagtagtgaactgtactattaaactttctcttatgtattgggctgtgtgggtcaagtac

SEQ ID NO: 22321 - DNA, 2537 bp, Oryza sativa
gtgccacgatatatctgtagctcatggccagatacctggaaaatttttgtttgttagtcttaactatggttttgagagatttcacattgttcatttcctaattcctgattatcagagataccgacagggaaggagtggctagcacttctggacaattcacattcaacacatctctagcctcgttgcacacctatcttggtggtaaatgtcctcgctatccttgctatatgatgtttgatgctgatagaaaagaaagtgtaataagactctttatgtgtcactcagaggttgatgatacacggggtcgagtttctctcttagatggtggcacaatcctcagcttgccaatgctatatcttcaaggtaggtcttgtatgtttgtattttatttcgttaatccgcaatcttgattatcatgccagcgttgaagacacactaattagtgatcacaatttttttttcatgccatcatttctccatattattttgtctgcatgccagcccttctaagttacattcttttcttttgaactcacttgacataacctggtctattaacgtatccactgttattgttaatgttaaaaagagcttgagcaatactactatctatttatatagacttattatttcagaggaattgcacataccatttttagtcactatttcctttatattgcagttatacagccatgtgaatatacggagtactttgtagtgagtttaggacctgaggtttcttttgataattgataatttcttaatgcatatgactagagaagtggcatccaataatctaaaaggctacaagcatccctaaacagtgttgttatgtcgacatttttctgttccagtcctgcgggttcatgatacaattggatattaactccatgggcagtgaaatatattcttaattttaaatctggaacataagaacaggcacaaatccttacctgtctctctcctgactaatgcataacagtgatagtgtaaatgcgacaggatttttctggtaggttatcaagcatcaaatttattataatatgaatttgtttcaggtgttgtcctatttcctggagctaccctgcctctcagactaattcagggtagatttgtagcagctgttgagaaagctttgaggcaggtcgatgctccatgcacaattggtgtggtaggtgccagtctgttgaaattaactaattttatttgttgaattcctttccaatgacgcagtttaattttcaggttctcatgtacaagcgacacagtactcgacattatgctaatgcttcagttggaacaacagccgaggtgttgtacattttctctgctgtgcttcaagttagaatttgtttatcagttagtcattttcaccgattcttcatgtggtttggttgttttctgtgctgccaattgagcttttccgtagccagttccatcatccttgggtgatttgttattatttctacaggacacataagttaccctctcgtcacattttgtaattaagatgatctgcttaataaataaaaacatgagggagttaatttatatcattcaagaatcaggacccagtcttagcagttagcatttaatatttcttgtaaatgggacaattgaatcattcatttagaatagactgatatccaatatttcagaatttccttcacttggtcacaatatctctatcaaacttttggagaatcatgtactcatctagttttctgatacttcacaagatctagaagaccaacagaacatataaagccccatcgtttggcttatctgcggaataagccaaacggcgtatttgcaaacgaaaagtaatttgtgaataaaacttttatatacgtgtccttagtgatctaaaagcaaaggctgaaaaataaacttcgatgagaaaacctcaaaatcggcttcaaatttaaggttgaaaattcaaattttggctgataagcataagcataagtgaaaagatgaggccgatatgcactgtgatgtcttgtttacatgtcaagctcggtcattagccccttagtatgatttatgtataaagtgatgtataattcctttcgaacagcctcacaaggtaagctggtattttgttatttctttaacagataagacaacttgggaggatggatgatggttcattaaatgttgtagcccgtgggcacaaagatttcgtctgaagcgtcattggatggatgttgatggggtggtaagtataaatttaattgaagatatattattctgaattaggagctggagagaagttaggttcattttttctcactcaacaggtgtggggtgatgtccaaatcattgaagaagatactcctttaagaaccccaagggatgcatttgcacagctagcatcatgtaacagtttacggcagcatacctcctcaccagttatcagtttggatgtctctccaatcaaacaacgggatcatgtggattcagaattggattgtggtacaccatcacctaaaagcactgcaagcaatcattcagcgattgattcaaggatgtgc

SEQ ID NO: 22322 - DNA, 19482 bp, Oryza sativa
  unsure (1)..(19482): unsure at all n locations
gattcttagcccaacgattgtaaattcttatgttttatagataccactccactagtgtttcccatcaaaaaagaacttcttattggatgattgatcgttttgagtgttattgagcatctcgctctgtatgtttattttaaccaaaatacactattgtcatttgctgcagacctctggagacagataatcacacacccaagcatggatgattacgtgagaaaaccagatcttctgtcattttccattggaagcaaacttcctgtatcagaatctgtgagacaaaagctactggagattgatggaatctcgtatcgtcttcgaagggagattcagcttctcaaggcctttaatctcataaaatgtagatgctgcaaggtaactatctaccatgtttggaattgctaatttatcgagcttctgattggaagtaatggacttattgttggccatttcgttactactttaaaagaaggtgaattgtttatggtggtgttgtatgttaatcatatgagtctgtcacccgacagctcaccattgcaattttttggacaaccccttaatttttcttgaattgcacagtagttaaatatctaactgaatacacatacacagacacacagtatatgagttggtctataatcaaggagtttaagcactgtcaagttctccctgtagcgaagttataattctgttaattggtatcaaccacaagtatttagctagttttccatataaaatggataactattctaggtcatctgtatcgtagcaatttcatttaccatgtcatggcctgctaaattatctgtatgtacatcccattttcatttttcagcagggtatgacatggtacagtttgtcgttgtagaatgctgcagctgcagcattggaagaattagcactaacataaaatcaaactacttgatagttcatattgatttgctgattaggctcatttggctgctaggaaaacaatgctccatgtaacctggttttcgttgatcataaacattatttggaaatggcgtgtagttacatcaaagaatttcaatacaaagtttatcactctgtgttgacatgatttgaactatggcagtctctcatagcaaagcgtagcgacatggtagtgatgtctactgatggtcctcttggtgcgtatgtcaatcctcacggttttgtccatgaaacaatcacagttagcagggcaactgggcttgctcttgatggcaatccttcaacggttcacagctggtttccagggtaaatctacagtttctccttgttctttgtaatcttcatgtccatcatacaccctttaactgtaaaaaactaagttcatgcatgattttcttcttgtaaccaactttgtttctgctgctatgcagatactcgtggacgattgcatcatgtacggactgtgagtccaacataggctggttgttcaaagcaaccaagaagaatctgcgaccgagatccttctgggggatccgtagctcccaaattgcagatgatgcacaagaactagatcaggacgaatgatgctccgtgtacagtagtaaactttgtgtgcccctccctttttcttatgaagttatggaaaacactttattctctggtccataggcctagttctccgtacctgagtagtggtcgttgtgacgatcgctatagaataaccacttcctcctgtgtgtattacacaaccattgccttatgctaaagttccgtcacagaattttctgaaatgtagtgttactagaaatccatagtacaagatgaatgatgatatgatcagatgtttcaagcaatggtttgacatgtcttatgagcacatagaagttggtgcttgataccttcacttgaggcaaatactcgtgctgtagtggtaattggtaaactggtactggtagtgagctagcactggcagtgccatgtttttgctatctgtactgaaattggggccaattgcacctgacgagcagcaactcaatatgggcatatggcatcctttttttccctgcgtattgtccttttgtttcagccacagtagcaattggccggtattccattgccacctttgatgagagggagggagagagagacctcacgggtggcagcaaaggcaaaggagcagcaagaagccgacagagaaagtaaggccatggtagaatgacaggtgaggaatcgatcagacgggaggaaaacaacaccgaaaaggaatgcacttctctgcttttgtatatgcatgcacctctacctacccattcgcgatgcaccaatgaaatacgttgccaaataccttaaaatactagtctattgttcaggtgatagtaatattgacactagtagttctctaatctctagttgctagtcttgtttatgttctattttttcttgttgcaatagtagcacatgatcgtagtaatgctgtatgattgatgattggatggcatggaactatgaacggatcaaacttatctcgataatatggtaataacaaggagatgtagacatgtactccagcattgtagtcagacagccgaatcacgaagctagtgtggaaccatgacagaagaaggcactactcagaataaatccagtcacgggtttaaaaaaaaaacagagagagaggagaatcatcatcacaaagctaatgcaacaacagcacaagcgtacttccgcatgagaccaagcaaggaaaaaagaaattccaaactgtccccaagaaaattcctgccccaggagagcacagcgccggcctgtacaggtcatcgttcccaataagacagggggaagctgagaggcaaagagcaccaccaacaacgcgtgcactgaattgcattgcacatgggacatggcaaacaccggcgcgtcgccacccgcgcatgcacgcacgggcgcgggcgcggccacgggcacatcctctcctgcgactcgtgagccgtgtcattccatcgcggcttcctgctcgatccgctccctgccatgcccgtgaccgtgatctccataaattcccccaccctgtgcgcgatgcgtctatcccccacgataattagtaggcctgccacctcttgccgcgagcaagacgaccacaccaccaaccaccatccatggcggtgtccgtgtcgtggtcgtgggcgccgcggttcttggcctgcgtcgcggtggcggtgttgcttgttacgtcgggtttgggcggtgcggccgccggcggcggcgggcgacgccatgggcacacgaaggggttgcggccggggaaggcggcggcgaagccgtactatccggtgaacgcgacggcggtggaggcgatcgagcggcagttcacgcggtgggtgcggtccatggtcgggcgacgccacagcacgttccagcgcgcgctctaccgcgggctgctgcccacgcgcaccctcgtcgtcgacaagaaccccgccgccggcaacttcacgtccatccaggccgccgtcgactcgatcccgctcatcaacctcgcccgcgtcgtcatcaaggtcaatgccggcacatacacgtacgtcactcacgtggctacttaatttggtctctgtaattttcttccacacccccaccgtatccagagcgttcgtccgaatgcctacaccgatctccccgtgcaccgtgcagtgagaaggtgaccatctcgccgctccgcgcgttcgtgaccatcgagggcgccggcgcggacaagacggtggtgcagtggggcgacacggccgacacggtcggcccgctcgggcgccccttcggcaccttcgcctccgccacgttcgccgtcaacgcgcagttcttcgtcgccaagaacatcaccttcaaggtgagcaccactactacactacaaatgcggcatcatttgtgccgtggcgtggctcattcgtttcgtctgtcgcgtgggcagaacacggcgccggtgccgaggccgggggcgctggggaagcagggtgtggcgctgcggatatcggcggacaacgcggcgttcttggggtgcaacttcctcggcgcgcaggacacgctgtacgaccacctcggccgccattactacagagactgctacatcgagggctccgtcgacttcatattcggcaacgccctctctctctacgaggtacacacattgcttctttctcttggttgcatacacatttcctccatgaacattatagcagggaattgcatgcaacccgggtgattaggttgaaggtttgttgctaaccaagatagataatttaattagcgcctgaaatcgagtcaaacaggaaatctatgctcaatcctgtgtgtcagtgtccagtgctacagcccaaatgcacaacagatacaccgtgtcagtaaacactggcccgcagctttctgacagggcactggcctactgtggcacctactacaatgcaccacactggagtcacacagaagaaagaattctactatcgaccactgttaaaactcacagggttacagtagaggcaaaccactattatcggccacattagccccccgatcttgtgactggccctactacagctacacgaaccagatggtgccaatgcgttgtgcatgcccgtgtggcacttcgtttaatgcgaaatccaacgcaaatggaatgttgatgagcccactagtaatagcatagtgagtaatcagcctttcggtttttaagaggagtgtggtaaaacctgcatcgcttgtcgttggcgccggcacggttgccggatggggttttctggagcccggcaggttctctggtccccctggccccaggcgccgtgaccgctacggcccgtgacgcccatagctggacgtctcgtgccgtgcgtatggccccaaaccgtagcgtatgtgtatagccaccagtctcctctgcaaatcctgctcactttggtcgtacactttaaaatctggtactagtccaacactactaccagtagtaaccgacttttttttttggtcagaaatcaaaaattgacctttgggacgatagggtcgtccaagctccaagggaaacatattatctgctgtaccgtgctctaactttaagtgattgatatgtgtactatcccacatctaatatgtccacatgtcaatgacccattcacccatatcaaaggatagttctgtagagaatactcatccgtcgtgcaagtgcgcaacgcacctagcatggttcgaatgctagactttgtaatagtattcaccgtatttcagacattcagtaatactccacacaccacactagtggttattctaacgtgtgttacagtgtgtgatcgtaaagaatactagggtttacgcaaatatttgatcagaaatcctttgccgtgtattactttggtcatgtatgtactcagtactcacgttggtgacacgattgcagggatgtcacgtgcacgcgatcgcgcggaactacggagccctgacggctcagaaccggatgagcatcctggaggacacgggtttctcgttcgtcaactgccgcgtgacgggctccggcgccctctacctcggccgcgcctggggcaccttctcccgcgtcgtcttcgcctacacctacatggacaacatcatcatcccccgcggctggtacaactggggcgatcccacccgcgagatgtaagtagctaccactagtacagaatcgaacatcgtgaacgatcatatcactactattataatgatatgtgggtctcatcctatcataccccacccatcaatatttgtgatgatagcgtcataatggtagaggatgtgaaccccattcacccctcacatccatctcgttcttgtgttttttcgctaacgatgctggtgttttgtgtgtggttggtggcggtggcaggacggtgttctacgggcagtacaagtgcacggggccgggttcgaactacgccgggagggtggcgtggtcgagggagctcacggaccaggaggccaagccgttcatctccctcagcttcatcgacgggttggagtgggtcaagttgtagcaccacgtaggagagaaacacagctcactcgactattagttaacttgtgaagagaaaagaatagaacagaagaagtggcagataaacactctgatttgattcgattgcagatttcaactttgcagttgcattgtgagacagtcctatactgtgtccggccttcgcctcggttttgttttggactgcaaacagtataacatcaacttaggcccactggcccaggcagtagagaggtagcaatcgatgcgatctccctgctcagcctagaagcccatagagaattgaagtggggaaataggcccagaaaaaggttagagtagtgtagcagaagtgagcccaacaatcacaggtgtgttgcttccatgttccaacacgtatagccttttcgaacattattccttttttttcaaacattattctagacagacattttaatggatttctgcaaacttttagtagtagtagtattatagacccagtggccaatctctaataccgatttcatggttctaaccctggctagagattgggccacgtggcgccctgaaaatcaagtttgcctccctgcgaatttgccacgtgtctccttggctctcctcccgcattgtttgatcgagtatcgacggctaaaggctacagctcgctgtggtggtctggtggacctcgttagaaaactggaattttttttccatgaaagtgctccatccctaatccacccatcttcctcccggacgcacgcaccgccgtccccccgccgcccaccggattctccaccacctgcgcgccgcggccagcgccgcagtagaccacccgctcgtgtcctccttcaagacgctaggctcgtcttcttcaacgccgcccggccaccttgccctcccctgcgttccctgccgcaatgccgctgcctttcctcgaagccagggccgccgtcaattcgccggcaagagtcaccctctaacaggcggtggccatcgccgatacaaacttcggctagatccggtgagcccacgagagaaagaagggagggggcgctagctagcagaggaggagaggaggcggcgtgcgctggtgagaggtggcatcgcatcagatccttcgccacctgcgcgtcgcggccaatgacgccgtgatgaaccacccgctcgtgtcttccctcaaggtgctgcgccgactcgtcttctcccccgccgtcgtgcccgcgccgaggttgagggaacgtacgcaagcggctgctgtgcaggctcgatgtggagcgcggcgcgagggctgcggccaagcggcggcagcgatgtcggcgatggtcgtgcgggcctaatgtggtggcagggcagggcggacgaggaccgacgatctgggatcaacacggcggcagcggtggctggggcactaggcactggccacggccatgtgaacccaatgtggcagcaactgccgcgccgccgaaggccatgtaaatttgtgctccgcaaaggctccatgaggtgtaggctccacatatgtgaaaacgacggcggctggctctgctgcaaggtttgtgcaattcattctacaattcattctacaatgcatatcttgcagctaggaatcatgatatttcttttaaataattaccattatgtctctcaaaaaaaagtatgcagtatttattgccaataaccttgatttgaaaagggtgaaaatagtttttgttacatatagttatgagttacatatttaaacgcactttattaagtgaaaaaggattgctctgcactggacgcgtttcagattagaagttcagatttgcaagatgcggtttatgggctttcattccattctgttcaaggaacttattttcatggttgctgtcggtctgaatccataaaactcttctatgagatgtagcttactttttttttttgagtcatgtcattgtatcatgcttgctctattaaaatttccatcctcattagctaatagaaagcagatcgtccgatttgaatctgatttccatcgtcaagaaaagcggtgattcacaacctatactcatctactagctagcttaacttatcagaaaattggaaaggacctttatcaaaagctgtgatcatttcctcaacaatgtatgtctatatcttagataatctatattcatgtctttgataatctacaataaatctaactactaaacttaagtaaaacaaagttatggctacctattatctatacatatatatattccaatgcttgtgatatacatactattacaatttcatcctcgatctttaaattctaacttgattaggcactatgtcatactttggcagagttgtaatatcactgaactgaaactttcatatgacaaaaatggccattaatttgtatagatcagctgctgctgcagttacagtgcatctatatgtcatggtgctgtttggctggtgctttaatcagtttgttacatgctgaataaaatgtcatgatctttgtacatgctgtcaaagttgcaaattttagctacatgctgccaaaaaatttcatgatctgtgactctgtgtatgtgctgccatgatgaaattcctaagctgctggatttccaatttctttgttcccctactcaatttagaagaagtaagagttgtggtcaaagtgaaggagcgttctcagaataaatgtgctctactcttttttttttaatcaattagtttctctggttttgttttattcaattccaatattatggcatggcattgatagctcaggaacaacatcaatattcgactgaaactaactacaatatacttgctaaagtgcatatctgcagctaaaacaagcaaaaaagttttggatcttaacgaacaatcatgtaaatagcttatataactgctaaattttattcacataatgctaactaaatttaagttccaaatgccttgctatgttttctttttctttctttcttttttctattgcagattagtgtagcggcttcctgaccaaaggtgtaaagcatcactgctatcaaagtcatttgactgatatctgattgacgtcctcaacggttgacacatactcatcggtcaagtcctcaacgtacatggagttgaataagtttgttgcaatccattagcaaacaccaaatgcagagttagttttttggtggtacaagatggttatgcacatgagcaagagaggcagagagcaagtgaaggggcgcaagcaacgatgtatcacacaactcacactcactggtgctttgtccagcaccaaacctcagcaccagatttttgtgccaataatcacatcagcttgggagatgtcttcctgatgcggtgggcaaaggtatcgagggccatggaaccggttgatagcccgaggagcaagagggatttacaggaggtggaggacagggaacgcatcgcagacttgttctgtacatgtttattagatcattgtgacagagtgacatgttgcactatcaagtaccaatagttggttgggattggaatgatcaaaatgagttgttcatgttttagaaggctgtgtgtttctccattttagtttagatttgagaaggttctaggtttttcctttaaccttttcactctgtttctcgcccaacataactcagtttttctccttttcactctgtttaatttatcaatttctaaatagtgccacacggtccaatctccggtaaaactgtcagcttgagaaaagtgatgtggaggaaccatgaactcaatgtcttgctgcattgaactaatatgaataaaagggtaaagtttaaataatttcaggttttaaatagatactccctccgtttcacaatgtaagactttctagcattgtccacatacatatagatgttaatgaatctaaacacatacatatgtccagattcattaacatctaaatgaatgtaggtaatgctagaaagtcttactccctccgtttcacagtgtaagtcattctagcatttcttacattcatattgatattaatgaatatatatatctagattcattaacataaatatgaatatgaaaaatgctagaatgacttacattgtgaaacggaggaagtacgttgtgaaatggaggaagtaaaacatattaggtgtacttatcagagcatttcattcatttatttcataaaagctggtcaattacgcggcacggcattttctagtcatatagtataccactaggattagaagtactgcactgtagtacttactacgagttgtagtaggtattcgactcctactgtcctacattgaactgagccactgacaacatcaagattaggcagcgtatttttcaggggctgattgatgaaaactaacggatgattttctttatcatggatttgaattaaacagtagtattttatattataagtcttaactgatatagtttaaaacaggttatctaaataacgtaataagaaagttttttaaaagaaaatgtctttttttttgcggggaaaagaaaatgtctttttagaagcgtgaaatacataatctgtgctgataacgggccttgacctgttacggagagccaccgaggcgacaaaaacaatcttctacagtaccgtagaccgtatgcttctgcatcataactactcctacacagaatcagagttcggaccaatactaaactgtcaaaactcagatctactgttgatctagatccaccagcagtagcagcagcagataaaaacaaatctcaagtcccatccgttccgactcacaccgtcagcaaaaacaagattgacagctgcaggtcgtgtcctcttcaatggagtccaaatcgatgtgtgcattgtcgcactgtcctagctccgcggtcgagaatagctgatggaaataaattccgcgcagcgatcctccaaatgctgcaaacgagtgacatattgtatcgagttcgaaaaagtttgaacagaattcagtggttagctgctgacatgtgcttggttaatgaaaacaatatggtcactgcacatttcagacggtccaagatgctactagtaacggttaagcaattccctcatgcatctcgggagacacgcacaagtccctttgtactttcaggtgtgccttttatcctaagagacaggattatctacatctaaatctggttctagagtcactaccagaaatgacagacaacatcaacagccaaacaggaaaaacgctgtgcacatgacttgcacatcactttagtgctcgttggaacagtgttcttattaatgtatagtactgtatagtattcatccccgtcttaggtaagctgttgtatcaggatattgttaaatggtcagtagcgctcattaactctgaagaaattctgaagactgaaaaggacgggatcatctctagaggtggccaaacgggcagcccggggcacggccgaacctgtagcaggcacggcccggcacggcctgctacagtaacgggccgtgccggcacggcacgagtagccgtgccgtgcttgggccgctggccgagcccgcgggccggcacggcacggcacggctactgtagcaggccggcacggcacggcccgcggcacggcacggcccgtttcgccggcggcccgtcaggcgcggacagggcgggcggcggtcgaatgggaaggcgccacgtggcactaacggctacttgaccgttcaaatttgaaaataaccgttgggaggctaaaaaattcataaaaatttcgaaaaaattccaaaaaatctcaaatttcgccctataaatagggcatgaaccccagccatttctcctcatcccacactcctcatcttgtgctctcaagtgttttaagtgctctctttgttctcaagtgtgcattttttttgattttgacaaaatttgctcaaattttgtcaaaaatcaaaattagtttcgtagttcaacagtttgatcgcagaggtttgaagagctcgcggttggaaagatgtaagtaatattcaaatttgtgtattatttgtattgtgtttgtgaattcaataaatattcgaaaatttgtttatgtcggtttaaattttcagaatggatccgaactttccataccagtcgccgtcgttcaccttgggtgatttcgaccccaactacatgtcggggtttgacggtacctccggatcggctccaactccaccatctgtggaggaggtacctgttcatacggctgtcgttgaggaggtaccggttcaggcggcgacagcttcggaaggattttccggaaccgcgagcggaagtgtttcgacacacaccggctcgaagagatcgagaacctccgttgtgtggcaaaacttcgacgagataaaggaaacatgccccgacggaagggaggtatcgaaagcccgttgtagaatatgtaggcaaattttatctgctcgttcttctggtggtacaggtcacctcaagcgccatgcggagtcgtgtgccaagaagcaaggaatacaactccggcagcagcaacttatggtaaacccagacggtacggtacgcagttgggagtacgatcccatggttgctcgggaatctcttgtccggttaatcgccaggcaagatttacccctgaactttggggagtcccctgcttttgaacattacattcagcaatctcataaccctaggtttaaagctgtgagtaggcaaacatcaactagagatttagagaatgtttatcacaaggaagcaactgcacttaaggaactgtttagtacatgtactttctctgttagtgttacttcagatatatggagtagtggagctagagaggattatcttagcgtagttgttcattttgttgatgatgattggcaattacaaaagagagttttagggcttaggttaatagatgtctcacatacaggagaaaacatagctgaaagaattagggaagtaattaatgaatttaatcttgctgataaaatatttgctgtcaccctagataatgcatctgctaattctagggctattgaaatattgcaacctttattttgtgtgtatgctcaatcttttctactccatcagcgttgtgcatgtcatataattaatttgattgttaagactggcatgaagagggtaggtgaccacatcgatgctgttcgtcaagcaatcgcgtggttaactgcttctaacccgcggattgctgaatgaaagaggttttgcaatgcggccggtgtgaaagctcgtaagtttgccaccgatgcagagcatcggtggaatgcaacgtatttaatgttaaaagttgttttaccttatagtagtttactttctgattttgttcagtcacgtggtggcccaagaaacagtgacgggtcttcagtactgaacgagcatgtttgggcaattgtccaaaaatttcaccaatttctagaaactttttatgattgtactctaactttgtcacaagtttattatccaactgctaatataattttgcacaaccttcttgaaattgctacattatttaaagaatacgaaaatgatgacgttctaactgaacctgtctttcacatgaaacaaaaatatttgaaatattggaaaaatatacctatgttgtatgcttttgcttttgttttagatcctaggtgtaaattaaggggattgtctgctattttatcacttgttggagatactataggtgtagattatagttctttttatactgaggttagacgtaaattatatgaggtttttagaagatatgaagtaaagtttcaggaagttcgccagcagagaccccctcctatccccactacaggtaagaagaagatacagtggggtaggatttggggtggatcgtcttcaagttcaatccaaggtggtggcagttcgtcggctacaagtggagacgcctcttcgcatgttgtggccgaagagttgtccggttatttggacagcgacgccatccaccacgaagcacaagatttcaacgtcctcgggtggtggaatgaccacaagataacatatcctgtgctttcaaaactagcacgggatgtgttgacggtgcccgtgtcgacggtgtcctccgaatcggccttcagtctatgcggccgaatcatcgaagaccggaggacgactctgcgcagcgaccacgtcgaaatgctactaagcgttaaagactgggagcttgctcgacaacatgcccaatacactgcggacaaccaagaattggccgcccagttcgagcaactctacctggatccagaccaaccccagtagaattttgttagaagtagttctgacctttgagctgtactcttttctttgtcatggttttctcattttcccctatgagtttttacatgacaaagtttttaacgaggcagcatgtatcattgtatcctgtaatgatataaacatcaataaaggtcattactatttttaacaaattcttttgcaatattttcgcaagtgtggatttatctttaaattatttcaaaataatgaatcacaatctatatttttaaatttttcaacacaacaaaaaaataccattttttctttttttttaacattagcaaatcattacttttttaaaaaacttttatttccattttttaaataccattttttcattttttaacattagtaaatcattacttttttttaaacattttatttctatttttattttttttccttatacatttcctttgcttttttttaaaaaaaaacactgtgcactgcaggctggcggcctgccttcacgggccgccgtgccccgaacggcccgtgggccgcaggcgtgccgtgccggcacgggcacggcccggccatccacgggccgtgcttgggccggcggctcggcacgtgggccggcacggcacggcccgtttcatcagccgtgcctaacgggccgtgccgaaacgggccgtgccggacccgtgcccgtgccgggccgggccgtgccgcccgtttggacacctataatcatctcggcgtccaaatacgctcaggcaatgaatttggccactctttttccgagccaaaccagctctggacgtgttatcagacaaccaccgtttgcaaccatgtagggagggtactattttagcgtccttttgcctgatgcttcacatcaaatgcacgtcaacatttaagccatccataaagcaatgcagttgtggtacactgcaacaaacaaccacaattttgtcttcagtgcaaaggatctgccagtgccaagaaggcaggaactcgtccgtgtactctttacttcttccttcccttaacttccatgccatttcagctatcaacctatacaggtcggtatcagataccgcatcagcatttaagggggagggatttaggactgtttagattgtagccaaaataaaccttattaaattttgttattgccaaaattttagcaggatttcttatatatttactaaagtttggcagtaaattaaatgtagtcactttttgacaactttaccaaaatttgataaggttgaaaatggcatcaaggtgaacaggcctttgtttttttgtgaggtttagtccctctcaccaaaccaccccgtaaggcctgagtttagttaccaattttttcttcaagcttccaacttttccatcacatcaaaactttcctacacacacaaacttccaacttttccatcacatcgttccaatttcaattaaacttccaattttgacgtgaattaaacacaccataagccacactgtcagaaaaacaaaggaatggcatttcggaactgtatgtacttttgtttcttcctcctctttttcccttcctttggcagggattcacccgtccaatttctcataggtaagtgcagtaatttagaccgttttggtaattgagaaacccaaattaaatttacaattttataccatgaagacaaactttactctatgacacttaaaagtttatataattaactagtggacattgtaaaaacatatcatggctagagaataccctaaaaacgtgttatgtttatggaaagatattttcgatccaattaaaagagaaactcttaaaagaaaaacaagaatgtcctatggctacaagtttctaacctaacatacgagtgaagacggattatgatatatactaacaatgtacaccttagagtgatggcattttaagagttgcataatttcaaagctttcactcaagcgctaggttagaattttgtggccccaaataggtaaaaatgtcgttcgataaattaccaattatttattatccttcaattatagcacatttataggatatttatcagtaaattacataagatttagttgtcgtggaataaaatttgtcaataagaagagagagaatgtggttagagctgtagcggtagaacagattttattccctgctcttttgccatactcgagctacatattctggtggtactttgcgaagatttaccatcttagtcctaacactaatatgtaccgaaagttaattaaaacacactcctggattagcattcgggctccggttgtgagtaatcaccagagctgatcgaggtaataatctctagtgacgtcgtcgctgaactccgagtcctcgtggcggctcatctccgagctcttcaagctgatggcgctgtccggccgcgacttcctcgacccggcgcgggccaggctaggcctcggctcgccggcggcgccgtgccgctgcctcggcgcgctctggcaccgcgcacgcgccacggacgacgccgtgtccgccatgtaccgcgggctcacgacgcgccccttcgccggcgacgccgggccgtggtaccccgccgggagcgcggcggcgagccggggcgtgttgtgcgtcgtcttcggctgcgcccgcgcatcgtgctcgtgctcctcggcctggaggtggcgcgacggcggcggcttgtagcagtagaggtgcggcgaggacagcggcaccgaccccggcgtgccgtccggcggcgggtcggcggcgtagcggctcgtgatccgggaagaccggcaccggagctggcacgtgtccatctccacgatcctcgggctgcggtcgaagttgatgtcgccgccgtcggacacccgacggcggtgcaccaccggcaacgtcaatgtctttacccgccctccttgcatttgcacgacaatcctctcctacgtacaaaagatgctcaaaaatttaacttcatctgataaaatcaaggtgatccgaggaggcatcacagtgaaaaatctcacctgttcgacggatttccgcgatgaggccatcttgatggcgcgagaggaggcttggagcctcatgagcgcttgcagcctctgcagagtcgtcgctgcttgcttcctcacaaggtagccacgtaccagagcttgtatcttgacaagcgccttgagagcgcgcaatgccctcctagcctgcatttgcggtggaaaattcaaatttttacagttgcttcgaaaagcaaatcaacagaaacaatatggaagtttttgaactatatgccatgacgactaggcttgtgtccccactgtgcagttacctaagcgtttgcagcaaatcatcactaaacaaaaatatcctaaaatgtggaatttatctatagtaggaagcagattaaacaatgtgcattgtgcaatggctagctactcaacggcaagaaactatcaaacaactgctgccattaacaacagttagtaaagtgaagtcaaatctcctgtccaatataaaaccaggagaatccataccacctactccctccgtcccattttgagtttttgcttgtaacgtttgaccactcgtcttatngaaaantgtttggagttattaattattttatttgtgacttactttattatctatagtactttaagcacaactttttattttttatatttgcaaaaaaaatttgaataagacgagtggtcaaacgttacaagcaaaaactgaaaatcccttatattgtgggacggagggagtattttcaaaaagaagaatctactaaaatcccgtgaacctatccttgcattgattgctaactgaatcgtggaaaaccaaataaaatgtcatttacgaatactaggctaatgttcaaagttcaaacacatgcagcagctgcagaacaaaactcaacattttcaggggaaaaacaagacaccaaaacagtacttgggagacgtaccaggtatcctctgaaggccttctggatcatgacggccgcctccacctcccgttgctggccgcagctgcatggccggacctgcgagagctcgccggcgacgacggcggtgaccgagggcctgcggctgccgtcagcgaaactgctcctcggcttagcgaagctccacctcctcctctccatcggcggcggcgcgacgccaccattggcgcctccggcggcgctgtgctccttccgatccctgtctcctccttccttcttgccggtgagaaccttcttgaaccacctcatcgcgcggcccatggtgaatcaacctatctgcagcacgacgaatgccacgaacagaggcgtcaaaaaaaatgtgtagagagcgtggataaaaggattcaagaacagcagctagaactattactccagtgctgaaacaatggaactaataggagacgcaaagatcaactcgggagttgttgaaagttgaaaaactgtaggcgaacaggggaaagaaggctatagtataccgctatagctcaataaaacagagacgcccacgatttgaaatgagatactccagagtccagatagcagagtggacaagaaaaaagcatggaagcaagaaagcttgggtgaaaaaagggtcttttttcgatggtgaagcagggaagaaacctttttacagagaggggctgctgccgagaacatgggaccgaacagagatggaaaccgaactgaaaaggcctcaagaagcttagctgaaaaaggagaaggcaaagacgtgtaatgtagcgccaaaaacagccgagttggtgggggagatcacagtgctcccctccagctcacgaaacgtgactccctgatgcggaaaaggaccttttcatcagtgaaacccagtacccaccagcccagccagcccagccggttgaactctcccaggcgaagcagcgagccagccggcgattcagagcggaagcagccggcgacgaagtgtgagatagcgagctatcgagccagcccagccaccgcaaccgcagcgacgctcgcaggggaaaagaaaagattccccctgcttgccccctctcgcctaagagtccgagcacaaggcaacaaaaaggctaagcgagaggcaagaccaaccgaagcaaaaaaagacccaaaccccggagggttcaccaccacgcaccgcacgagacagcaaaagaaaaaaagaaaaaccgagatggcaacaagatccaaacggcgtcgctcgcgcagatgcaatcattcgcacggacgcacctcgcctccgcgccgcgcgcgcgcgggggccgagagcccgagatagccgcgcaacaacaagtcacaagttggggggggggggggg

SEQ ID NO: 22323 - DNA, 5936 bp, Oryza sativa
gcttttggagcccgagtctggccgagaactcacgccaagatccgatccggcaaccggctaaaaacaaacgtagtacgagcagtgacgcacgcccaccccacccgcgatggtagcagctcggctaaccccttccacactccacaccagcgcaacgacggaagtgtgtgacgcggatggatgtggtagtacgctgtagcatgtactccctccctccgttcttaaaaaaaagacaaaccatgttttcgtgtccaacgtaaattaaaaagacaagtcacgtataaaatattaatcatattttatcatctaacaacaataaaaatataaattataaaaaaatttcatataagagagacagttaaaattggcaaaaaaaacccagagtttgtctcttttttttttatggagggagcacgagcgctcactgatccggtcaaataaatgtttgtgcctttgtttatcgccttgtgtagggatacggattctaggcctctggaccacagtgggaacgtccgaacgtgaattggttaaggctgtgtttagttcacgctaaaattgaaagtttagtcgaaattgtaacgatgtaataaaaaatttaaaaatttatgtgtgcaggaaagttttgatgtgataaaaaagttaaaagttcaaagaaaaattttagatctaaacacggcctaaccatcgttggcatggaagttgaaccgctcgtatactgtatacttcgactctgtaatgtgtatagtgttataactcacggcaacaagcttgagaaaatggaacaccaaatgtaaagatggcagaaaatggaacaccaaatgtaaagatggcttaattaacgggttgtgcatctgtaactccagaggtgctaagcgttaattatcaaccatgacgggaatgcacatgccttgccttgcgttgtggtccatattcccccggttcagtagtagaagatcacaaatttatttactgttcaaaatacacagccgatggcccccgctggagacgcacgcgtgacgcaagcggcgtgcacgcaagaaattttatgggaggagagtggtacggatgctgaagggaaaaatttctcatacgaattggcacgcttctcgaggctgccgctctgcgtgacgccatcctcccgtcgtggaacacggtttcgacagggcatggccgtcctttcgacagtgcagagcatgtactcctccgtagtagcagatccgtcgaaaacgaaaacggaaaaaaaaaaagaatgagtatctgttgcactgacccgtgggtcccactccatcgtatatgcttctaatcggcgtagctacagaggtggcaaaggagtagtagggtaccaagatactggtatactatggctgtgttgagatccaaagtttggatccaaagtttggatccaaacttcagtcctttttcatcacatcaacctgtcatacacacataacttttcagtcacatcatcttcaatttcaaccaaaatccaaactttgcgtgaactaaacacagcctactagtatcccaaatgggtttatatcatgtactataatgacactgttattatagacaccaacatgtgaggcaataggagagtagaagtgtgggacccacacacctacgctagtgacattatggtagaggatactcatataccccaaacactaccaagacaccaacacgaagagagtacgaacgctagtagggcgttcccagcgcgccttcatggtgttcgaactgaataatcaacaccatgttctccacacaggaaaacccgtgaagatcgatcgtgtagtcaaaactgatcgcccgttctttagcttgaaaaacctgtaaaaagcacatgcacaaatgactgggaagaggagagagagagagatagagtgtgtgtgtgtgtatgaaagctgtggaaggaatcgacagcggttgaagccaccttgacgagtgaagtcaacggggaaatggaggggctcgccggcccgatatgctgcgccgctggacatgatgactcaaagagcagccatatccacttgtccaccggaccacgctacaccgacctcattgcagagatggcatggaagtgtggaagggaggaagatgaggacggatccgtcatcgaccgcttcaatctaccacagagatgttgagcgtcgcggcgaacagcgaaggagaagagaagggtatgatgatggctgttgcaagctcaattatttgtcactcagtcaatccacaacctgctctcggttcatcgctattgggggagtgccggggggctgcctcctccgccaccagggatcgtgcctatcgcggccacccgctcgtcaccacctcagggagcttgtcgcccgtatggatcgaggcatcgctgggagagggtagaggttgtggcgcctgggagatagaggggagaggcagcaccgccaaggagcacatcgctggtgatgggttgatggaaggtgtagggatgccgacgaagtgatgaggagaggcgtagggaaagggagaggtggaaaattttatatttgtttttgaattttaggctgttgagtgtaaaaattggaccacttcataatttgaaaacatgtgatgactgagccacttgcactataagacaaatagatttaggtttaattggatccatgccatataaatatgctgatttagataaataccactataattcgtctattatatttataaccgtgatattaaaatgttacaaaatttgggccatgccactactgtcatgttttccatccatctcagtcttcatcctcatatacacataggacccatctgtcaaattcatcaacttcatttttcctcttatcttcttcttttttttcctctcagctcctcatcgtcgtctgagagaaagtacgagaagtttccgctggcgctcatctgctcctcggataccccatacgcgtgccacatgctggtccgttcgccacggcatgccacgtcgttgtcgccgttacggtatcagctcaccgagtcagccgcggaaaagcccagatccaaaaatgaggtcttgctcccgttgcgcctcgcggtcccgacgcggtgccacccatgctactggtgtaggcgtgggctccctcgttgtcggcgccactgctttcgctttgtggataggcgtgctcaggtgagggggctctctccaggttaatgcagcgatgtgtgtgcattgcgtgtggatttgttcatactgacgatgttgttgtgatagatgtgcaggggatgcgcctcgttgcctctgaagcctcaaccgcggttgggtgtgggtgcggggggtgggggctatgtctacaacaacgagagaagatgagaaaaaaaagaagaagagaggaggatggaagaagaagaatcctatgagtgtcccacatactatagatgaggaagaacacggagatggatggaaaaatgtggcgacagcggcatggttctaattttgtaaaatttcaatagcacggttacgaattggagattatagtgatgacatttatctgaatcggtttatttacaatggcatggatctaattaacccatacatttgagacttgtagcttaatattatgtggtacttgaagcctcctcaaaagtatgcattgcactgctagtggccgtagtagtatacagtagtatagcgctagtcattccctagatgccaacttttgtcgctggtggttggacggcactccgtggcaaccgcgtactctcgtacaagtgctggcgccgtgtcgatcggtttttcgaatccacgcttgcctgcacggagatcctctcgccgagagcaattatgtggtcaccgtgtagctagcgatcgagtactttgctggcgccgtggtacgtaaacaaatttactcctcatgcagtggtacacgctccgttctcgccagaacgaaatctagtcctgcacgaaccgcacgcttttggtgtgtaatggccggaggcagcagcagcagcaacgtagtagtccacactcgcgagcagagtgtaatcaaggctaaaggttaagctacggccataatggcggcgaaggcggaccaaacggcagcgtcgccgagcctgtgaggaatcccggctcgctgacactggcagggagggatcaactggacccccccttggtccccttgcaatgctgcaactgcgagccctgtgcaacgaggtagctagccatttccgtcgcagttctagacctgtggcccgctacgcgtggcattcgagtttttaaccgagagggggacccccaccacccccctgccccaagtgcagtccgcgagccccgtgccgaggctttgggccgactcgccgcgtgcgcgcgtgtgtgggcctcgacggacggtgctgcgcgctgcgtcctccaccgggtccaggcgcattgaagaggttttacggatcggtgcaaagcgtcgggctgtaaatgtgtgttggatcgctgtggtcggcgagacgattgatgcattgatagttcgatcgatacgctcgctgtggcggtgctgcggcctactgactactgtgctggtggctactggaaccatggtaagtactacaagtacgcgatgtgtttgctggtgttgcaggatgtggatttggcagtgaaattacgttgtagtagctgctagtcggggagttactcatcatgtgggtacaatggtactcctgttttgcacctgcacgggtgctcgtaccactccttggttttgggcccggccacgcgttgctgcatgttcttgcccgctggtttgatgcacaagggaggcctcgctgaagtccgagctcgaatatttcacacgaggaaaaagtacaaccaaggtccctcaacttatcataaaaccagatacaaaattatcctcaaatcataaaaccagatatctcgcgtctcttaactaatcaaaaccagtccctcgacggttttaaccccggttttagtctatgtgacagctgagtcagcgcgggacccacgtgggtcccacatgtctttcccctccttttcctcccgcggcgcgccggtgcccgcggagagacgaccccgtcctcttccccagccacgacgcgctccgcttccccgtcgtcgagacctgcttcaccatgtacaccggcggcctctcgtcgagaccgtcgccgccaccaccgcatgggcgaggtcgaagtcgcggacgcggctcgaccggttgcagcacaggcacagcacgagcgccaccacgacggccgagacgagcagcgtgacgaacgccatgggcgccctcttggacgagctcgctccgccgtctgcacacgcttgcacggccggtcggaggtcggcacgtagtagaggtactagttgccgccgaacctgccgcacgtcatcatctcttttccctcctttcccttcctcctctctctctctctctctctctctctctctctctctctctctctctcactcagttttctcctcttgcaggcccgccggtgggtcgggaggaggtcgacggggcgagcagggagaggggaaggtgcggcggctggcgacaggcgacgcgggagcaggccgccgcgccgggtggggaggagactggcggagcagaggtcgcaggcgtggagccgtggagtagggcatcggtggccgacgacggcggaggagcggcgatggcaggaatagtaccgacgggaggggccacgagtcgtgcggcggcggcggcgtgcgctggctctgactcgtgcgtgtcctcgagctcgtggcgccggcgacgaagacggcatcaggggagctagcgatagtcggcgtcgccctgcggctatatgagcccggagctcgctctaatggaagcagaggtggagctccttggatggcgcggggaggccggcgtcggcgtcgccctgtcagaggcatcacggtgcggcaacgtcgagcagtcggcttggcggcggtgggcgagcggtggcgggcaaga

SEQ ID NO: 22324 - DNA, 7582 bp, Oryza sativa
ggcctccccgcgcttcgccgccaccaccaagctgacgccgacgccggatttgtagagctcaccggccaccccgtcgcctgtcgccagccgccgaaccttctcctctccctgctggcatgcgagaggagagagagagagagagagaggagggggaggaggaagggaaaggagggaaaagagatgatgacgtggagggatatgaggggaaagaaatgtgaggccatgtaggtcccacgctaactcataatcgggatcaaaaccgtcgagggaccttctgtgacctgttttgattagttaagggatgcgaaatatctagttttgcggtttgaggataattttgtatctcgatgagaagttgagggaccttggttgtactttttccttcacatgacgagtactaagactggccctggacgataggaagtccagaatacatccttagtgtacacttgattatgggcctcgctatggattaggcatgcctggcctagcaggccactgaaaggaagcccaccgggctgacagtgcagtagttgggcttaaagcatttgtctgttaggctttttacggcatgcgagtacaacattgctcccgttttagcatttgaggttgcaagttatttgtcgttcaaccttaacccaaaagccaagactagcttattgtattttaggtcatgtttaaaattacatgatgaatttgatcattatagtggacttttaatcttcggcctgggtctatggcccaagtgacctgagactttgggtccatctctaagtcaatcgttaatatgtgtggagattatggttaccccatatctacatggcggttatattctagctggatatacggtaccaaatatagatagaatatctttatgaggactcgggttagattctaaacttgtatgtcaagaaaatacccggtatcctagtcggttacgattgtattttatctataattccatattccgttaggatagaaaatacccggtgtcctagtcggttacgattgtattttatctataattccatattccgttaggatatggactgtattttgtaaagaggactccttcccctatataaggagggtccgtgtgcctcttggggggcgattttttttttcaatttatacaatcaataacatactcggcggaatcatccccggacaggagtagggtattacttcttgaataagaatgcctgaacctgtataaaattcattgtctccaaacccatccactttcctagcttgatagccacccccttttattattgccgaaatcttgtttcgacagttggcgcgccaggtaggggtagcgtcaagttctcgccgactaagtgcgatgggtttcgtttctggcatcgacgacttcgcctttcctcccgggcaggcgttccggttcggcagcctcaacttcatcaccaacgacttcggcaagatctctctccttgactcggactcaaaccagtcggggagaaaccaggtcctcgtgccattcggtattccgaactcggccgaggcctactccaagatcatctctcccgagtcggctctaaaccactcggacgagatccaatctactcttccgcgaccggatcaagacgacgggtcctatccctcaatcctgatgaaacttcctgatgatttggccgttgtcttcactgccaagacatctcccactcgaagatctaggcgagctccggcttcggccccgatccaatctagatccagagaggttgacattatactccaacctcttgggacagtctcgacgaaagatttggatggctacctcagctcccccggcgtcagttctcgaccaaccgagatcctcgactacgacgatttcggctaccactatgaccacggcgacctcgacaacttcgacgacagttatgaggataactacacgcccctcttcttcggcgtattcatggctgacaacgaaacggaggaacatcgccaagcccgagaagcggaccaagatcgcgcacggcaagaagctgaacgtcgccgactggaggaagagcgatagcgacaggagcgagaacgactacagcgtgagcaacaagatcgcgaacgaattgcaaagaaggctgaagatcgacggcaacgctccttggaatctgggcgccgagcgagagagctcattgggcaacaagacgtcgatggaacagcggtctttcgcaccccccagcagaacgcggttacagcaatcactctcctcgacaccctcctcaaggaagacgcactcaaccaagccgatcatgttgtcaacatcttgaaccagacgaagaccatgatcgctgcctcggttccagccaactccgcaagcacccgcaccccgactggtagccgagtccctcacttccgatctcatgattatcatcagccaaccctcagtatcatcggcacaggatctagtcacaggagcaggggtcacgacgaacgatttgttcactcgcctcccgaacgtcacagggagcgccgggtcgaacggcctcgctctccacctcaccagcgtcccgtcgacctttgcaacacgatcaaccagcgccgtgcagcacgaggtcaccgccattcaccagatcgctacgacgacgacgtggacggagtagctgccttcactaatgacctgcgttgagtggattggccagccggctttaagccaactggaatcaagaagtatgacggcaccaccaaccctgagtcttggctcaccgtctatggtctcgcaatccgcgcagcaggaggagacagcaaagccatggtaaactatctacctgtggccctagcggactccgcccgatcctggctccacggactatcccgtggcacgatcggatcatgggcggaacttcgtgatcacttcatcgccaacttccagggcacctttgaacgccccggcacacagttcgatctctacaacgtcgttcagaagtctggagaatcccttcgagattacatccgacgcttttccgaacaacgcaacaagatctccgacatcactgacgacgtcatcattgcccatttaaaagggcagtcggtggttacacgcatctctttgtggctatcaacaaattctccaagtggattgaggctaaaccggtcatcacgatcacagcagataaagctagagattttttcatcaatattgtgcatcggtttggggtacctaatcggatcattactgataatggcactcaattcactagcggagcatttaaagacttttgtgaagacttcggcattaaaatttgttatgcctccatggcacaccctatgagtaacggacaagttgagcgcgctaacggcatgatactgcaagggatcaaagcacgagttttcgaccgactacgcccctatgctggcaagtgggtagatcagctgccgtccgtactttggtctttacgcactactcctagtcgggctaccggccagtcgccgttctttttggtttatggcgcagaagcaatgttgccgagtgaagtggaatttgaatcactacgatttcggaacttcaacgaggagggctatgaagagggtcgagtagacgacatcaaccgactagaagaagcccgagaagcagctttaattcagtcgactcgatatttgcaagggttgtgccgttatgataatcggaatgttcgatcgcgagcctttttagtcggcgacctggttctgaggaaaattcaaacaacacaggatcggcataaattatctcccttatgggaaggaccgttcataattgctgaagtcactcggccaggttcttatcgactaaagcgcgaagacggtactctcatcaataattcttggaatattgaacaccttcgtcgattttatgcttaggcatcttgcttgtatctttcctatttgactgcttatcaattcaatttgcttacttgatgtatcattgctctgtttgatttcttggcttagtcaatgaggactgaaagttttttaacaacttttgcgggttttaggctcaacaaggtttgacaaaaacttttaagaaatcaggagctaagttaagatatcaagcacagcataaattcatcagtattgtacaaattgtgcctccatcatcattaatcatcaaaatcattggtacattaatcagtatcagttttttcatcatcagacttatcagacctagtcggccgaaggtcgacatcttggaatctctcaactacatcagcagcaattttgtcagccgctttctgcgcatcactgatgaggtcaagagcagcttcttcgctcgtcccgtctgcaaagccatcaatggcatcaatatcaactcttggataaagggatttggtcatcgccaacgccagacttgctcccatactcccagcttctttgatgttcttgaagtaagtatctggagcgactctcagcttgtcgaagatttcggcagcatcaagtgtactcgaaccggcgttattgaaaaacattgcttaaacaattggggtagcagcgttagcaacctcatcccgggttccttcaagttttttgatcttgccaaccaggacgtcgaattgagcttgagatttgatcttgcggtctgcatcaacagattcacattaataagtcagtatatggaggatattggcttttgaggtattgattgttgataccttcaacttcctttaaagccaggtctctttgtctcgctagttctgccttgtcattttccagaatttgaacctgcttctccaactgagatatcttggcagcttgcactacattgattacggttaatcaagattgcaaagataacattatgagtcagttgagcagagtttgtgcgtaccttttgatgagccactcagttcaaaatttgattcctggagctcagcgatccgatccctcagatcatgttcattcttcctggcaagttctttcgcttcgtgcagttgattcctggtagcttcgagggttccgagatgagggactaacctctctaaggttaccgttttggcttcgttcctaagatgaatcctctgcaagacagtttaatgagcacatgaattaaatggcaaacaagatggttgaaatcaagtaccagagggcttacatttacaatacgggttgcttgaccaagtgccttcttcagtaggcataactcttcgtcctctttttgcttatttatcacgatcccttgaggctgcatgttgtcatcccaccacttgaccagaatcggagggcgtgaatcctcagccgcttgtatccggaggatttcttcttcataaccaattattggccctagtgtatccatgaatgaagatgaagcagctaaataaagtctgttggatcaaaatgatttcagatagcgtggctacctgtgatgattcccggtcggggacgagtggactttggtgtcttcacaggagatctggtttctgattcactgtcggcatccttcccgagaggactgttcgtttgagcttcaacctcgggaaccttttggcttggccctgcatccgactggtttccagtcgggggctcctggttagcaccgacttcagcttcggccgactggttcccagtcgggggctcgttgctgggttctacattgtcggttgccggctgattgtcactcggatgatcctcaacagatggcccggtttctttggaagagcttgtgtccatgttagtcgggtcagagtctttcccagacggatctatatcagatggtttcctgcaaatttgattatcagtgttattaccgcaatgggtgcgcatcaatgcaaggaagatcgttatatgagttgcacctggaagacttcctgatctttggcacaggacgactggatgttttcttccatggagtagcctgttttggtagttttttggttgtctctcggtctccaggcctcctgatggtatcatcggcttcgtcgtcacttagaaccagcttcctctttcgagaatctggctggccgactggatgtcacgcccagaaattcccgaatagaattccaagcagaatgtgtattaaaacccccgtccaggaccagccggggtacacaaacgacaatgttgacctacagatccacgtcttacaaacaatataaaggtcttacagaaatgcagcggaaaacaaaagataactggagctaatccttgacttgaactgcagcgggaacaccactccacaggcatcctcgacggcacggacgaagcctactcctcggagaacccgccatcggacacatactcgagctctgaggttggggggaaaagtagagcaagactgagtactacccactgtactcagcaagtcataccggaatagaggtatgatgcagggatttaacaagggatagctaagcaggttcatttgcataaatactggcatttataaacaggaattgaatgcgaaaacagttgtaataattaagcagtattaaacatccgctgtccaacgctgacccacgttgcgacaggcccaaccatccacctaaactatccaaattcaacagattacactagggtgagactaatcacggtgaatctggttgaccgcccgtaaccgcgggcacggctattcgaatagttttactctgatcagaggtgtacaactgtacccacaagacacagccccacgacacgtttccgtgcgccgacatgccaccacgacataccggaaagaggccgtgacaggacccttcgcataaccccctctagccaagcacaccacacctcaggtttcacccccgtccccagcgggcgacgggcagtcccctctcgtgcctaggtgaatccggaagcgacagaggccgtcgcagggcccgccccgctccatcacgcccacccttgcctggatgcgtcgactagaggaaagctacactacaagcccagccgttgcccacgctggcttgtggtaagtacgataaattcttccagggcatcccgcgaaccggtccttaactgccatgggtgcgactagcaaaaccatgcacccacagcccaccatgtggttcattttatttaaccaacaccagagcggtggtattaaaccaacattatcatataaacctatagtctaggttttaaatgagatccccaatgtgtgctagttgaactaagcatggctaagcaattcctagtccaaagtctaatcatgttataacccaagctaacaaaggagcatgatatccaaaagcatggctgtaacaataggtatccatcccatagtgatattataaaacaatgcaatatttgaaagaaaacaatagagcatttgcaatataggatcaacatgttcaagtgacaagcatgacttgccttgctctgctgcgggagggacctcggcgactatctcgaagtacaccggagcgtcggagggatcggaatctagcgacatacaaagcaaacattgcaaacaggctataagactactgaaacagagaacaaaaccatttttaatggactctacatatttttcttgatttactgagacttgaatgggattaaacggagctcggatgaattacatatgaattttagaagattcactgtgtttattactataaaagaaatccttaaataatttattgcgccatattaacca

SEQ ID NO: 22325 - DNA, 2705 bp, Oryza sativa
acgggagggagaggggaaagagcgcgggagacgcggcgcacgcgcgggcgtggctgacgtggcccgggagagacggaggcgtgggcgcggcggcggtttcggcgcggcggcgcgccgggatcggcgggaggtgggagaaagacccgacaggtgggccccacctgtcggcgaccccgagagaggaggcgggcggcggctgccaagctgggccctcggcctgcggccggcccagcaaggaggagggggaggaaggaggggaatgggccggcggcccatccgaaaagaaaaaaagagggaaaaagggagggaaaagaaaaagaaaaaggaaaaggattttccctggaattaaaaattgcactttagtgatttttaattggttaaaattatttctagagctctgaaaattccactaaaaatcctgttaatgcatttcgacatgtagaattcaagaaaaattccacatgtcaaatccgattattgtttgcattgttttcttagggttttatcctgatttcctctgcattttcttggggtcatttgtaatttacaatttggcttgggaggaaaacttcggggtgtgacactggatcagaagcacttggttgagtttcagaccgaattcttggtcctccgctcccttgtccagtttggtggcggggagatcggcgttgagcgattgggggatccgacttcattaaagcaaattcctgggtgtaatatccttcattgttaactgattcaacaagaaaacaagatcatattttgagaaaggttgcagtgtatgaatacgtaccagtggaggagggttgaatgcattgaatggcacaacgggcagcagatgtgagtagctgacaacgatggcgttcgagaagatcttatacatcctttctttcatgaccttgaagtcaagagaatctggatcttcacgatttgggtcatgcttgccgtcaaattcgaaggctgtgcgagatctttctttgattggagctaaccgacacttgataaagtgccgggtgatctgttccccttgaaggccctgttctttcagctttatcatcctctccatcagttctactgcttgtgcagcttcatctcctattggcagtgagttccatgtgtcctggtaaaccgaaggaagacaacagtactcggggagtgcgggctcaggattctgaacatagaaccagtttgcatgccagcctttgtttgaggttttgaagggcatggagaaatatttttggctcaaggttcctctgagttggaaaccagctcccccaacaacgcacggtttgcttttgtttggctggggcttggggaagaagatgcggcggaacaaagcgaaatgaggcctaatgcccagaaaagcttcgcatgcatggataaaattggcaatatgcactatggagtttgggttctagtgatgcaagctaatcccgtagaagttcagaatcccccggaagaatcttgaggttggaagagaaaatccgccatagaagaaatgagcaaataccacgatttcatgtgtatcgggggttgggaatgcctcaccaaatgccggtcgccacccgatgatttcttttgctggaagaacgccgtgcaccaccatctccttcagattatcttccgtcacatcggagggcgcccactgactctcgaagctttctctttcttccgccatgaatgtgaaatggatggtctgatttagttcgagatatggctggaaaaagatggggaatcggagcggtgaatgcggggagaaatttcgtgaagtttttgagggcggattggagcggattgatgaaccctagtttgcccggcgcagttttgcactgtagcaagaaatggggaaaatggcgagagtctcagcgggaagacgaagagacgtttttcacttcggtattattagggtatcgggagtactaatgggcctgggcctgtacagtacttcagcccagtcttatttccagcgtggcccgttgtgatccttagggacttaggcactttttgctttggcaatttgtgttcacaatgatgcgacccaatgctgttaaaatcctttttagtgcggttttataattctttaagaattaacacgatgcaaacaaaaggtgcccaacagaaaggtgttataccgtttttgaaagctttattaggctgcaaaggctgtctgggttgatttgagatgactggtttattaatagtcattcttttaacatgttatatgcttattttggttatggtaagggtcacagcctaggctattggactcattaattaccatgattttctatcttgtttggtgggttattttacgagattttttactcggattcctatcaaacatgtttatttttggaccttttgagtgtttatcactcggcccttcttgtattttttatccttgatatattcaagttgagaaggagtcggctgggtatcttagtaagtaccatgcgtgcttcgctataaaaccactcggttcttgactatatgtttagtttttcaactaatcacatagtcgggggctacacctaattaggtgcatctactcgatgcaccatgttttattttcgccctttgtagtctttgattttagcactcggcaagccggagcaagttgaattgaagcactcggattattgttttttgtttcgagaagactattttggtcaactgcgaaggtctcgggggctactgtggagatt

SEQ ID NO: 22326 - DNA, 8393 bp, Oryza sativa
cgagacaagggagggatttaaattgagatctttggcacaacttagactcaacactcaaggaacgaaattttcgcaattaggatttttgccgaattagtttttaacgtctcacgaaaagcggagcgttacagatccaccccccttacaagaatctcgaccccgagattcgacggtggaccacacacatgaaaccaaaaggggaacttcaaacttcttcttagcttcatactctgcgggtctttctttatctcgagactgcatacttgccacaaaacggtctggtactctgactcacttagcagtctcccttttactgtggctctgatcttgcatgtggaatctgttcttcatctgctctttcaacttgctcgagattcaaaacttttccctttgtttctacttgcacatggttcagacgactttgtccaataggcggtgaggtcaacgaggcagaaccactgtttggtggctttgaactttttggtccagatacgttgggaaggcttgttgttggttgaacttgctttgacttgactttctgagggcagtaccatgaatagtgtctcatctcatggcagatgaaacattcgactcatgccttataaccacgtctttttcaaggtggagggcatggtacggaattgcttccttcaaggcttttattgttgatcactatggtttgctgactagattttgactttgtcgaacgagacgtagaatcagaaccattggaatactgagattctccctgatagtactgcactggcgggtctatctcttgacgcaaaccttctcttgcttgatcctctaaggacattaccttgtgcttcttgtagtcctgcatttctttttctgcatcttctagtaacaaggctttattgaccatgtgctgaaacgttggaaagtcgtgagctaaaggtttcactcgcaatttcgcttccgttccttttagaaaccttttgatcttcttcttatcaatgtccacatcttccggggcatatcgagccaatccgttgaagcgactcaaatactcgttgatgcaagaggatccttgcttgatatttgcaaattcttccttcttcaaatcaattatgctttcagggatgtgtgctaagcgaaaggcttctgcaaactctgtccagatgatggtactagcatctgtatgggtagcacagtagttatcccaccaatttgtggtatgtcttcttaactgatgtacggcataaaagggttttcttctacggagtgcactgcaccaaatttaatttcctttccacatctttgatccagtcattggcttcaatggtctcagttgtttgggagaaccccggtgggcgagatcttaagaattcgttcagtcttgaccgacaattatcttgaaccatatggggttgatgctcttgcgtgtgttgtcgttgcataacaactatattctgaatcattccttgtaatatctgggtttgcatggccatgagtgggcaaaagtccactgttggggggctgatttctgtactgcggcatcattagttgatccagaaacaactgcatgatcacttctcaatctgttgctcatctgctaggctaattgactgatcgggaatttctgactgagctgacccttctttagaaccagggcggttaggggcacggatctgacggatagaacaatgtgccattggcttcagagtgactgagatctgactgaaccagaaatgggataagaaaagaaggaaaacaaaaacactacatcaaaacggttttcgaaatcacagaagacataggtggtgtattccagtcggtatcccaactggtctaacacctgaacacggactaccaaacaaaactcacgcacgcactagttcaccacaactcctaccgagcgggtgacggtactagggtctgcctaccaacgagggcttaactaagactcctagaggcttgagctcacctttcttcaactgggcgtgaagacaggtttactctaggataaaggtcaaaacactcgactagcttctacttttggacacgaaaagatttttcgcaaaactagagctaaaggggacaacgacaccttagctttcacaaatagtttttttttttggtactcaaataatgccatcctattaaggggtttcgatcctagggccaactaatgctctgataccatctctgtcacaccccaatccggcaccgccgcacaacggcacctgataggagcgtgtcgtaggaaaaacggcgcgaaccgcttcctacgaaaccgcgaactcggtaccagtcccaggacatagtgctggtacccacggtgacaaatatgaatcattgcaaatccttagaataaatagaggacttatttaccttaacttaggttgcagctcagacagcccgagaatgcaaccgacgacacggacgaggcgaacaccaacaacagcagctgcagcggaaccaacggtctaacacccaacaccacaggcgacggctgggatccaggacgaaaccctaatcttcgcttcacttcatcttttcttcaagacggaggaactatatatatatttatatagagcaagggtgagtacttacgtactcagcaagccaggggaacttaggtggttaatgcaggcttaaagggaaggctgttattttgcaaacagttttgttttcaagttttcaacaatctaagtgtgtgctttccacaaccagagcgagacaagtctcagcttggtcgggaggtgagaagaacaaatttatttatcaagatttgcacaactcccagagttggcttcaaatctggttttttttcccaaaccaaaccaattttccaaacttcccgataatagtggtccccaaacgaccaatcacttccagggacacccggtcccgctgtcccccggacagctaaatgcttcccaagcattaggtttcccaaaccttaacaccttttcataaaacagggtaaaacaaaaactacgctaaggaatcacctcacatccgcccgtgaccgtgggcacggctgttcgaacagtttgttaacctctgcagagggggtacactttacccacacgacattactaacccgaatcacccagcccgtgtagaatggccacgtctggtgacctaagggctttcatgacaaggcatttcgaaagccgacacaggtttaccatatgccgacgagaggggtcccagaccaacaacaggttaggtcccagaccatactgtgccaggaagcccaggggtcctccccgacaccaccccggcgaatccacatgtctctcggcatcaaggctcccccgattagcaatttactcagccaggggcgtcccattccacccgtgtggtcgcactattgtatgctcggatgtaattccaaaggaatcggtccttagatgcgaccgcacaagtattccgcccaggaatggccttgtgtcgcgagttttatttttaaaactcattttctttcacaaggcaccgacccaggcgtcgggttttccaaagcttttgcaaaccaagttttacccaagaagttactcagattttaagtttgaaggcgaccgttgatactcgcacagagtgcacgaatatcgaggcgcaactagatggttacaagggaacatgatataacaattaacaatggaaggatcagatgcaacaagttgggtaggcccaccggtctgcctttcagacggggcaaacaaattaagtgtaatcctatcaatgcataatattttgcaagcaatataattaagttcaaatataggctcagtatgttcaagggtggcttgccttgctcagggtcttcacgaagcttcacgaatcttcaagatatccacgatcgacgaaaatccggtaaccgcaactatgctcaaacaaacaaaaacctaaacaagagaccaagaaaaagaccctatttagactaaataatagtgccattaaatagatctcaattttatggaaatactggaagtggaacggggtcaatcggacgattggatcgagagatacgaattttggaagtttaattagaatttctggcgaaggaagatatttgtggaacaaggggggattgattcatgaaatttatagaaataatattctcaagaatattattgaccgtatctgacgtgcgggaccaaaggaaatgatttataaggaaaatgattcatgaaattttggaatagagaattgttttataggatcaagggaaaaaagatttattaacccacgaaataagataaaatgatttactgaatttatagaagagagaattatttgtggaatattggaaagacattctcaagattatctttgactcattgacgagtggggccaataagaaggtgagagagagagaggagcaattggagggagcaattgcggacttttagctcttcggtgtgtgagcaccggactcggaagagggagtaaaggtaaacttcctttgttttgttaggccgaggaggaaggctggccaatgggccaagcccacgagccaggggagagagggggagggggacgactgaccggctgactgggcaggggcgggcccggtcaatgccacgtgggcagccacgtcggatggggagagaaaaaggggggcgggaatggcatcggacggctcacggcgcgcggcggaatccggcgaacggcggcgagccgaagcgagcgacgaacaccggtggctagaggaggtcaaggcgaaccgattccacggctcggattggggagacgacgcgtgacgacggccggcggcggcggcgaagctcgccgggatgccgacgtggatgcgcgatgggaagggatgcggctcgcgcgctcgggtttagtggacgcggtatggggttgcggcgcacatgcggtgacgcgggacccgacggtcgccgggctgtggctcgcggcggcgccttgcggcggcgggaggggcggcacggcgcgggagcgaggaggaaggtcggcggccagggggaggggttggggaggtcgagggggggcccgaggaaggtggcagcgccgggaatcaaggataggagggaggccgacggcaggggaggcacagcggaagtggccgagcgcggcagcggcggatcgggcgacgcgacgcgagggcgagaggggaggccggcggctgaaacagcggcttggggaggtagcgagggaactcaagaacggcggtggctagaggagtcgccgagagggaggccaacggcggctctcgattgcgcacggcggcggaaacagagcacgcgcgacgcgagctacgcgagtgctgggacagcgggaaagggaggtggggagctcaccgacgggaggtaatggcgtcggcggcgagttgaggatgggaaggccgatggcggcgcatggacgagcagcggcgcacggcgacgaacgcgacgccgaggcggcatcgcgtcacggcgggcgtgccggggaagggaacggaggcgtgcggtggcgcccttggtcgcggcggtggcattcttggccgcggcgaccaagaaggcggcgacgctccggggttggccgcgcgacggcgaccgaggttgagggaggaggcggcagaggacggaccgtgcgacggcgagatgtcgccggacatagagctcgacgcgacggcgaggagttcccatggcggcagggctccgccgcttggggggggaacgaagcaagggagggaggaagcacggggggtgggttttatagagacggagtgggagcggcaaggtcggttcgaggtggccgcggttttctcggcgctcggctggtgttcatgggcgccgcgagaacgagctacggcgaggatgcaaagggtggtggaggcggtggatcgtgtggtggaaatcgaaccgcgagcacgggaggattggcgcggggcgagcgggtgcggtcaaggtgggggcggcgaggcgctgcagcggcgtcagcggctctgccttttgaacaagaagccaaggagtggaggcagggagctcgctacccgggaggggaaaaagcgaaaggaggaggaggaaagggagctttgctccttccggtttgggaggaaagggatgagagcgagccgcgcctcacggttttggatgcatgcggcatggggcgccgggcccgggaggatgacgccggcgacgactgcaaaaggacggggacggtttgaaggcaagcgcggacacggtggtcgtcggggcaggcgacgaccgagggtggcgatggcggcacccaggcggtcggccactcgcacgggtgcgcgggaatcgaaggaggcagccggaattttgggcggcgtcggcgggaagcgacgccgagagagagagagagagagagggggggcgctctctgagggagtcacgtgcggcgcacgtgcgatggagaggctggcgaaagaagaggatgggccgaggatggtttcggcccgagcgagttggagggaggcaaaatagacttttactggaaggtttgatttggagagaagtttgatgtggagattgaatttgaatttaatttgtgtatttgtacacgagggttcaaggtggatccaagggaggggtcaaggaagggcttcaaaagcgggaattttggtattcttgggatggatttatatttggcggcacgaaggattatttcagaggatttcaaaaagggaagatcattattcaaaaatggaacaagggagatagcggtagaatgccatggatagatagatagacagaaaggtaggttgataggtagagggacggatagacagatggattgacagatggatagataaacagatagataggtatagtagatagatagatggatcgatcgatagatagatagatcgagactccgagagagatgggatggaagagaaggaagaggtggatcggaaaaagaaagaaggaatccaacctatgagggaggttaaatagactttcacagagagatttaattgggagattttagagttggagtctagattcgaatttcgaggttgatactcggtctcgggagaataggaaggagtcaaggaagggaacaatattcggagacgagtcaaaaggggatggataattcagagaaagagagtgtaacttgggagtttgagtttgactattcaacgagatatgagggtaaggattttggagagaagtctgaatagaagggttcggacattcgacaaagttcacggatggggttccaggaggggattccgaatagaaggaatcgagcttcgggactacattgggatggtaattttgaggagacgatctttgataacagggtatcgagacaagggagggatttaaattgagatctttggcacaacttagactcaacactcaaggaacgaaattttcgcaattaggatttttgccgaattagtttttaacgtctcacgaaaagcggagcgttacacggttattgcgataactatatgattgtcgtgaaaaaccgtacggttaccacaaagattatcgcggattcaagaaccgagaagatcaccgtacgtgataatcatgataaccgcgcaagttttacaaaccatgctttatagtccatagcatcttcttctctcattttgctttctccctgatatattgttagagcagctttgttagagtatagataactctattggattcaattgttatgataggatatgattagttgtcattgaatctatcagggctccttaagatctaaaccatgtactccctcaaggttcgatacattaatccacaaaatattacaacacatcttctatccatacacgctttcacatatgatcgtttggaccattgaaggaaaattgaaatgacagtagttgtggagtttagtgctaagaaggaaaacaagggaatggagcttgttaactcgccatgggcagagagagaaaaggcaaacaaaagcaccaaagaggatgaatgggctggttcggctgcgatacagccgtctggaaacaatgctccgtgtaagcaaccgtggcaacaaaactgtgttttagtgtctacaccttgcagctgaataggcccaatcataacatagggaagttttgtactaaaggtttatgtgaacaagcttaggcattgatatatcgcctcaacccagggccgtgcacatgggcgtgcgacccgtgcgaccgtacagggcctctaaatttccagggcctcaaaaaatcagcccaaccggagaaggcccatgtattcgtgtgaggccagagcgccagaacccggtacgagttcgcgctttctccgcgcggcaatttcgcgtgcatggtgctttgtattctcgactccgagctccgaggccccacggtgttttgcattctctttcgttttcgtatctgtgacttattcagttcgtctcgagtctcgacgtctcatctcctccgagtaccaggctgccagccggctcatccaatt

SEQ ID NO: 22327 - DNA, 8396 bp, Oryza sativa
agttctctttgattcaggtgcctcgcattctttcatttccaaaagatttgctgggacacatggattatcggtagtggaacttaaaataccgatgcaggttcatacccctggaaatgatatgaggacagcacactactgtccctcggtgactatagagatcaagagatcaccgtttctatccaacctcatccttctcgaatctaaagacctagatgtcattctcggaatggattggttgaccagaaacaagggagtgattgactgcgcaagccgcaccatcaccctaaccaacgacaaaggggagaagatcaccttccgttccccagcgtcgcagaagtccgtagcgagtctgaagcaggctgctattgagggtcagacagaaacagtggagaaaagttctaggaagttggaggatattcctatagtacaagagtatcctgaggtgttcccagaagacctcactacaatgccaccgaagagagaaatcgagttccggatcgatttggcacccgggactgctccaatttacaagaggccgtacagaatggcagctaatgagctagcagaggtcaagaagcaggttgacgaacagctgcagaaagggtacatccgaccgagtacttcaccttggggtgctccggtgatctttgtggagaagaaagacaagaccaagaggatgtgcgtggattatcgcgcccttaatgaggtcacaatcaagaacaaatatccgttgcccagaattgatgacctgtttgatcagctaaaaggagctaaggtgttttccaagatagacctgcgatcaggctatcatcagttgagaattcgggaagaggatattcccaagacagccttcatcactcggtatgggttgtttgagtgcacggttatgtcatttggactcaccaatgcaccggctttcttcatgaacttgatgaacaaagtgtttatggagtttcttgacaagtttgtcgtggtattcattgacgacatacttatttattcaaaatcagaagaggaacatgagcaacatcttcgtctggtacttgagaaattgaaggagcaccagttatatgccaagtttagcaagtgtaacttctggttatcggaggtcaaatttctgggtcacgtcatttctgctcaaggcgtggcagtggatccatcaaatgtggaatcagttacaaagtggaccccaccaaagacagtttctcagatccggagttttcttggacttgcgggctattaccgtcagttcatcgaaaatttctctaagattgccaggcccatgacacagttgctaaagaaagatgaaaaattcaaatggtcagctgagtgcaaccaaagttttgaagaactcaagaagaagttagtctccgcaccagttctaattctgccagatcagacaaaagacttccaagtctactgtgatgcatctcgccaagggttgggatgtgtgttgatgcaagaaggcagagtggtcgcatacgcttcgcgacagttgcgtccacacgagaccaattatcccactcatgaccttgagttggcagctgtggttcatgctctgaaaatctggcggcactatcttattggcaaccgctgtgaagtttacactgatcataagagcctgaagtacatcttcacccagcccgacctaaatctccggcaacgaagatggctggagttgattaaagattatgacatggggatacactatcatccaggcaaagcaaatgtggtagcagatgctctgagcagaaagagctattgcaatgcagtatgtaccgaaggcatgtgtgacaaattgcagcaagatcttgagcacctaaatttgggcatcgtagaacacgggtacgtagctgccctagaggcccggcctacgctcgtggatcaagtcagagcagctcaggtaaatgatcctgaaatagctgagctaaaaaagaatatgagggtcggaaaagcccgagatttccatgaggatgagcatggcacaatctggttgggagaaagattgtgtgtgcctgacgacaaagaactgaaggatctcatactcacagaagctcatcaaactcagtattcaattcatcccggcagtacaaaaatgtaccaggacctcaaagagaaattctggtgggtcagcatgagaagagagatagccgagttcgtcgcactctgcgatgtttgtcagcgagtcaaagcagaacatcagaggcccgcaggactgctacaaccccttcagatcccggaatggaaatgggaagaaatcggaatggatttcataacaggtttgcccagaacatcgtcggggcacgattcaatctgggtggtcgtggatcgactcaccaaagttgctcattttattccagtacacaccacctatactgggaaaaggttggcagagctttatctttcaagaatcatgtgtttgcatggggtacctaagaagattgtatctgatcgaggaagccaattcacttcaaaattttggcagaaactgcaagaagaattggggactcgtttgaatttcagcacggcttatcatccgcaaactgatggtcagaccgaaagggtcaatcagatcttggaagatatgttgagagcttgtgcacttgattttggtggagcctgggataaaagtctgccttatgcggaattctcttacaacaacagttatcaggctagtttgcaaatggcaccgtttgaagcattgtatggccggaagtgtcgtacgccactcttctgggatcaaacaggtgagcgccaactgtttgggacagaagtgttaaccgaagcagaggagaaagtcaggaccgtcagggaaagactgcgaatcgcccagtctcggcaaaagagttatgctgataaccgccgaagagagcttactttcgaagcaggggattatgtgtaccttcgtgtcactccgcttcggggagtacaccgcttccaaaccaaaggcaagttggcaccacgctttgtgggaccatacaggatcttggaacgcagaggtgaagtcgcttaccagcttgagctcccatctaatatggttggtatccacgatgtgttccatgtatctcaattgaagaagtgtttgagggtacctgaggaacaagctagctcagagcacattgacatccaggaagatctgacttatgtggagaagccgattcgtatcctcgagaccagtgagagaaggaccagaaacaaggtgatcaggttttgcaaagttcagtggagccaccactcggaagaagaagccacctgggaaagagaagatgaattgaaggccgcccatccgcacctcttcgccagctcttctgaatctcggggtcgagattctgtttaaggggggtaggtttgtcacgccctgaagttcccctcccttgctctaaattcataaaataaatcgtccgaagaaattgtttaatttaacctagagagaaaccctaaagtaataaatgcaaataataatcggaatcggcatgtggaatttttcttggattctacatgtcgaaatatgctaacaggatttttagtggaattttcagagccttggaaataattttaaccaattaaaaatcactaaagtgcaaattttaattccagggaaaatccttttcctttttctttttcttttccctccctttttccctctttttttcttttcggatgggccgccggcccattcccctccttcctccccctcctccttgctgggccggccgcaggccgagggcccagcttggcagccgccgcccgcctcctctctcggggtcgccgacaggtggggcccacctgtcgggtctttcccccacctcccgccgatcccggcgcgccgccgcgccgaaaccgccgccgcgcccacgcctccgtctctcccgggccacgtcggccacgcccgcgcgtgcgccgcgtctcccgcgccctttcccctctccctcccgttcgcgcccgcgcccgagatggccgggattcgaaaaccgaatcccgcctctctctcctccccactcccccacgtcggccgtcgaatcccgccgctcccggccacgtccggctccctctccccctttttaagcatcgccgtcctcccctctcgctttttccccatttcgccgacccctcccgtgctccccatcgtccccgcgccgtgcaaccacccaccgccgcttcttcccgctactccggccgccgctagccgtcgctaggctcgccgccgtcttgcgccgtcgccgccgttcgattcgcgtggccgagatccaccccgtccacccctcctccgtcgaagttcatcgccggagccctcatcccctcgcgcacgggtgagcaccacctccaccgccgccttcggccatggtttccgatcgccgtggttcatctccctctctctaacccctcccaaccttttctctaggtcctcccggaacccgtcgccgtcatcctcccgtctctcgtcgttgccgttcgccgtcgctcctccctcgcgccggccgagcccctcggtgaggatcggtctccctctcttcctctctctccctttgccgcgccgcccgccgcgtagcgccgccgctagggtcgctcgcgccgccgcttcggccgccgccgccgtctttgcgccgtccgccgccgcctcccgtcgccggttgccgtcgctggcaaccgtgcgcgcgcgccgccgccctcgccataaccggccggccggcttgaagccgagccgagccaccagccgcgccccctcccgccttgtgccactgtcagtggggcccatgtgccggcgcccctccctctctctcttgagccgctgcccagtgggcccacctgccagccgccccctccctctccccttgtgccgctgacccgcgggtcccgcgtgtcggcgccacccctccttgtgctgacgtcagccctggggtgaattattgcgcaataaatacattaaggcttttctttaatagtaaaaacacagagaatcttctaaaaatcataactaattcatccgagctccgattaagtccattcaagtctcagtaaattcataaaaatgtgtagaatccattaaaaatggttttgtttcctgtttcagtagtcttatagcatgttttgcttgtgtgctttgtttgtcgcgtagatttcgcccgtttcgtcgattcgtggtttctcgaagacgttgctgtggtctcatcagtgcgagagcaaggcaagtcatacattgcaattgatcatattgtacctaatttacaaatgtcccgcatttctattaaatattgcattgttttacaatatcatgtgggatgggtcctattactcagctatatgttgtttcccttatgccattgataacttgggtattaaaatgactagatgttggtttaggagatgcttagtcatgcttagttcaactagtgcacaaaaggggaccacattaaagcatagacttgattattggtaaaagctttggattagtgccaccgcattggtgttggctaattaaaatacactacatggtgggctgtgggtgcatggttttgctagacgtgcccatggcgattaaggaccggttcgcgggatgccctggaagaatttatcgtacttaccacaagccagcgtgggcaacggctgggcttgtagtgtagcttttctctagccgacgtacccaggcgagggtgggcgtgatggagttgggtcggccggggtgtccggttgatcggctgccggattcaccgcggcacgaaaggggggctgcccgttgcctgctggggacgggggcgaaccctaaggtgtggtgcgatcggttagagggggttatgcgaagggtcctgtcacggcctctttccggtatgtcgtggtggcatgtcggcgcacgggaacgtgtcgtggggctgtgtcttgtgggtacagttgtacacctctgatcagagtaaaactattcgaatagccgtgcccgcggttatgggcggtcgaccagattcaccgtgattagtttcacccctagtttagcttaatgaactggctagttcaggtggtggtttgggcctgttgcaacgtggtgtaacgttggacagtgattggttaatatggattaattactacaactgttttactgctttcaactactgctttgaaatgccggctttatgcaaaagaacctttagcctcccttggatatatcttgcatcatacctcctcttccggtgtgacttgctgagtaccgtgggtagtactcagtcttgctctcttttcccccacaccagagttgaagtccttctcagttgaagatgtctcgaagaggttggtttcgtcgctgccgtcaaggattgcctgtggaatggagtcgcccgctgcaggagtcaagtcttcaggcttagctcgcttttctctttttccgctgcatttgtaatcttttatatttttgtaagacgtggatctgtatgtcaacaattgtcgtttgtgtaccctggctggtcctggacaggggtttaatgcacattcagcttagaaattctggttcgtgaatttctgggcgtgacaagttggtatcagagccgaccttgaccgtaggacaagccaaatggaaaaacctaagagccctctgaatccttttcattgcatatattctttgcaattggatttgtttcgggaaaaatttggggttttgcctctttggtttgtgggaaaaatcttggtcgttcattcggatcggatccttaaaattagctcggtctagggttttagaaaaattttatttggagttatatttgacagtcagttggggatttatcgggtgatatgcattaggtcgtgtctatgttcgatggggcaattttatgcgcatcattttccatgcaactagtttatgcattaagctatggtttagtcagtcgcattagtgtctttatccgggttcatgaaaaatgttctatgcataaaaatcatcatgctcggcaagttacttgagtcattcgttgctttatttaatttggttttgagcatgtgttggttcctatccctctgtactctttagatgtcagacctattctccgatcgcaagcgccgctccaagcttcagagtcgccgcccttagctttatcgtcttcttagtctgtttgcgtgctagtttttggtgtttaggtttgttgcttgtgggttagtcggcggtcgatatcatgtgtgagtggtatgacagcctttattaggagttgtgtgcctctttttcagtgttttaatcaagattaagataatggcacttaatttcataagaaagattagtttccgagccatctgttttcttcctttctcttatttctacctatcccctccagatggtgaagacaaggaatgatccccgtgactccagcgacgccaggggcagcgaagagcagaccgatggagctcatgtcagtagtgcatctggcagcagaccatctccaccgcccgaaaacccaacagtcactcaaatgatgacaatgatgatgcaacagatgcagcaacattaccatcagatgttgcagcaggcgcaacagaaccagcagtttggtcctccaccatcacacgtgtccaaactgttagactttcttcgtatccagccacccactttctcaagcaccaccaacccaatggaggccaatgactggctccgtgctattgagaagaagctgaacctactgcaatgcaacgaccaagagaaagttgcttttgctacacaccagttgcaaggtcccgcttctgcctggtgggataactacgtggcgacccgtctagatgcaacggaggttacttgggcagagttttgtcaaagcttcaggaaggcacagattcctgaagggattatggcacaacagaagagagagttccgtgcgctctagcaaggaaccatgtcagttacagagtacctgcacgagttcaaccgccttgcgcgctacgctcctgacgacgtgcgcaccgatgctgagaagcaggagaagtttttgtttgggctcgacgatgaattgaccaaccagctaatctccggagtctatgaggactttgagaagcttgtggacaaggctatccgccaggaagagcaacgcaacaaaatagaccgaaaaagaaagacagctcagatcagctttcctcaggggaacaatcagaagcctcgtttcatgacgggacagctaggtgggccttccaccctgatcgtctgtcagcaccatccctatcacccgagtaacttcgacaacgactacaacggtggcagtcacaacaacagtaagcagcacaaccacaactcgactccacccccactaatggcaccagctcagtcagatccgccagctgtgtcagctcagtcagaacaacccaagaagggggctgtaggaaagccaggacactgcttcaactgtggcaagcacggccactttgctggcaagtgt

SEQ ID NO: 22328 - DNA, 20799 bp, Oryza sativa
  unsure (1)..(20799): unsure at all n locations
gtcgacaagattcaccgtgattagtttcacccctagtttagcttaatgaactggctagttcaggtggtggtttgggcctgttgcaacgtggtgtaacgttggacagtgattggttaatatggattaattactacaactgttttactgctttcaactactgctttgaaatgccggctttatgcaaaagaacctttagcctcccttggatatatcttgcatcatacctcctcttccggtgtgacttgctgagtaccgtgggtagtactcagtcttgctctcttttcccccacaccagagttgaagtccttctcagttgaagatgtctcgaagaggttggtttcgtcgctgccgtcaaggattgcctgtggaatggagtcgcccgctgcaggagtcaagtcttcaggcttagctcgcttttctctttttccgctgcatttgtaatcttttatatttttgtaagacgtggatctgtatgtcaacaattgtcgtttgtgtaccctggctggtcctggacaggggtttaatgcacattcagcttagaaattctggttcgtgaatttctgggcgtgacacaccagcacctccacctccacctccattaggggcagcagcagcacctacacctgcacctccccttccccttccccttccccttgtagttccacttgcactagcactaagtaatgcaaaaaattagcaatgacaaaataaacaaaatcagcattggattagttaaaaacaaggaaaaatgctagtagcaatgaatgattcacactgatgtgggtgcatcacttgggtcattgatcccctctcctgttccactttgtgaagatgagagcttcctcttttgacttgctgtgagacctccctggcaatgcttcgctgtatggccaagctcatgacattcactgcattttttccttttactagtgctagcctcatcagaagctcttatcctagccactcttggtcttccaggtttccttctcaacctaggcttcttgattttatagcntagatcaacatgtgcccactcatccttagatgccattggattgaactgtcctgcataagccattttcaacatctctatagagaagcacttatccacaaaatcatccatttgtacctccctattaagctttgcaatgaaagccaaagcatgatcacaaggctttccactcacttgccaagccctacaagtacatgtcctttccttcaaatttactgcatgtgtaatggtgcccacagttacttcaacagttccagacccacatatcaatacctcatggtttttgagggtcttgctttttgcattcagagtgttagtaatagatgggattatcctttcatccattttacaagcaagcttggctcttgacacaaacttgctaatgatcatctttcttatggtgtcatgcaagtcaacaatctgacgatccttgatttttgagacccaactattgaaacattcagagaggttgttattgatgtaatctaccttgcactcctcataaaacttgcttctgctccaaatgtatggatgattgtcatctaaccaggttagggcttcagggcacctctcctttatcttgtccatgtggtaggtgaacttcacatttgtgaagctcttagcagctgcccacatattttgggcaaacagaggaccatggtacttcttcttcatgttcttccacaagtgtctcatacattccctatgttccactcctggatatacatcatctacagccccctctattcctttgcctgcatctgtactaataaccaaacctacaatggtacaaaattgtagttagcaactggaataatatgcaaatgcaacatgaaggatgaaagatgaaagatgtaagaaaaaatacgaacctgtaggggtaccaatagcttccttcaaattttggacaaaccaagtccaactttccttagactctgtctcaatcactccgtaagcgacaggaaatagcctgttattaccatctattgcaacagcggatgccaactgccctctagaccttcctgtcaagtgagtggagtccatggcaatgtatggcctgcatccttgcaagaacccatcaatgcatagtttgagagctactaagaacctcctaaagcacacatcaccattattctcttcagtgtccaacttaactacactgcctggcactgatctcagaagctcatcttgataagtaggcaacaagttatagctgtcatcccacctcacatttatcatgtcaagtgctctctccttgcctccgaaaacccttaaataaggtatattcactgagtatttcttcttcagctcttccttcagtttcttaggtcctaatgaggggtcatcccgcagcaactcaactactcggtcagctacccatttatttgaagccattgtttcaccgcaattattaaaagaaccacaagtgtgctttggtccacttatcttaacctgcagccatagagtgcatagacaaaattcatgttaagtaaggacaaggctgaaattacttaatgcagaaaagaactaaaaaaatacaaatctgaacttaccttacatccaatgtacttgggactagtagatgcaaaaacagccacttgcaaccttgatccgcactcttgcatttggctctaaatcttttcttgtctttcttgataatgtcaaaagcatgatcattcaagatacaatgatgtgtaactgctgacttgcattgattcacatctgggaacaccacaccaacatcaatacatggatcatgaacatcatatgcaaagacagggacatcatcgtcgtcatcctcatcaactatttcttgatcaggatcaaactcagggtcagagcagtcaaattcagaatcaaatgattccgccaagtcagagtcatagctgctatcactctgtgccacaagtgattcggtgtcagagtatatgccctcatcaacaactccgactgcctcctcatcacatggacccctttttttggatttcttggctctctcattagtggctgtcacatttgtggctctctcattagtggctatcacatttgtggctctctcatttgtggctatctcatttgtggctatctcaatagtggctctctcattagtagctatctcacttatggctgccctattcctcactgaaggatgatacctacgttttgtgggtgaaaattgcaatggaccatcaaaatcaattatttgggcatcaatgcatacaacccccttctctaggttcagctgaaaccaatctagcgattggtcatctaatgtaatctcaacagagtcaccatccatagaacaccacaaagtcatgtattgcttagaaccccatatgaagtgttcagctatgaaatttactaattctagcaagccatagttatgcatgtcaacaagttgggttggcgatgttttaccctccatataggtctttgacccttcatctagcaagctgaaaaacgacccaactctaacaactaatttcaactcattgtgatttgtcctacaaatcatagcaacaaaaatatacatttagctaattgttgcatgttacctgtcgatgatatgggcccgggggtatcaggtttagagggaggaggccgccccccgataccacgtggccctcccccgaggggagtcaggcccaaggtggggtggcggccactccttcctcaaagactagtcggaggaggctgccccccgattccacgtggccactccttccccaaagactagtcggaggaggctgcccccccgatgccacgtggccctcccccgaggggagtcaggcccgaggtagggtggcggccactccttcccagagactggatggaggaggctgccctccaatgccacgtggccctcccccgaggggggtcgggcccgaggtagggcggcggccactccctggccgagactagagggagaaggccgccccaagtgccacgtggctccccccagaggggggatcgggcccgagttcgggcggcgaccgccccctcccgtgactagggttcgggctcccccgaccccctctctacgtcaccacgtacagtgggttaggtgtccgcctccaggtgcccacctacccgcatttatggcgtcctgagcggtcgcgccacaccgcatttaatgcggtgtgcagtcgcactcaaccggtctgtgaccggtcgaatgactgatgggacccaagatgtcaggcgcaccatcgcgtgtgtcaggcgacgtgcagcccgacatatcccatcaaataatgatggtgagaggttctcatcctcttatcccaaccggagtcggtcctcccgctctggtcaaagcaaggctcccgtttcccggtgtaataggagctcagaagtcttcacccattaaatggtgactgacaggggcaccccccgtgtcaggcggcaagatttgacaggccccatcatcaagacgacgtgtgcttggcttcccaagtcaggagacaagacatgcatttaatgcaaagattataatacttctccaccggagctaggttaggttgttgggcccatgtggtaaccccttgaggtataaaaggaggtccaggcctagtggtggagggggggacttccgagcgaactggcgcttgggtctcgcaaccccaagcactggtgttctacattcaatcaatcatgcataggagtagggttttacgcttcttagtggcccgaacctgtataaacctctttggtctgatcgtcttggagtggcctaaccccatcaagaccacacagctccgctcaccaagccctcgaatctcacccgctgcccccggccgaactcacaaaggggggcctcacggttccctggtggaggagttcattctccgacacctctggcacgccaggtaggggacgtgttgtgatttttgaggttctttcgagcgccggcgtggtgagtgtcgcaccgccgctacgggggaaggcgcagcatcctcaggagtgtcgcgccaccccaggcagggggcaaggccccccacatccccaccaggtaagcttggctaccatgtctttgtggcgagtcttcggaatgtccgaggacccccaaagctccagccctgcctcaccgagaagtacgatgatggcgccgacccctccgagtccctccagatctgcacggcgatcatagaggcggcggagggtggcgaccgggtcatggcgaacgtcttctccttggccctcaggggccaagcgcggggttggtccatgaacctgctgcagcctcggttcactcctgggaaacatttcacaggggtaaaaaggtagttcactaaatcaaaaattctttattttcttccataaattcagtcccactaacctccatccaaaacaggggcaaacatctctttcagttcaaaaaaaaagtgggggcaaaaacgaaaaccccaaaaagtaggggcaaaatcaatattagagatgaaaatgggggcaaaaacgaaattatcccttattttagctatatttggtacttgatttaggtctcacttagagcattgtacagggcatacaaatttgacggcacagccctgcctcaaccaagctgggactctaacatatgatggacgccaatgctaacggagcattaatggtagtacatgagagtaacttatatagtatatgatccaaaatataagtccctttagccttatatattcccccgttctaaaataatttcattttttatctatcccatacatatcaatacaaaaccccaaaagtctatgatactcccgttttatcaaatttcaatgtaatcatttctctctttatatactcaaaatatatttatactctatttttataaactctgacgtaataatgtctttaaaaaaataaacttattatagggcaaatggaatggaagggtctaaaacgaagttattatgagagggagggagtaattactaccacatatattatgagttataggttaaagataacctgattttgagacatcatctttttttttcttctttgccgagtatatgtgaaagtcaataatgtcgctagttactcctaaattttctaaaagcaacttaaactttagttatgatgaattattggcttggggatattgacttcaaatctaatattgaacgggttccacttaccttttataagaacaatgcgatgcgtgacggtgtgaggctttgtaagatattctatttgttactgacgttgtgtactacgcagtcgtccagaagtcagatgctcaagtcatacgtatagcatttcgcctttatatggataagtatatccaacctagtcagacatagatagggtaacaagcagagtaaaattcatctggatacggtttagaattgagatcctcggcagcgcgcccgtgcggaagtgcatcttgcgcggaaaccatcgtgtctctcggatttgtacgacaccggtgcgtgtcgaatttgtactacggctcagcgggtttccctgagtttcaccgccccaaaaccgcgagcatccgccgttgcacgagccgttggccgttgcgtctccgccgcgtgcgcatgggcgtggctcatctggggaagcggatcctctgactttgggttgcaaagtcacaggcgtgcagttctgctctatccaccgttcgttatcatccgacgatccaaaatcgtccccccagttcctttcttcttcctctgtttccttgctcctatttctgcgtagcttcacggttggccgccatggctgtcactcttggccaacaaagcacacaatttctgccgctcaaaaggtgtagacatgttgttgaaaattttcttttaaggctacagcttctgtcttagtcagattgttgttgcaacaagaaaaatggcattcgattattgttgaagcttctccctttgcatgatcttacccaaagtctaagaccactgaatttgaacatcactttctccagtgaaggactatcatcagtacttaacgagctgacatttcaacgacgcacctggtatcgtgtccccatatcatcaccaagctctattcgcgcaatgatgcggggatgcgtggggtacgaggctaaaagattgccctatagcaagccccttttcgttttctgcatcggccatgatgcgattgaagtttgttgaaagccgacaatggcaaccggccatgaagctatgcaacgaagggagcaaggaacggaggaagaagaaagaaattaggagaatgagtttaaaccgtctgatgataatggacggtggatagaatggaacttcacgctcatgactttgatatgcaaagtcagaggatccgcgtccgctcatctgtcatctcgttcttctcacgtcaggaatctccagagggacccacccggccatccacgtgactagttgtacattttcttaattcccttatcctttgtctgccgtacgccgctgattttttgttacccctaaaaagtctcctttccaagttctatttggactgagactgttacgtgggccccatcgacatggttggcttggaagtacacttccgatcgtataatgaacgtcaacgtgtgcaataaaagatatcttgttgattttgttttggagtgttttcttgttaattggatcacgccgcaccgcacttgtccgtgttggcctcccaaaaatccgttataaattatcttttatctttagaaaaatcactcacctcaaaagataatttataaccaaaagaccaaaaaccaatcgcacaattgtcaagccaaccaccccagatctacttacgacaaacacccaatccaggccgtccattcccaaacaagagcggatctgagccgtacaaatcctgagtgcggatccgcttatggcgcaaaggcgaagggtactcgaggctaccggttaaaacgcccaagtcagtggctctcgtcctcctttctcctacgcggccggagagaggaggggggaagagaggatctcgcagagcgccatagcctcggatccagaagcggaattcggtggaggtctcgggcacctggatcgatcggaggaagggaaggcggagcagcggtgatggggaaggcggcggcggtggggacggcggtggtggtggccgcggcggtcggggtggcggtggtgctggcgcggaggcggaggaggagggacctggagctggtggagggagccgcggcggagaggaagaggaaggtggcggcggtgatcgaggacgtggagcacgcgctgtcgaccccgacggcgctgctgcggggcatctcggacgccatggtcaccgagatggagcgaggcctgcgcggggacagccacgccatggttaagatgctcatcacctacgtcgacaacctccccaccgggtaagcgcctcgattccgatctgatgtctgattcctttcgtttttcgtattatgtttcctttcgtttttagtattatgggtttggaactttgtgatctaaaaagtttggaattgggaaaggtctcgtattgatgcgaatcgttcgggaacaaatctagtagtgacgcgcgtaaccgtgggaatttatctccgtgctctgattaggaccgactgaccttttgatgggatggtaggaaatgtgcgaattctttttatgatgtttgtacgaaaatcagattcccccgaaaattgcgcctagtggtgatccgaagagaatggaactataatctcccatttgatcttcatgtggttttggtgtctcgtattcgtgaattgggattttttttgtacgttccgatcgaagctagatcaatcctagctttgccaaacaatataagccatttgttataactgaaataagttatgtaaccacaaggaaacgcttgctctcggactctgctgaggagagccaaggcaaattggctcataccagtgattgaaggaaaaatgtggagtcgtgggcatctgaaattgcttctcatgcaccaggacgcaggatttcggtgatgggggtacagagttactaaagcatcatgcaatgagaaaaaaaatgaagtgctagtatgtgttattaacacaaacataaatcattgttatagaaaaaaatataaagtagccaagagaaaatgataatactcttgacaaggatgatttttgtgcttgaaaatgattgttttaatttagctgattgtgcatacacatactatacatacatgttatagattatagatcacatttgtttgctaaaacaatttgcggggtaccggattacgaactgtacccctcatgtccttgtgtaaacaggattctacatagaactcaaacaagatagataaattggcctatctaagctaggaaagataggtctcccgtcaacatatcctatcgttctcagatgatcttcggttttgtgatctatagtagatcgtccatttgttcctaatttggctctttaggatttctgattatgatatgtgattaattaatttgatcgtccatttgttcctactttggctctttaggatttctgattatgatatgtgattaattaatttcttgttggtttgatttgttaaggcttcagtgacaggtaattaactaatgtatggcagagagtttctttgcattgtggtttccttgttagcaatctgaccaattagatccatcagtcgagcttatctcatggtatagttggtctggtaataagtttctctgtaacctccacatcgttaagctaaatgtggcaggcacatcctgaaggaagtttcttaaatataatgattcattcttattctatcggatccttctaccagtctgttagaactcactcacccataagcatacaatgtttcctgctgccttcttccaaaagtagtaatttcattctttgatcataatgatttccctttgcagaaatgaacaggggttgttttatgcattggatcttggaggaaccaacttccgcgtcctgcgagtccaactcggtggcaaggagaaacgtgtcgtccaacaacagtacgaggaagtctcaattccaccacatctgatggttggaacttccatggtaagcatttgctgcttgattttaaatttcttggagctgtacattccatgcttgtcttatgtattttctgactattaatgcaggaactgtttgattttattgcttctgcattgtcaaaatttgttgatactgaaggtgatgatttccacctcccagaagggagacagagagagctgggcttcaccttttccttcccagtgagccagacatcaatatcgtcaggaacgctcatcaagtggacaaagggtttctccatcaatgacgcggtaaaagtcaaaaataacttttggacataccctgactagaacacaatcctgatccttctttaaacacatgaattatgtcacaaggttccttgataaagcttgattgaatatggcaatggagtatttcaattagctatttgctacaatctccctttgtgtacattgtaatcaacttaactaggttagtgaaaagaaatatcgaccttgatcaggaagcatatttaatttgaggatctttaatagtactcagtattatgtttgcctggttgatcatatctgtgtgaactgtcaagcatccaataagaataatttgattttgctatattatctcctgaattaggttggcgaagatgttgtatctgagttgggcaaggccatggagaggcagggattagatatgaaaattgcagcattggtaagttaatatatattaatttcgtcaatttcttacttccacactatatctatgctcagctccgttatctgaggcattgataatcatttgtatcctgatgctgcttttggggtattcacatctgatgatgtgatgcaaacattgttgacatgatttaccactgatgttaggttaatgacactgtcggcacattggctggtgggaggtatgcggataacagtgttgttgctgctataatattgggcactggtacaaatgcagcatatgttgagaatgctaatgcaattcctaaatggaccggtttactgcctaggtccggaaatatggttagtgtgtgaataccttatgcttgggattatcattagttgtctatgtcttatagatgatcaatgccaacactcttgaatgttaaccctacttaaaaaaatatgtaaacgtggaattatttggtattctctaggtaatcaacacagaatgggggagctttaaatcagataagcttcctctttcagaattcgataaagcaatggattttgaaagcttgaatcctggagagcaggtattctatccccagtattttcctctccttttagttttagccttttaggtggaccgcattaacttgtatgtattttccaacagatatatgaaaagttgatttctggcatgtatcttggagagatagtgcgaagaatcttgctgaagcttgctcatgatgcagctttgtttggggatgttgttccatctaagctagagcaaccgtttgtactaaggtatatttctgtaccatctctcttttgatcttcattccttccttttgtcatggcaaaagccgttttactttgttgttaactatcatgctggtcaagttttttttttcacgatttctgtgactaccccttggataagagtgcacatgatataaagacgttggcatcgtttccattataatattcgcactgttgataatatacccagatagattatggaaggggaagttgtttgtatatcttgaaattatcatgctaaatcagttagcaaatccatggaaggtgacaaacatacactttgttgttttatccattactactttcttctggttctggttgattctcataattgtgtgcaactagaagttatctagcttggataattagggtggtttggtttttgctcaccagtttttctttatgcttctaacccctcaatcttatgcaactctggtagaattttttataagtatctcaattgttgtatcacaggacaccggatatgtcagccatgcatcatgactcgtcacatgaccttaaaactgttggagctaagctaaaggatatcgtcggggtatgaaatttcttgacccaaagtggatacgcaacatccaacactgttcaatgagtactggttgcttatttatgatttgatcttttattcaggtcccagatacttccctggaagtaagatacattaccagtcacatttgtgacatagttgcagagcgtgctgcacgcttggctgctgctggcatatatggggtcctaaagaagctaggtcgggacaagatgccaaaagacggcagtaagatgcctaggactgtcattgccttggatggtgggctctatgaacattacaagaagttcagcagttgcttagaatcaactctaacagaccttcttggggatgatgtctcgtcttcggtggttaccaagctggccaacgatggttctggcattggagctgctcttctcgcagcctcgcactcccagtatgccgagatcgactagctttaaggatgatcttgatgaatgatgaatcaaactccgtttgtaggttctcatttcccccttcaaaatccacataatactcctggctccccccttgaaatcttaccatctttttttggctattctgagggcaaacataagtgcctctgcagcgggatatagctagtatagcgccaatgagtttggaggttttctaatggcataaaacgttggatggcagtagcagactaacagggaaatggaggcacaggcaatttccattcctgttctgtcagattcttttcccccttaattgatgttgagaaccaagatttttttgctctgtattttctcttcgtaataaagaaggggacataatctaattgctcttgtttgatctcatatatgtatgtgactgcactctcactgtcccaaaattttatagatgcatttacaaagttacaatactcattacatgcaaataactgaaggatggcgaatgtatttgtctggtatctacctgctctcctaactagcgtgccatctctcctagatggtaaccattggatcaggttatacttcttattgaccattgttctcatactatgctgtccaagctgccgttgccgtcgtcgatgcctttggtgtccgaaagctgcttccggcggctgccacccctgatcggcagaaacggcgcgccgtcgccgtcgtactccgccaccttcccgtccacggtgttctggagcgcctgctcgcacctcaccagaatctgcagaacgtccctcattgtcggcctcgtcgccggctgcgcgccggtgcagatgatgccgagcttgaacacgacctcggcgtcgtcgccgtacccggagtcggtgatgcacctgtccaccgcgtcggcgatgctcctgcccgattgcaggtgccgccacgcccactccgccagcgagccgtgctcgccgccgtcgtgggcttccctgccggtgatcagctcgaggagcaccaccccgaagctgtacacgtcgaccttctcgttcaccttcctcgtgtacgcgcactctgcacgagacgatcgtggtcagcacaaggtaagtcgctgtgctaagagaagaaatcaagggagaatcgtgagacgagcagcgaggttggttgaggtgaattaccgggagccatgtagccgaacgatccggcgacggcggtcatggtgtccggcgtcccggcctggaccagcatccgggcgagcccgaagtcggcgaccttggccatgagctcagcgtcgagcaggatgttgctggacttgatgtcccggtgcacgatcggcggcgagcactcgtggtgcatgtagcagaggcccctcgccgcgccgacggccaccctgaccctcgccagccagtccagcggcgctcgccggaccgacggcgccctcgccgtcgcgccaccggccagcaatttgttcccgtggagccacttgtcgaggctgccgttctccatgtactcgtacacgaggagcttcgtctccgcgcgggagaggcagcagaggagcttcacgatgttggtgtggcggacatggccgaggatgtccacctccgaatcgaactcgcgctccaggttcttgtccagcttgccgccggtccatatgcgcttcacggcgacggtgccgccggcgccgccgctgctccggctggcgtacgcgacgcggtacacgcgccccgcgccgcccttgccgatgaggttctcgtcggcgagcccgcgcacaagggaggcctcgctgaagtcgaggggctggaatggggtcatcttccatgccggctctgtccgcgcgagccgcttccgcctcttgatgtcgcggacgacgaagaaggcgagcgccccgatcaagacgacgagggccgcgccggcggcgaggagacccgaccggagacccggcgatacgccgtcggatgccttcgcggcgcacgagcgcaggcccgcgaagttacccgccggcgccgccgatacgcagagaccggggttgccgaggaagctctggtcgtaggcggagatggcgagcgcggccgggatctcgccggtgagctgatttgacgacaggttaagctggttaatcttcagcgatcccagcgacgtcggaataccgccggagagcttgttcgacgaaaggtcgagcagggtgagcaccggcatggagcccaatcccgccggaatatcgccggtgaactggttcctgctgaagttcatctgcgacaagccactgagcgacgcgatgctcaccgggatggccccggagagctgattccttgacaggtccagctcctgcagcaatggcatcccggcggcgaacccgtcaggtatctcgccggagaacaagttgttctcggcgttgaacttctggagcttggtggccgtcgccggaagccggccactgaaacggttgttgtggatgtaaagcctcgtcagattccaatacagcttctccggcaggcttccggtgaggtgtccattgttctgcaggagcacggtgatcagcctcgtctccgtccacagcgccgccggcacctcgccggaaagctcgttgtcctggagctggagactcagcagcgccgggcaagtggcaagactcgccggaattgagccgttcaaccggttgccggcggcggagatgatccacaaccggcggttgtcgcagaccccctccggtattggcccggtgaggtcgttgttgtcgacctcgatgtctctcagaaatggcgagtgcttcccgagctccgccggaatctgaccggtgagattgttctcgaacagcttcattatcaccagcgatggaagctgagcaaggctcgccggtatctcgccggagaagttgttcgtcatcaaggctaagttagttaggttcatcaaacttccaaagctctctgggatcgttccagtcagctggttctcagatatgtcgagataaattaagctcgctgctccaatcttgccattgacgacgacgtcgccggtgagctggttggtgtacaggaacaagtactgcagctttggaatgttccaaatcccaggaggtatgcttccggtgaatgaattctgggacaggtcgagatactccatctccatcatctctgtgacgtagctggggaaatcgccggtgaggttgcactgcgccagccagaccgtcttcaggctcgtcaagttcttgaacgatcccggcagctcgccgggggtgaactgattcacctcgagcttgagcgtctcgaggctagtgagctcgccgagcgccgccgggatcgtgccggtgagctggttgcagttgagggtaaacaccttcaggttcttgagcttcgacaccgccgccggtatcacgccggtgaagttgttgttgttcaaggcgaggtaggtcaggttcttgccgagccggtcaatgtcggcggggagctcgccgccgatactgttcatcgagaggtcgatggaggtgatcgcggtgaggttgtagaggaacgccgggaacacgccgccgacgctggtgttctggaggttgagcaccgtgagcgccgtcagcccgccgatggcgtcggggacggcgccggcgaccgcgacgttggggagggacagcgacgtgacgcggccggtgccgccgccgtcgcaggacacgtacacccagcggcagtgcggcgccgcgtccgtccacgacgcgagcgccgcggggtccccccacgcgcgcttgacctggagcaggagctgcttctcgtcgacgccgccctgctgcgccgcgccgcgccgcgcgacgaggcttggcaggatcgcgagcaggaggaggtggaggtagtaggctttgccgctcgggaatgccatgtcttcgcgtggtttcttggtcgccgccggcgagcgcgtgcgttcactcggtgaggcaagcagccatcgcggactccaccgtgagaaacatgggtgggccatttatatgcagtgtgaacggcacgtgcagacttttcttcctccattatcctgtttggttaaatgattgaatttgttaggaatttaggattagtttttgggtgctgcttgcttggaagtttcagccatgctttcctttataatttgatactagttcaccagttggtggtttagctcatcttttgtttggtttttgctggtcagatggtggcgttgtttgaaagggatatgttctagatggtttgtttatgcagctactactaagttaagttaaggactaagctgagcaacgtgtacgaattgcacagctcgtgacatggtttctttatgggagttttgcgatcttttcatgatcaaggtacgacaatatgctccgttggcttggactgtagcatgtgccggcacattactctgccgtcggatgaatggtcaaactattcggaagcacagaggtgtcgatcacttgcgacaaagaggagtggaagatgttgcagatcgcgcgatcttattgctatcacccatggccaccaataatttaaacatctaattttgctccactggccgtattgtcgctgttgaaaccatttcttttagtatatcttcaaaccgattagaactagtatcacactatttattagtcttcaaagaaaaagaaaactattacgagagtcgagattataaccggtcaagcacggcaagtaaatttaaagtggaagcaattagcaaatgatgataagctttttgtttccactgattttacagggggatcatccacctgaggccgggaatgtgagtcgtcagcacgaggtcacgggttcagggtgagttgggcccacgatgtcagtgtcacatctagatgtactcgtgcacaaatccctggtctaaagttgagtcaaacagaaaagtcttagataatgatgtggctctggcgcctctgggttgtctttaaactctttgtggtcattcgttgactagtcgtaggcctgaaacggtaagtgaaagggagcataagatactgcactcaataccacacgtgcatacagtatatagtcggtatatatggataaataccacagtgaaaagtttatccggtttcttcacttctagaataccgagtatagctttggatactccgtttttttttttaacctgaaaatgcacaccgtataggtgctcgatgacaatgctggcagcgacaggaaatgcttctggatgatgcagctgtgcagcccattgacccgtctcccacagagagatcccagcttcgatctcagccgcacgttcggtgatccagtggctagcgatgagtgagagtggccacgaaggaaaggagcaggaagtctcatgtgcaacgtcagaaactgaagaaaatttcaaagagcccggctcgcctttgctgactgtggacttgtgcgtagactagcttcagaaaaacacataaaggatgtcactctgatgcccactgtctgtacaactcctactacctaccagcacattgttgcgttttatattgctaaacattagtactaactattctggcagtaagtccatgattagtctgagttttggtgtagtaggctaggacattgtagactctgaaactcgttgtgttgcagaattcaccgcttagcacactgtccgcaaaggaaaaattgcgctgcagatgtagcgaatttggtttttcgttaagagttcggcactactctgtcagttccttctgtactgaaacttcaacgacttttttgagttttgagtaaaaaggttgtggacagagatgcaagctactgtatggtccaagtgtacccgaagactatatgattgattcgcttccagagagtaacagcttgtgtttttgacttttgagaaaaccgcacgcgagatccagacagggattgtaaccatcaagattctagaacggcactatctgctagatgctactcctcgatttcacaaggcttcagatgttgatatgaggacaggtcactaacaagaattcatcgttctgaaagaaacaccttctagtcctagaatcaaaattcagattttaagcctcgcttcacagtttttctagaagcccgtagaattgatcaggatgtgctcaagcccagttgagcaaggcaagtaatgggcggacggcggatttttcctgattattagctttctctgcaggacattcagcatttagcactttggtaataggaaattaatatccaatttcctggggtctagaattttggactaataatattacagtgcagttcataataccatcatgacagcatgctggacgccttcactcatacgaaattgtccaaagagaagcattatcgcatcatgacagcgtgctggacgccttcacctacgaaattatccaacacaagcatcaaattctgaaatatatatagcaaaatctgaaattgtgcagctctaacatgcatgacgaattgtttgctgcaacatgtcaaatttctactcctacctgtaagtgacaaaaatatctgttacatacgtatttattagtgtagatcttctaatgtgagcattgcaagcgaagagaaacacgctggggttagttaacatggataatccctcaagccattacggccgtagtggccaaattcgtcttcgtgctccaggtacccgcgcgcgaacttgcccgggctcggatggacgacgtcggagtagtggtagcacatcttgcagacgctctccgccaccatgtgcccgcacgggaactcgccgatcaccttcctcttcagccagtggtgcgtcacgcggaggccgcggcggcacgtcttgcagacgcagtcccacctgccgctccggcgaggggtcgcccaccggcggatgacagggattctggcgaggaagccgccgaccggctcgtccggcatcgggatgcacgtgatgacgccgaggtagtcgtcgccggacatgtgctcgaagaagaagagcgtccgcgtggcggggaggacgaaggcgaggcagcggcgccattgccgccggcggcggcgagccacgaagttgccgtgcgtccaggcgccggtgctgcagtgcgagcgggacagcgtcacgtcgccgccgggtgcgaggtcgtgctcgtcgcccgggtgcagggcgttgtagtggtccaggcactcccgggcgagccgctcgttggatcgcttctccctgagggcggcggcgacgcggtcgtacgcgcggcggatggggtgctccactggcgtgtttcgtcgcgaccatagcgctgcctcctcgtcgtcgtcgatcatggctctgctcctgccgccgatcagggcctcgccgagggatcgcgcgacgcgatcgaccggtgaatccgggagcccttcatcattgtgggcttcggtttcggccttgatagttttggtgggctggatatttcggggcccaaaactgctagttttttttcctttttgggctagaaggggagccgcgcgcgcacggcacacacccccgtgcgctgccggcggtcttcccgccgatcagctcccgctccggtcgacaccaccattgccccgatccggatgttcggttctggttagacacttgtctacggcgcattgcacactagtgaccgatccgtggactctgcgcgtcatgagaaatttggatacatgccatcatcaaaagtaggcttcgccgaaatgccgttgtaaaaattccaatttgatttcgtggaatgctatttccaacttaggggccgatgccagaatgacatttcgaaatttcttccaaattaaaatggtaacccaattttcctcacatatgcccataccgaaatgcctctagctaatttatcctctcgctccccactttgtctggcgaccggtggtgatcgacgccgttcatcactgcaggtagcctgtcctctccatactagctccactcttccaatgctggactctctactatcttagatctctttcctttgctagaaagttttttttttttgaacgactcgcacgagacggtgcgaagttctattgatagagcaggaaaaaattacaagattacaaccaaatataccaccacccacacggcgacatcgccaacaacaagcccaggagaaggctaacaccggaccggccgctgctaagcgtgaccgaccgccactagaccaacaaagggacacatgcgagattgcccctataggatgccaaaacaacgtcttcaagaagagaagcgacggaaaaactgctgccgtcgtctgtcaagacttaaaagagccaagactgggctttcgctcggcaatcatccttgaggggtgagacagcgcaacaactccctcaggacatcgttgtcagtccgaccaaggctggactgggttttcacccaccgttcaccacctgtgaatccacggctgacgcactgatgctccaccacc

SEQ ID NO: 22329 - DNA, 1024 bp, Oryza sativa
ttagattgttgaaaacttgaaaacaaaactgtttgcaaaataacagccttccctttaagcctgcattaaccacctaagttcccctggcttgctgagtacgtaagtactcacccttgctctatataaatatatatatagttcctccgtcttgaagaaaagatgaagtgaagcgaagattagggtttcgtcctggatcccagccgtcgcctgtggtgttgggtgttagaccgttggttccgctgcagctgctgttgttggtgttcgcctcgtccgtgtcgtcggttgcattctcgggctgtctgagctgcaacctaagttaaggtaaataagtcctctatttattctaaggatttgcaatgattcatatttgtcaccgtgggtaccagcactatgtcctgggactggtaccgagttcgcggtttcgtaggaagcggttcgcgccgtttttcctacgacacgctcctatcaggtgccgttgtgcggcggtgccggattggggtgtgacaaaccgtcttaccgtgggatgacaataaccccatccaaaacgattcggtgaattgtgctatggaggctccttgacagttgatgtcggcatgtgcaagcctcatcgctgcttttatacttggctttcgcattgcaccgatgctattgctagctgcaatggttgatcggagcaagctaatattcagaggaagaatgaatagaaataattgggaacaaaattggcatagacaaagttatttaaaattaaaataacatattgtccaaacaagatttcggcaataataaaatagggtggctatcaagctaggaaagtggatgggtttggagacaaggaattttatacaggttcaggccttcttattcaataagtaataccctactcctgtccggggatgattccgccgagtatgttattgattgtataaactggaaaaaaaaatcgccccccaagaggcacacggaccctccttatataggggaaggagtccgctttacaaaatacagtccatatcctaatgga

SEQ ID NO: 22330 - DNA, 845 bp, Oryza sativa
gatctgacttatgtggagaagccgattcgtatcctcgagaccagtgagagaaggaccagaaacaaggtgatcaggttttgcaaagttcagtggagccaccactcggaagaagaagccacctgggaaagagaagatgaattgaaggccgcccatccgcacctcttcgccagctcttctgaatctcggggtcgagattctgtttaaggggggtaggtttgtcacgccctgaagttcccctcccttgctctaaattcataaaataaatcgtccgaagaaattgtttaatttaacctagagagaaaccctaaagtaataaatgcaaataataatcggaatcggcatgtggaatttttcttggattctacatgtcaaaatatgctaacaggatttttagtggaattttcagagccttggaaataattttaaccaattaaaaatcactaaagtgcaaattttaattccagggaaaatccttttcctttttctttttcttttccctccctttttccctccttttttcttttcggatgggccgccggcccattcccctccttcctccccctcctccttgctgggccggccgcaggccgaggcccagtccggcagccaggccgccccgctgcctcctctctcggggtcgccgacaggtggggcccacctgtcgggcccgtctccctcctcccgccgatcccggcgcgccgccgcgccgaaaccgccgccgcgcccacgcctccgtctctcccgggccacgtcagccacgcccgcgcgtgcgccgcgtctcccgcgctctttcccctctacctcccgttcgcgcccgcgcccgagatggccgggattcgaaaacc

SEQ ID NO: 22331 - DNA, 667 bp, Oryza sativa
ttcctgcagccctccggtgcttcggatgcgtaggtaggtagagtaaaaaaagtccatgtttttctttagttttttttcgatgcgacccctaaaccctaattattctctgtgtattgtaggtcgctgagcggtgagcgccagtggtagccaccgttgaggaacagtagtgtctcgatggatgatccatccttctgcaacttcgagttgaggctattgggaatgcggggtgatgacgaagatgacttggaggaggaacgcgtggaggtgttcggcaacactgcctcgcctcggatcgatgggtcgcagccggagacgaagacggagccggacgatgacggtaccggtgctggtggcaacggcgcgccgtccggctcaagtgctagcaacaaacggtccagatctcaggtatggaacgactttgaagagctctatgaatcctgaaatggcagtcaggtttgtgtccatgctaaatgcaattactgccataaaatcttgtctgctttttcatctggtggtactggacatttgattaggcatattaagtcatgcaaacctataaatgctggtgctctgtctcagtctatgctccggtttaatgctgatggttctgttagtcaatgggaatataagacagatgttgctagaactgagttggttaagttgattg

SEQ ID NO: 22332 - DNA, 604 bp, Oryza sativa
gagctaagctgaaggatatcctgtgggtatgataatacatatcttgaaaataagatactatcaaatctaattttcaagaaccattgattacttacgatatgcctgaacttatgtttaggtcgctgaacttccctggaagcacgatacatcacccttcatgtctgcgacctcgttgcagagagaggtgcacgcttagctgctgctggtatatatggcattctaaagaagctgggcagggacagagtgccaagtgacggtagtcaaaagcagaggactgtcattgctctggatggtggtctctatgagcattacaagaagttcagaacctgcctagaagcaacgcttgcagacctgcttggagaggaggctgcctcatcagttgttgtcaagttggcaaacgatggctctggcatcggagctgcacttcttgcagcatctcactcccagtatgctagcgtcgagtagtaacaggagctcatgggactgagctcccagtgtagcttgatttcctcccattttccccgtttcattacaatgggagttcgtgaccctcctgcgatgagcatctccttttgctattctgcagtcacataaacgaatgcct

SEQ ID NO: 22333 - DNA, 8705 bp, Oryza sativa
aagagagggagatgcgggagaggatgcgcggtcgcgccgatgcggaggaggcgcgtcgattgcggcaaatagagagagagagagagggggggggggtgcggagaggatgaggaccgacacgcgcccatgtgggacgtccgatctaacacatcggatgattttacaccgttagatatgtgatatgatgaatgagtaaatgaataaaatcatttgtttaactatagggtagatatgcaaatagtagattaatgagccgatcggctgacaagccgatggagtagtttcagtcgatagccgatattagccgatgccgatagggttttgagctattggcaatatgtcaaatgtagataatgatataaaggcagtcggctgatgatgatgcaatacaacgacaatataatccagtagaaactaatcggctaacaagatgatatgatagaacaagttctgatccgatggttaaagcatgcattggctggaggtccgatgtcataaaatccacaagattagataaatcaatgaaacctttgttgtcaacggctaaatacaacttatatgtatatgcaatccttataagccgatgcaacatccagataacttatcggctagcaccccgataaaacattagcatgaacctatcgacttagcaagatttatattatcaacaacaatctagtaggtcgaacctaccaatgcagcacgagattgtatatgataatctaatactcggtaagccgatagatctatctaatatgatggatatagcaaatctatttaggccctctttgtttaggcttataagccaacttataagtcgaaaagtctaagccaaaacaaacaagcagcttttttatttggcttttttgaagccataagccactctaacactattaagccaaaagctaggttggagaagcttttttggcttatatgagatagatgtatgactccaccactaaacttaggacattaaatccactgacttataaatcatataagccaataaactgacttaaaagtctaggccaataagcctaagcctaaacaaagagggccttagaacatcattgtgattgtagagatatatcggctaagacagaagatcagacctaaccgagccagtcccaactaaaccgatgcgtctctaaacacaatgcaattagggatagaattgaggtatcaggtaggcaaatatatcaaccaaaccagagcgatccaagagatcgaagcgatgcacccttgaacaacaccaatgtagtcaacagattcaccagggccagcggaacgtaggacttaccccttcgccggagatggaaagctgatgcaaccccacgtcaggtgccaagtaacgtcagatgacaagtaaaaaccttagtaaagagggtggtgatgcgccgagagtagttgtattgattgagagattgatagattacaatgaccccgggtgtacatatttatacccatgggtagatactagtccttgtaggacaataaagaaaatttcctaaagataaaaggaaaacacaaagtccttatcgaacactaaacacactttcataaagataaaaggaaactaacgaactattcctaattaatagatacacttgccatgccgcatcctccttgaactcggactcttctggataaatttccttcaattgatccgactccatcaagaacacaactgctgccgatttgatgactcccatcggccgattctaagactctgaagccgatactaactttaggccgatgatgactttgggcttaccaaattttggcgttaacacatgccccaaattttggagtatgaaagctcatgcttcaatcttatctcatttcttgtcttggtgactccaaaactgatcttcctttgcttcgtgcagtcgactttcatgagccgatactgtctgcattagatgagccgggctatcaaactcgtagcaaaagaatctctctctgatatgtgctgacaatccttgaaatgcgagatctgctagctgctcatcgctcaggctcaaactataacatcggctgcagatattccgaaatctttgaatatattccatagccgattctccttcttgctgctgaactgatatcaaatctaaaagcttcatctcatcgatgccagcaaagaaatagtcatgaaattgcttctcaagattggcccatcctccaatagaattcgatggtagtgatgaaaaccatgtgaaggctgatccagtcaaacacagtggaaaaaatctaactctcagagcttcctcagccgttgcttccccacattgcactaagaattggctgatttgttcctgtagatatatcatcttgccctgaaaatttggagtaatttggaactatcggtgtggcaatggaaccctatcaaaccactcggcatatggcagccgatacacagaagtatgttccttaggattgattccaaactgctcctctattacctttgcaattctattggccaaatcttccctataatgatatctttgaattccttctggccgatattgttgatatgcctcatcatgctgacaccgatgtgcttgccccccgagccgatgctgatgttgttcttcaatctaccccccgagctgacttttttgaataattaactcatcaactgttaccttgatcaaactttgtaatgtatccgccaaaactccagattgattaaacaatgcgcgatgaattgcttcatcaactgtatcttgaagtgtttcaaccatcggcttgcgagattgctacttcttggtattgacttcctcttcagacatgttgggtgcaaaacttgtgtcccaccgggcgtgccaaaaattgactcgaaaaacacacactggcttgggagatctgcttagctccagtgtaggtccaaaggttgacgatatgtgggtgtgcccgtcagtttgatcctgcaactgacaaaatatgcaaatagtatataatgagccgatcggctgacaagccgatggagcagttccagccgatagccgatattagtcgatgccgatagggttttgagctatcgacaatatgtccaatgaagataatgatataaaggcagtcggctgatgatgacgcaatataacaacaatataatcctttacaaaccaatcggctaacaatatgatatgatagaacaagtactgttccgatggttaaaccatacatcgactggaggtccgatgtcataaaatccacaaggttagataaatcaatgaaacctttgttgtcatccgctaaatccaacttatatgtatatgcaatccttataagccgatgccacgtccagataacttatcggctagcacaccaataaaacattagcatgaacctatcgacttagtaagatttatattatcaacaacaatctagtaggtcgaaactaaccgatgcagcacgagattgtatatgataatctcatactcgataagccgatagatctgtctaatgtgattgtagagtattgtgattgtagagatatatcggctaagacaaaagatcagacctaaccgagacagtcccaactaaaccgatgtgtctctaaacagaatgcaattagggatagaattgagatatcaggtaggcaaatatatcaaccaaaccagagcgatccaagagatcgaagcgatgcagtcttgaacaacaccaatgtagtcggtagattcaccagggccagcggaacgtaggacttaccccttcgccagagatggaaagccgatgcagccccgcgtcaggtgccaagttccgccggatggaagtaaaaacctcagtaaagaaggtggcgatacgcggagagtagttgtattgatcgagagattgatagattataatgaccccgggtgtacatatttatacacatgggtagatactagtctttgtaggacaagaaagaaactttcctaaagataacaggaaaacacgaagtccttatcggacactaaacacactttcctaaagacaaaaggaaactaacaaactattcctccttgagctcggactcttctggataaatttctttaattgatccgactccgtcaagaacacaactgctggcgatttgacgactcccatcggccaattccaagactctgaagccgatactgactctaggccgatgatgacatcgggcttaccaaattatggtgttaacaaatgtgtgtggtcaaatcttcctccagttcatctaaggacaccaagcaaaggataggctaagatagagaggattaactactgagaaacagtgtttagggaaaacttaagtttaatcctaacgcgatacttcaggaactggcaacccgctgttcccagatttcgctctactacgtactcggacagggaggacttaagtgatctagagggctgtcaccacctctacacctacctcaaatgtactgtgggatacgcatcaattattggataacaattacctaaacacaacgtttaagcaattaatatctactttagtgtttataactcaccaaagcaatcactatattttacttgattatagtgaacaataatcccgtttgctattaggaactaaccaagagataattctcacaagataaatctaaattactcaggaagatagttcagttgaaatcagagtaataaacaaaataaaagaaataggagaagattaccgacaacttcggaattcttccgacttcttctactctactctcttcatattctagtataaaatatagtacaatagagcctcttataattcagctcaagcttggaagtgtgtgtgaagtgagggaggtccttaaataggacagttaatgacggttagcgaataggaaatgtccaaagtgccctccaaccgtcatcagggatgcatccgggacgtccacgccaaaccccagcttggacgactgtaattgtggttcggccgaaccaggggtacggccgaaccctggctgggctcccttggcctgtccttcggcccatttctctttctgggcttgccttatccgattctcggaattttgggctaattcttcaatgttttgatgaagttcaaagctcctccttgtatggatatgcatcctccttcacttttagttgcttttcctcccaccttcggggtttatcatatacatacaaatatacaccaacacttgtggaatatgtgagacttaacacctatcactatgttggatgttttattatctggactttatgcatatgttggcgatatagaattggcatttaataaccactaatagttgctcaaaactactttgtaaactcgaacctaagtcttcacagtattattaaacaaggcagtgaacccacacaaacctatcttggcctaaggcccacgatgagttggaccggacaggtagccttaagctgggcctcggctcgtcccaagccaacccaagccatccattccaaattttagttgcttagcaagttttaagaattaaaccactaacttgggtacattgctcggcttatccataattgagggtgcagctatccgattagattatactctgatcagaggtgtacatctttacccataagacacgtcttcctcacgtgtcgccgcatgcaccataccaccatggtatacggacggaggaggtgacatagttcctaactcatcctagccatgaacaagagtaccgactgaacacccgcctacggacagggctccccggacaggtaggttatagttgagccccatggcatcaggacatccctcaggagtgaccacccggatgcccgtcctgtgccacgatatctcgactaccacgacatctgtatccgtgtccttttgttcatgtccaggttgagccccaaactaagccttacccattagacatgtggaagtacggtagtgctttgaaacagaagcccgaagaccgatccttatgatggccgaggtgctactatgaaaaccatgcaccccgagcgcaatctaaaacattttgggaattttgaatgacgaggagttgtatgtccaattccaacatatgtcgcaaattacgttgcgccgacgaggtccagggccacgcccatccactttgttcaaatatcaactgcatcgcaatcctcattccaactctctagcccgtgacatcttggtaccagattcttctggttccgatcccatggcctccacaaaagcccagctcgaaatcgccaaaaacctcacctcaaggctgcacaaatctctgatttgtcctggaagatgattgccttagaagcactcgtgccgctcgtatctattggcggtccttaaatcataatatatgactatcaatacctgcatataatggaataaaatatggtattcaacttagtggtagggtttattactaatcatttctattagtgttggtatatatttggatgcaggtgacaaactaacaaagttgagaggaaatatacatgaaggaggataatcaaacacatatacaaacttatggagttttggacccaaaaacccaattaaacacctccaaatggcccaatccaccatgccaatgggctaagggcctcaaaattagtgtccacgaggaaaaatgagccgaacggagccatcccgggttcggttgaaccaccagtttagccaaacccatttggaggccgttgatcgcctgattttacatcgatggccctgattacatcctaatggcggttccggggcattttggacatttggcataggctctaaccgtcatacctgcctataaaaggaggagctaactcttatttccaacacacaactttgagctgaattacaagaggctctgttgtatcttttgtacattagaaataggtagagagtgaggggaagctctggaggaatgcccggaagtttggtgctcatccgacttctaccacgatgagtgtagcttcatagtaggaattctggaggagtaccggagttgtcggtacactttactccgggttcgcagaaacttcttctataaagtaagcatttgggatcctttcttttttattatttaattatttagtctaagtgagatatatttccatctttgtgggttcattatttagtattcgtactaagtgctctagtactaggactccggatagagaaggaagttcctacgcaagtattagagtagtaattgtttattgtgtatcccacagatttgtcagaggtagacggcaggtggtgacagccctgaatcccgtcccagtaatcctccgcattcggataaatcatagagctatagccggaaccacgttggcagaccagcaggggtcggtgtccggagcatcatacaggaaattatgttttactcagcttagataattaaaaacatagaaagtcctctctagcctgcctagcctaccttcagttgttgttcttggatagtcttagccttagatagattatacacgttccctgagttcgatatccgtttggggttacccgaatgtcacgcctagaaattcatgaaccagaatttctaagctgaatgtgcattaaactaaactaggggtgagactaatcacagtgaatctggttgatcgcccataaccgcgagcacgactattcgaatagttttactctggccagaggtgtacaactgtacccacaagatatgattccacacatgtcgccatgccccgaagtatcaccatgatactgcaaagggggaaatcgtgacaagaccctccgcataaccctcccctaaccattcacaccacgctaaggtttcacccccacccctcaaaaggcagtgggcggtcccctcttgcgccgcggtgaatccggcagctagacaaccggacaccccggccgacccaactccatcacgcccaccatcgccaccggtgcctaggaaagtgtcgagctatacttcagatcaagcagttacccactccctcttgtggtcagcacggtaagtctcccagggtttcccgtgaactggtccttaactgccatgggtgcgaccagcgaaaccatgcacccacagcccaccattcagtgtattttaattaactaacaccattgcggtggaaccaatccaaagctatgctaatagtcaaagtctatgtaataatgtgatccccctttgtgtactagttgaactaagcatggctaagcatttcctaaaccaacatctaatcattttgaaacccaagttatcaatggcataaggtaaacaatatatggctgaataataggacccatcccatatgatattgtaaaagaatgcaacatttaatagaaatgcgggatatttgtaaattgggtacaatacgatcaaatgtaatacatgacttgccttgctctcgcactgatgagaccacagcaacgtcttcgagaaaccgcggatcgacgaagcggccgaaatctacgcgacaaacaaagcacaaaagaaaaacacgctataagactactgtaacagagaacaaaaccatttttaatagattctagggatttttatgaatttattgagacttgaatggacttaaacggagctcggatgaattacttatgaattttagaagataatctgtgtttttactaataaagaaaaggccttaattaattatggcgcaataaatccccagggctgacgtcagcaaggggggcgccgacaggtgggccccgcacgtcagcgactcaagagagaggaaagggcaccggcatgtgggccccacgggcggtggctcaaagtggagggagt

SEQ ID NO: 22334 - DNA, 26635 bp, Oryza sativa
cggagtggaagacgaaggcggcgacgaccacccggtgagaggaggggcggacgagcggcggcgacacctagaggaggggaggagaggagttaggagaggagacgatgaccacggcggctttaaacgccggccggagatggaggggaatggatagctcaccggctcgcgagggagatggggttccgatggggttccggcgacgcgaggtggtggccgagatgacccacacggcggtgaagctagcggcggcggcggcttggcgcggcggcggctctagcggcgacggcgcacggccggaggcggtggtaggcggcggcgctagcggcgagtggcgcgggcgcgataggaggcacgggagagagcggcgagcgcggaaaaaggaagaggggactccggggagggattttataggcgagggaggggagaacatggccgggaggtcgtggttggcgccggcgacgacgtgggggaggtggggagagagagggtgttgggggatttcaagtcccccaccacttgcgggcacgcgcgcgggggagatgcggggaaggtggaggaggtgggtggcgtgggcgcaaggtgcgggagcgagaggcggggaaggtgggcggcatgaggagcggtggtttcggtggcggttggcgccggggcgtgggcgactggaggtaggggacgacctgacaggtgggccccacctgtcagcgtcccagagaggagagtggggtgatgggccggactagtcaaggagggagagaggacgcgggaggaaggaaggttgggccgacggcccaacaaaggaaatagggaggaaaagaaaagggaaaaagggaaaggattctcctgggattaaatattgcggttgtcacgcccggaaataccctagtaatttccgaactaatttgtgcatgaaatcctcgtccaggaatcagccgaggtacacaaactgacaatttaatatacagattcatcataataataacgttacatacttacaaaagaaaagaaaactgctgcggaattacggtctagcgaagctccggctccactctcacaggcagctcaactggggtataagccaaacgtcttctcctttgcgacttgtcttcaactgagatttgattgattattgcaaggtgagcatatgacatactcagcaaggcacacaacaaatatgcaagtgcacaaggataccaaagaatggcataatataggtgttgatagaaaacacgaggcctgggagatctgcttagctccagtgcaggtccaaaactcgcctttggatgtatgagcgtgccagttgatttgatcctgcaatcaacaagaaacaaagacaaagaaaccgtaattaaatccataaatgatagccgatcggctaaatgccgatgacatatcatttatctttgagccgatgttatatgtaaatcgatcggcaattgttaagaaaacaaatcagaactaaatctactcgatcggctgtaaatatcaatgatacataatccttatatcgatgtatacttgaatcaagtaattgggatagatcggtcaccttgccgagacagtataaatcacttacatcgaaatatatattaataatgagattatatatatattcatagcatagccgatcagatagatctagcgtgtatcggctaatactccgatactactttatattaagatattaaagcaaagagaatatactaaacagaaatctaatatacttaaatgcaacaagatcttaacatgaagggcagatccaacatgttaattgagcatgtagaacaaaagcaattggatcagataagatcggctgaaactccgatactaccctaatcggcaaccagtaggcaggctagagattgaaattttaagcacgacttaatagatcaaactcaactgatacagcattaagtatgaaaagaagaacaatatctagacgatcaagccgctggatgtttcatagagtggtggatatctcatataatctaagccaatgtcgttatttaacctaatcggctgccttctggtagcagatgttagccgattgtaggttaaatgacgatattgtcaaggattatgtaagatatatgataacttgacggactacataaacaagattagagtatcataaagatggaagcactaatctcgagaacacaagccgccataacaagttttacctcttgttgaacatcaaaaccgatgcagctcaacccgaaagcaataactcgttgaaataaaacgaaagcaaaaagagtggcgatgcgccgaaattgtattgaacgtgtgtgttcatcattacatagggctcggggtctatttatacccgagaaatacaagatatgtccatattggacacgactcttatctctaacaaactctaagataccacaagtctttgcggcagacttttgcccacatttatctctaaggaatttacataaaatatcctaattaatagatacaattgccttcccaggactctatctatgcgtggcaatcatcttgaaacacatcaactcgaacccaatgtcgcacatgggtcgtattatcggaatcggctgtatcacttaaccagactgactcagacttagccaatcccagtcgtagccgatccggactccagccgattcttactctgtttccgaaaaaaaccttatcttcgagtccgcttcgatttcatcttcatctccgatgttgatattaccaaatttggttgttaacaataggctcatttgcaaaagcagcatttagcaaacatttaagagaagtaaaatagtagagcaattaatcatcaattttaatcaacactgaacatcacacccatgctgcacaggcccaaccaaacctaaacaaccatacccggctgtacagatctatctccaaaccaggaatataccattccaaaccaggagctaatcaaattttaccagttatagcatcatctattatggtgagaagtgtgagactatcatgaaagacattgttagacccgcccataaccgtgggcacggctattcgaatagttttactctggccagaggtgtaccactgtacccacaagacacgattccacacatgttaccatgccctgaagtaccaccacgtcactgcaaagggggaaatcgtgacagtacccttcgcacaacacaactcaaagcattgcaccgttcctggatcataatcacccccttataaacaaggcatggactccccagcgacccccgtgggcttatctccgccacttctcagtctggtgctccgcaatgaaccatgctatacaaaagataaagccgttgcccatgctggcttgtggttggcacggttaatgtttcacaactgaaacttgtgaaccggtccttaattgtcatgtgcatgaccatcaaaaccatgtgctcacaacccaccattatcaagttttagttagcatattaattaattaaccaatcacgattgaccatcgtgagctaatcattaaatatccatcattaagtaatagtaaaacattagttatcccaatcgtgtactaatgtttctaagaatggctaagcaattatgtctaacatctagctgaaccaatatataaagctcaactagtcaaattataataacccaaggtaatcaagaaatagggtaatcaatgcaaattgaccataacaaaggaataagttcacaccacccggtgacattcgaaaataaatgcacagttgaaataaatagagactttaaatataggatcaacatgctcaaaggaattgtgtttgggatctgtgtgacttgcctagcaataatcggtctttaataagtcttctggaatacttccgatgcacacgcgaacctttgcaacggcggaaacgacaagctaacacgcaaaacaaagaaaaagactaataaaaaccaaataaacagtacatataaagtaaacaaacatgtagatcataattttagatgaatttagagacttaaacggcatcattccgatttcatatgaattagttatgaattttacaagatttaattccaattaaacctattaaagaaaagactattccaaattaattaaacaatttacaaatgatttataactgagggaaaagattaaaacaacctccagaaaatattagattatatttggtagatgacatatagtaaaatgaataatatgccattgaaaagagaggaaaggatttatatggctgagattaatcttgaccaagtcgaccaagatcggatggcttagattgatctggcaagcgagcctcacgagatatcgactcaacgagtcaattctacgtgacacgggaccacccaaaagatcaactgaaactggcgaacggaaccagcggctctgaacggctctaacctaaaggacgactcaacacggacgaacgaatgaagcacggggaacacctcattcgaacgaacgagtgaacgactcaacaatggctatggctaaaccggtgggctagaaacgattcacggtaaagccccggtacgacaaacgataggccggtaggaacctagggatgcacctacggctttacaactgggctaccgggctacggctaaagcggcacacgactgcgacacggcacagcagcgacggcaaacggtgactacggtagcgggacggcagcgacttggcacgctcgagcagcagcagcacggctgtagcagggagtggcacatcgatggctaggcggctagcgcagcgacgacgtacagcggctaaacggcgacgcggcggcaacaaggtgctggcggcagcggcggtgcacagggcagccggcaagtgacgcggcagcggctgcgctagggttagagcaacagcggcggcgacatgaccgagggattgaaacctaacccgaggggacacggatagaagtctcaccgaaccaaagcgatcggagagggagggtcgttgacgctagacaaacaacggattagattagattggattaaggccctagggacaaaatatctacaccggtgaacgtcatgggagcggcggttgccggcgaaccacggggcacattaatgcaaacgaagggcaccaggaggaagaggaggcaacggcgatgcttaccaacacttacgcagcgacgaacagtgacagaagatggccggcgacgagatcgggacggcggcgagatactatccatggtggcgacggtgtttttggcgaccttcggcgacaacggaggggtggacggccttcggcttggtgctgcgatgccgacgacggcctcggggtgaaccggcgacgaccgcaacagcgaggaggctcggccggagatcaaaccgaggcggcaaactcggccttcacggtgacagcgacttccagcgagacttggcggaggggaaccggtagacggggtagagctcgaccttgcggagccgatggaggtggcggcgcaggagggcgacggcctaggagacggcgcacggctgctgcagcggcggccggaggcggcgaagcttggattcttgtcggcgaggtacttccagaggtcttcgtcttcggggaagtggaggccggtcttcctctccttcttgcgaatccaacggcggcagcggcgaccgaaagcgacgacagacgacgacgaacggtgcggctggagcggcgccggcgcttggagagagaaggagagcgtggggagagcgattccggcggcggcggaagaagggacttgagaggataggtataggacgactagtgggtcctttatataggcacgggagctcgggtccgggcccaaatcgacgggaaaagtcgggaaagtctagggttctcgccggagtaaggaaagattgaaccgcgaaattggaaaagatttccatagaaacttttagtgatttcttggggaaaaggaagaggagattgagaggatcccattcccgcaactaatttggaaagaggagcaacggggaggtcggatttggaaggatatcggcggcagctgtgcacaggctggagagctcgggcgctgtccagaggtagaagaaggagcactgtagcgagagggacgaaaaacagacttttctgcgtctgagaggaagggagagaatgagctgaattcggcccaagctgaggggaaaattcttattacttttccaaataaattaaccaatgagatgatctttcaattgttaaaaatacttccaatgctcaaataattaaaagaaaaatcttgaacatacttggacactctaagtatttaataatattgaaaccagaccatttaatgattaatttattaattaaataattactgaaatattctttgtattattaaaattaatacttgagctctgaaaaattcgagaaaattccagagagtataattaatcatggagaatttaataaaaaataaatccagccatgctttatatttaggaaattttatttcccacatttaacttcacttgtaaattaatgaacatttaatataaattctattaataatttattaaataatttataaatcctaatacgaaaattcaggttgtgacagcggttaatgaattttaattggttaaaattatttatagggctgtgaaaattccactaaaaatcttgttaatacattaggacatggggaactcaagaaaaattccaccacgctatttctgactattaattgcatttattaattagggattcaactctaggttaattagaacaatttcttcggacgatttattcaaccaacttttaaagaaagaagaacggggaaacttcagggcatgacaccgaatgtaaagtgctacagtggtattccgtgcgcttcggatttatctatggttgtaagaaattccaacaagcatttctggcgtcgttgctagggaactgttgctaatttattcgagtctaggtcatcctcgtatttttgtttttatttcttcttttttatttctttccttaatggagtgttgtcgaagcgataactgcgtacgtcgaaggacgtggttactcaacagtgtttgacggagcgtggggctcctcaccgggagaccgcgcaggcccccctttgccggttcggccgggggcgctaagtgagattcttcgccctcgatctgaggaacgtcagcgagcgagaaagtgcacaagacacaggcgacgtagacaggttcgggccgctgagaagcgtaataccctactcctgtgttttggtggatctgtgagtgaaggaataccgagagccggagagccagggagagttcaggccctccctcttctccttttttcttcttcttcttttctttttctcttcccctctccttaggcctgggcctccttttttatttggtcaggggtcaccacatgggcctctcgctgcctaagaaaggaaacatgctttttacaatgagggctagtctacagccggaagtgacatctgacaagcagagcacacgcctcctgccccgctcgcccgcttttcccggggacgcccatttcaaccttcatttaatggccagcgacttccttgccatgcttgcgctgaagcctggaatgaatctgaccgggactgacatacccactcctggagttggcatgccggctccggctagggacgagagccaggaagctctcatcattccgacgggacggggcgaggcgtgtgacaggccgcctgttgccacctaacccgcgatcttgacctgtctgtgaccggtcactcaccgcgaccggtcacggaccggataagcgtgcgctgcgccgcattaaacgcggcgtggcgcgctcgtccaacctgctataaatgcggttaggtgagcccgctgtgctcacctaacccacacacgtggcgccaaaaccacagggggtcggggcaccccagccctcggggccgaaacgggagcggcccgacccctcggggagacagagggaggggtggccacgtcaccttcgagcccgacccccccgagggggtcaggccacgagggtgaccgcggctacccaagcctctagtcacgatacccccggccccatgtcaccgacagtgttggaaacagtaaatgtattaatttaagatttttctttgggatccccctttacatgtccctagaggactatttataatcctattacaggttcacccctttagggtttaggctttacaggggaatttacatggttgcccttatgaaagggacgtttgcttgggtatacagtgtaatttggatacatgggcctctaatgggccgattggcgaacaggcctgagcggccgggatggccccttgagcctcctcaaagttgggcttgttattgcgaagtctccatccttcggcatacacccttcgcccaagacgcatttggtcttgccggataccagcacgactcttcggccttcgccatctttgcttcatagtcctcgctggttgcacggtttcggcaggtctggtcgaagggtctcatgacatactgccaacaagcccctcacgggcaagggtgagttaggagcttcggccgagaccgtgcaaaccatgtggtatggtatgaggcgccccctttcgaccgacgctcctgccgaaacctataatacagtcctacaggaaatgtgtacactttgtgcatatgtatttttacggttagtaaattttcctagctttcgccttttgcaaacggcgaagccgtccttatttttttccgtgggccgcaataaacagtgacaggcttcccttcatgggcttagcactgtgtagctcaatgaatgggaatttaccattttgcctaccctcgtgacacatggcggcttacgattgggtgggaaggcgaattgacgcttgggtgggttatatatcccccccttttcaccgccgcacccccgtcattttcaccgcgagctctctcttttccgccctctcacttcacggtcctcttgagtcactagtacctttcgactgttcctcttttcgtcacggcccacacttttcaccatggctcctcgcaagccgaacccagcttccgtgacgggccctgatcccggcaggattgatgacgacaccaccgcctatctcggggcttcgcttgtggacgaggatgagttggcaaagctggtcacctccggcgtgctggcggagaagcaggcctcccccaggaaaggctgttgtgccgaagcccggcgatagccggacggtggtcttcgccgtgttcttcgagacggccttcggtttccgtgcaacgtgttgttttcggagatccttcgccttttttaggtggagctccctcaactaagcccatcggctctcgtccgaatcgccatcttcgactgggcgtgccggaccgctgggttcgaaccattttttacggcaccattttttacgcaacgtaaactcgaagacggtggtcactcccgcagggacgaagaagacagcgttcgggagcgtgaacttcaatgttcgccccgagcactctgatctttggccggtcaacgccgccatgttcaagttggctcgccactggatgtcgaagtggttttaccactccatccccttcgaggccgggtctgagtcggcgaaagctctccgatggcggcgcagggcgatcgcgccgaacaagaagcccaaggtcaccgtcgatggcgccatggaagcccggttcgccctgctttgcaaggtctactcccgccttagctgccgtgacctattgtcaaatgctcctttgctatgttatgtaactttatctcagccctatatgagtttttcttaaataaaagtttgataaaaattgttttcaagaataaaagaaatgtctctcggaaaaaaaaacatttttctctcgagtaaaaagtaaaaataatgacaaaaataaaattatggcaaatttatgggatccatgctcattaagttttcaatccaattcctttttagcatgaatgtgaacaactaatcttgaggctatgataaaatcttttcaactttttgtggtccctccggtatttgttgtccactgaccttctgcaggaaataaaaagacaactaaggggaagtgtataataatctcaacattcataccacgctccttggactatgagaagacagatgctcagggaaccaggcagagcaaatgcaaagttgtgttgcattcttgcatccgaatcaaagcttggtaagtcctatctagtaagaattcgaaacaccctgtgtatcattgcgtcacatatgtccaccctgctaggttacccatcacctctattgctgccataaaaaatgataaaaaaatataaaatataaatataaataaaaacaaaataaaagtgaaataaaataaaagtaattttaggcacttcatgcgcctagaattacttgaataaaatttggctcaccggtattttaccccggtggaagcccattttgctttccatcattttgttgaataaagacaaggtacaaaacaagtgtgggggagtcttttcggaactcctgacgtgcaacagcatcgactcaacatgacaatatgttgaacacccgcccacggccgcgcacaaaacttagcagtcagaaccaagtcttggttgggttggtcgaaccaagtgttcatttgacccatgcctggctcagttctgtcatcgttcgccgtgtggtcaggtttgcgcgtctccttccttatcctcccttgtttgtgagttaaactttggcagaaaatttgaatacaatttagtttaagtccaaatgaaaattgaaagcattaactctcaacaaataaaaagaaactgaatacaattttcctatgattaatcatgtatactttttattctttgccaacacttgtcacttgtgaacaaacatccattatagggaaccttgctaatataagtaattgatatatgtgatatggttatgacaaaagaaattcttgtccaactgtcatgatacttgggattttgtctttgcgaaaattaaaaaattcttttagagcaatactcctcactgactatattattacctacaaaggccatatatgattctcattgcaaaatcctgatatatgtttaggctgcttgcattacattgagctttgtcaaattattgtgacccgtgtgagatgcttttcatactttcatgatcaagatcacgtacactccatatacacacactatgctaaacttctacactggaaggtagcatccctcatccatcatttattttacccattatccacaaaataaatactccatgtcatttatgcctttttctccaaaattctttcaaagaaaaaaaaacagagatagagagaggcatggctatgcaaaagaaggaaaaaaagtcttgctcatacaagtatggagcattgataaacaaaagagaaaaaaatgaataaaaaaatctgctcatacaaagtatggggcatgatgaaaaaaaagggaagaaaaaaagatagccatgcactctctcaaatttccaaagagagaaaattggaggaggagatatatcaaaggagttgttatcttctattttcctttttccatccacacaattctccatacccatacacagatcacacacatgcacattcttgatcagagagtatgacttgctatctccttgggtccggtatcttggctttgctatatatgtgatgcaggtatgccccgattgatccctaccgagctccacctatacaacctagtagaatagggacaattcggcaaacatgcatggtgaggatccacaaatcaaaccacatgagtgatctgagagaaggtcatttgaggagtaaagctactttgcgaaaataaatgaaaaccctaacagattgataggaggaaaaagaaggacttgaatcatgaccgttccattcatcaatttcccaagatggtaagttagatagggcaaaggttcataggtacaggtatgacttagaataatttgtgtacttgtattgtatcttgggaaattttattccacattaatccttaacctttactcgggacgagtaatgagctaagtgtggagagttttgttgacggttgttaagtgccaaaataacaccgtcaatacttgcagaaaaccataaatgtgaaacatccaacatagtggtaggatttatttataacaatttccacgagtgttggtgtatatttgtatgcaggtgatcaaccaccaacgttgggagaggatgaggataaagaatggaaatatattccgtgctgatggactcacatggttttgagctacaacatataaaatgtgcaatcatttggagccaaaacatggagcatcatgaagtggagcccacatgtcagcatcctgaagaaagatgtgggccaggggagccaaccagggttcggccgaacccctagctggcccagtccagcccatattcggtatgacggttgtactcctcatcccaatgatggttgtggccgtttctaccggtggaaactgtcatagagaggacacttgtcaagaggagatgaagctagaaggaatatgctcatatgatgcttggagcatctccactctctctaagcaactctccacctataaatacccctctcctctccctcattcacacacaccaaagcatgagatgaattacaagaggctctagtgcactttattgtatattagaatagggagagagtaagctagaaggaatcggaggaatcccggagttgtcggtaatctcctcttacttttgtatcttgtttattactctgctttaatagaaatatcattatgagtaattaagattttcttagtgagaattacttcttggttagttcctaattagcatacgggatcattgttccctatagtccatttatttgtagtgattgctttagtgtttgaaggacgcggtgtctgggtaattactctccagggttgctgcgtatcccacggtacgtttgaggtgggtgtagaggtggtgacagccctcaagagcacttcagtgccccctatccaggtacatagtagagcgacatctgggaacagcgagttgccagtgcctgaagtattgtgttaggattaaagttaagctttccctagacactgtttctcattaggaaatcctctctaccctctgcccatattagctttgtgtcctcggatgaacctgacgaggagataaacacacacgttcccttggattcgatacccttggaatacttcgtaggggaagtgctacatcggtatatccgtgcgcttgcggattctatccgtgatcgtaagaaataccaacagtctgtggcagcacaggccactctgggattgattgcctagaaacccgtgaagaggcgatgtacatgggcaacaacaacaacgagtatcatccacaatgaggtcagtggtggaaccagccacgcctattctatcaaggaggtaacaataacagtaatttctgtaaccaaccctccttgaaagatctcgtctttgcgcaagctaaaaccactgatgctttaggcaaaaagcgagctgctaatgacaaggtcttagaaaactgttggcggctgttaaatgtcaattctataccgccaacatctgcataaagttcagataataaaacatccaacatagtgataggtacataatctcacatattccatatgtgttggtatatatttgtttgcaaatgataaacctcgatgatgggaggaaaatcagactaaagtgaggagaaatgtgtacccctgcaaggatgggttgtgaacttcatcaaaacatcagtaaatcggcccaaaataccgaagaatgaatagaggaggaccggggggaacatgagctgatggccaggccaggagggcccagcccaggttcggccgaaccaccacctccactgttggatgtggggtttggcgtggacgtcccagatgcatccctaatgacggttggattgcacttcggacatttccccttcgccaatcgtacctacccctatataaggacatcagctcactcacttcaacacacactcccaagcttgagatgaattataagaggctctattgtactatattgtatactagaataggaagagagtagagtagaaggagtcggaagaagtccggagttgtcggtaatattctcctatttcttttattttatttattactctgaagtcaatataatattcttcttgagtaatttggatttatcttgtgagaattatctcttggttagttcctaagtagcatacgggattattgttcactataatcaactagaatatattgattgctttggtgagttataaacactaaggtagatattaattgcttagacatggtgtttaggtagttgttatccagtaattgctgcgtatctcacagtacgtttgaggtgggtgtagaggtggtgacagccctcgagatcacttaagtcctccctgtccgggtacgtagtagagcgacatttgggaacagcgggttgccagtgcctgaagtattgcattaggattaaagttaagctttccctagacattgtttctcactagaaaatcctctctatcctagcctatcatttgcttggtgtccttggatgaaccggaggaagatctgatcacacacgttcccttggattcgatacccttggaatactccgtaggggaagtgctacatcggtatatccgtgcacttacagattttatcagtgaccataagaaataccaacaagcatttctggcaccgttgccggggaatggttgctgatcatttccgaaccctgttcatcctcgcatcctttttactttttttttaccttcacccctgctatcctagagaagtattcctgtcaaactcttctcgaccatggagcaactgctttttgagctgtctgctcctcggggcgaattctatgaaccacctccttcatcagagcccatttatacaactggctatgaaattcgtcccgaactaattagtatggttagggaaaaacctttttttggctttgatctagaaaatctctaccatcatctgcgatacttttaacaagtttgctcatgccttaagattcgtggcatgagacaagaaactgtgcggtggaaattgttcccgttctctcttcaagagagagcaaagcaatggtacacctctaccgttggatgtgtaggcggtagctgggagaagttgcgagacagattttgtcttgccttctttccagttactcgtattactgccattcgagtagaaattctcagttttaagcagatcaaaaatgaatcaatcggtgcagcctggtccaaattcactaatttagtgtagtccggaccaaccctgtccttacccgagtatgtgctactccaacatttccatacgggtttggataaggagtctgcattctatctggacataaccgcttgaggatcgttcatgcacaaaacgccgtcagaaggaaggacaattttggatcgcattctagaaaatacttccttcatggcgcaatccaatgaaccctagccagaggcatccatgtccaagatagaggaacctctaacgatcgagccactcactgaaccatccacttctgctagctcgattgatgagaaggttcctaagcagccgactgtcgagaatgaagaaattcagactccggattatgccgcaattctgttcagggacggctttgacgaagactacggcaataccctgaactattttagaaagaggaaaccacccgttcctttgccacctcctaatcctatggaactcgggttcctacgagaaactgtacgggagttaacatccataatgagcgatgaatggctaagggaggcagaactttcatccaaagtaattcggataaataccgctccccgaatcattccttgccatctggaagggaacgacgtcggtattctctacagtccaactgtccgggccaatctcgtttcctagtcttttgcattcgcttatttaagcgataaggcaatgaccccgactaacaaattcttcaaacatccaaacggaaatatcattgaaggatttgggattgtacaagatgtgcctgtctgctttgaagacagggaggcgatcttggatttccacgtctttgaaattcaagatttcgacatcctaatcgggctgcccattgagcaacttctcattaacacaccccgattagatagcctcaaaataatactgggagggaatgaatttcagttccattctcacgagcaaggatcgccttgaccgattccctcccataaattgagtcagcggaggaggttagtgcagctccccactcacgagtctcccgaggcccttctggaagatgaggtccccgattttatcaaggaagaagcagatcccgttgagactctcgacctgccaatcatggaaccgtcacctcgacctccgcttgagcataaacctctacctccaggcctacgatatgctttcctacacaatgacagagaagctcctgtcataatcagtgacaagctctctgaaaacgagactcaacgtcttctcaccatgttggaaaagcatcgttctgttcatggctactcgcttcaagacctcagggggattaatcccgtgctttgcacccatcgtattcctattgaccccgagagtactccttccagggaacctcaacgatggcttaataatgcaacacgagaggttgtaaagaaagtggtcttgaaactctagcatgccgggattatctatcccgtaccatacagcgagtgggttagcccagtccaggtcgtgccaaagaagggaggaatgacggtcgttgcaaatgctcaaaatgaactaatcccgcaatgattacaggaaacttaacaaggctacaaaaaaggatcatttcctgctacccttcattgatgaaatgttggaacggctggcaaatcattcctttttttgtttccttgatgggtattccgggtatcatcaaattcctatccatccggaggaccaaagtaagactacgttcacatgtccgtatggcacctatgcatactataggatgtactttggactgtgcaacactcctgcatctttccaaatgtgtatgatgtctattttcttggacatgatagaggacattatggaagtcttcatggacgactttttggtctattgaaagaccttcggtcattgtctacgaaatttagacaaagtcttacaacgatgccaagagaaggacctggtacttaattgggaaaagtaccatttcatgggccatgaaggaatagttcttgggcatcgagtgtccgaacgaggaatcgaagttgatcgggttaaaattgatgttatagatcagcttcctcctcctgtgaacatcaaaggaattcacagcttcttgggacatgccggcttttatagaaggttcatcaaggacttttctacaatcgctagacctctgaccaatttgctagccaaggatgcgccctttgtgttcgatgacacgtgcctaaaatcttttgaaattctcaaaaaggcactcgtctccgctccaatcattcaacctcctggatggactctgcccttcaagatcatgtgtgatgcaagcaatttcgctgttggtgcggccttgggccaaaccaaggataaaaatcatcatgcaatctgctctgctagcaaaactctaaccggagctcagttgaattatgcaactaccgaaaaagagctgctcgcggttgtttttgctatcgataagtttaggtcttacttagtgggaggcaagctgataatctatactgatcatgctgccttgaagtacctgctcactaagaaagatgctaaaccacaagatggattttgctgctccaagaatttgacttagaaataaaagataaaaagggagtagaaaattccatagcagatcatttgtccaggctgcagatcactgacacgcaggaacagccgataaacgacttcttgagagacgacatgctgatgatggttcgcgactccaacccgtggtatgccaacatagtaaactacatggtatccaagtacataccaccaggggaaaatcaacaaaaactgaattatgaaagtcgccgtcatatatgggatgagccatacctatatcgggtctgctccaatggcttactatgaagatgtgtgccaactgatgagaacttaagatcatagagcgatgccatgcctcaccctatggtggccattacggtgcattccgcactcaggccaagatttgacaaagtggtttcttctggccaacaatgtacgaagactcaaaagaattcgtcagaagatgcacaagctgccagaggcaaggaggaatcactgctcgcgatgcaatgcccctcacatacaatttgcaagtcactaaacgattaagtagagatgtatgcaaagaatgtcgagatattcgatgtttggggtatggactttatgggacctttccataagtctcgcaactgcgagtacattctggtggcagttgactatgtctccaagtgggttgaggctatgccatgcaacaccgctgatgcgaggcatgccaagaagatgttcacagaaatcatctttacaagatttggtatccccagaatggtcataagtgacggaggttctcacttcattgacaaaaccttccaagacctcctacgagagatgggagccaaacacaatgtggccactccttaccatccgcagaccagtggtcaagcagaaacatcaaacaaacggattaagaatattctgtagaagacggtcaacaaaatggaaacaggatggaaggataaattgtcggacgcactgtgggcataccggacagcgtatgagacacccattggaatgtccccatatcagataatctacaggaagtcatgtcgactacccgtggaacttgagcaagtatactgggccatcagaaactggaacatgggactttgacggagcaggagaatggaggaaaatgcaaatcaccgaacttgaagaatggagagagaaggcctaccacaacgcaaagatatataaagaaaggacgaagcactgacatgacaaaaggataaaaatcaagaaattcaagccaggagacaaagtgctaatgttcaactccgaggttaagcttttcggtcacggaaaattgcgtagtaaatgggaaggaccgttcaacgtcatcaatacctcttcgcacggggcaatcactctccgcaacgattcaggtaatatattcaaggtaaacggtcaacgcttaaaaattttcctttagccaaatgaaactttagatgaagaagtggatgtcgttgaattaatcaattatgaaccatgatgatctcatcttatgcatgcttaaaaccctttataattgtcatgtttgtgcttagcttagaaattagtaggcttaggaaagaaaatggaggcctgccggacccaccagggttcggccgaaccagggcggcacccgttcggccccatttttggatggtagactcccccgcccgtcctgagtctgtttagatgcgagtttggaggtagagcgatcggatcactctcctgagctagttcctctctttcttcctcctttgcaaaagcctctctattcaatctcccattcaccctcaaaaacctttgatccaagtcctagtgaacacccatggctggtatatctcaggacgggttcccggccaatatcaagaagatgaggtgaagtcgtcagagccctcgatccataagctcgccgtgcaagtgaagaaactccgcaaggagaatatagagcttagggatcgcaacacggagctaggggtagagcttgctgaaattagaaataatttcgatacccttagtcgcggtttgtgcgctaagatcaagcgcgcattcgtagaaatgggaaaggaaaataagtattacgctaattagatgtttcctttcccatgaataaaataatagtaggtggttggttttatttttccaatcatgtaagcacttgctatgaataatgtggctcattggtattaaccccaatgtttgccaaagtttatttttgttttatgtttaataaaattcaggttttgaataagtgtgggggagatatcccagcttctggcatgcagataatctgaaaattgctgaatatctgaacacctggaaagcactaaactctacagaaaattgcagaggtagtggacaccagagtggtccggccgaaccaccaggttcggccaaaccagtgttggccccaatacctctcagttttcataggtaagcaggtgagcacgtcttgtatctgtatatctccaccatggtatagtactagagctgaaaattcagaaaacaatcggttcaagcataagaaagataaaatttccaactaatgaaattcttcatatgattgatcttgtatatctatcattcttagctgaacttgtgcttgtgaaaaaccttccatgtttagggaaccttttgcatctaattaatagctttatgtgagatgattgaagatgaaaggaattcttgcaactcgtgttatgactcttgggaatatgttttcaaaataaaattgttttaaaacctcaatcctccaatttacttcatcttatacttaccaaggccatatgcaagtacattactgatcaactttattatgcatatagttgcttgacattgtattaagctttgtcaaatttatgtgacttgtgttagatatctttcatactctcatgatcaaggggtcattgccatttccatctttttccacatatataattaagctaagcttctacactggaagtcggctttccatagaaaaaattccatttaaataaactcctatattagactatgctttcttctgctggaaaagttcgtggcaaaaagaagatgaaaaaaagaaaaaaaaaggggaggaaaggcatggctatgaaaaaaaaggggaaggaaataaaagcttgctccaaaaacattgagcaatgttggaaagaaaatatagccaagccccttccatgatcatgccagaaaatattttacttttccatttttcaccacaaataaagacccttgatctaggagtatggctgatgatcttcttaagtccatatttttggctttgcaatatatatgatgcaggtatgtcccgatttatccctaccaagctccacatatcagccttagaataggggtgaattctggcacattttgccttagtgaggatccaaaaagaaaatatacatcctagagagacaagagagagagtcaataggaggagaagagctgatttacgaaaatttctaaaaatcccatgagtctgacagagaagcaagaaggactgtaatcgagatcattccatttatcaattactcaagatggtaagatagctacttataaagtttacaggtacaggtatggttgtgaatgatttatatgcttgattcataccttgacgaaattcattctgtactaacctttactcagggatgagcaaagggctaagtgtggggggtgttgttggcggctgttaaatgtaaattctataccgccaacatctgcataaagttcagataataaaacatccaacatagtaataggtgcttaatctcacatattccacaagtgttggtatatatttgtatgcagatgataaaccccgatgatgggaggaaaatcagactaaagtgaggagaaatgtgtatccctgcaaggatgggttgtgaacttcatcaaaacattagtaaatcggcccaaaataccgaagaatgaatagaggaggaccagaggagaacatgggctaaaggccaggccaggagggcctagcccaggttcggcagaaccccttggtttggccgaaccaccacctccaccgttggatatggggtttggcgtggacgtcccagatgcatccctgatgacggttggagggcacttcgaacatttctccttcgccaaccgtcatacctacccctatataaggacatcatctcactcacttcaacacacactcccaagcttgagctgaattataagaggctctattgtactatattgtacactagaataggaagagagcagagtagaagaagtcagaagaattccggagttgtcggtaatcttctcctatttcttttattctgtttattactctgaattcaatataatattcttcttgagtaatttagatttatcttgtgagaattatctcttggttagttcctaagtagcatacgggattattgttcactataatcacctagaatatagtgattgctttggtgagttataaacactaaggtagatattaattacttagacgtggtgtttaggcagttattatccagtaattactgcgtatctcacagtacgtttgaggtgggtgtagaggtggtgacagccctcgagatcacttaagtcctccctgtccaggtacgtagtagagcgacatctgggaacagcgggttgccagtacctgaagtattgcattatgattaaagttaagctttccctagacactatttctcactagaaaattctctctatcctagcctattatttgcttggtgtccttggatgaaccggaggaagatctgatcacacacgttcccttggattcgatacccttggaatactctgtaggggaagtgctacatcggtatatccgtgcgcttgcggattttatctgtgaccgtaagaaatgccaacaaaaacataaatgataaactagatggctttgcttctgcatttcaaaactagctaagctttaacaagatgattgaaacccggcaggctcaattagctgttttagtacctgcaaatgaatcttggaggattctggggcagcccgaatcctccgtttaaaatgttaaggtgatcacaacgaggggaggttagtccactcgtgatctgctgtaccctaaccctgcagggactagcagtatcgccaaggaagcgccatctggtaattcggctgatgaagaggttcagcaagagaagattgtgtagcaggagtactacgacacacaattgctgccgtttccacaaaggaacataaaaccgtaagtagacgagcagttcgctcgttttgttgaagtgatcccgaaaaatccacatcaacgtgccattgttggatgctatgcaagtgccaacatacgcacattatctcaaggacatcctcgacaataaaagaccgctcccgccaacggaggtggtcaagctgacggagcagtgcagcaatgtcatactcgacaagctcccggagaagaagaaagatccggggtgtcctacgattatgtcaggtcccgaaactaatgattccgaaaccgacatgtttagactgtatcaagccctggattagtaaattgatataggttcaacaatctagatcttcattgcatacgtttgaataaggctccaaaggatatattattacaaaatatatgggtatttacaaacttgtggcaaactaatacaacagaagctatagaatgacttaactctaatgtttggctatagacttaaaccatctatctaatctagacttgagaattaggttgaaatgaaactaacttatatgattgaactcccagcttaggcacaaactccaaaatgactctgaaaaaggtgaggttgaagcaagggtgagtacaacgtactcagcaagctattatattcaataatgtatgaaatagtagcatttgagtaaggctagatttaattgcagaaagcagaggatgtagaagaagaaagcctgtaatgactttaatgcaacagtatttagtaaaatcttgaatttggtttctaaccaaataccatatgagtcccgctactcaattctgtgagcatggctattcgaatagtttcataaatattctactacagtagatgtacgctttacccacagtccacgagttgccaatatttattagcttagtcatggcctagtattacgttattaacaattgtggcacctgttccatgaactctagtccccatgcgctctaaacgtaacgttatcagcagcgagaggagttctggcgctcccggggtctttagagagaactgattgtatgacaccatgtcatcgcaatcagggttcacaaacagactagtcatcataatttatctcaaatatttacctgcggctcggtaaatattacaatcgcccttcgcggcgtaaatttgcctcctgcgcgaggacttacaaaagaaaccactgtacagaggtaccacattgttaattaacataatatctaggtctgtccccattctagaagctacggtcgtactcgttcgttcttcacaagtacttgggcagtcttatgtcggttggaacagtactagccacccggaaatcaaccattttctactgtactgtttcaatctaagttcattatattttatgcagtctaactagccatggctaagcaaaagctagcatatctggtttgctatgttcagtttatgcgtttgaaatcatgtatgactaatgcatagaaaagagatatagaatataggacatttatgctcaaaggagaggaataataacttgctttgctccaacgcacataaatccgagatagacaacctgattatccgatcctcgaaataccacaggttgtcattcaaaatacaatagactctacttgaagaagagaaagaaccaaattcaataaaagccatgaaatgtcaaaagaatgataaatggctagaagggctagagtttagagtataaatatctcctttataaggtatataggttattgggcttatattagttgtatgatttctaaagggttggaggctagggtggagggaggatcaagcaactaatgttgcttatattttatgtgaaagctttgattggttggaaggatgggaagtagctagtttggatagttgtcttggttaggcgggtatgtagctagctatgatttggtggcggtaggtttaggtagtatcatatctagggtttggttatatgggagttaattgtggtgtaagacaatatatcggctaggttctatattttatgtataggttctggtgggtgaagagtaggtggctgagagtatggtggataggcgatactggtgggtgtgggacttagatgacggttggaattcaactaacaaggtgtcagctagagtttggttgtatgctagtcgatgctagagcataatgactagatttggtgtcttctgtagtcggtgtcagcaggcagcatatcgactagagggaataggaggtgggtgcaggtttagtagggtggaagtgttactccgacaaccgtgggtggcggcggagcggctaggatcacacagagcccgagaactaactgtgcacagcgtgctgtggaggtcgatggaatagtgaagcttcgaccgctatacgcatcgaggcgtggggtgccaggagcagcacttcgaccttgggattggtttatgccgggctttacaaccaacggttcgacgtcggggccaatagaccacgcgaacgtccccatggaaggcgtaaagttccaaccggcggtttttagtggctaaagagtatttttgggtaaaaaggaaatatttgaaaggaaaatctaagtttaaattgggaattcaaatataagattaaatcaaatatttattcaaatagtatttgaataaattaaggaaattcaaataaaatattaaaatagcaaatttggtatcaaaatgtatattttgaatttatataaatttaggtccaagtttgactggaatcggatctacggtttaggagatatgggcttctaaagattggatttgaattaaatagagaaattgtaaaaagtcactgttgatggacctacctgtcagtaccttttttccttttctttttctttttctttctcttcttcttcctcccgtcgttctcttccttccttctgcttcttttttcccgagccaatagagagagagagagggagagggggcagcggctttccggcggtcggaaggcggcgacgccggtgacgggtggtgttcccgagcaccgcgcagccggggagggcggtggctggccgagagagtgagggagaaggtcggaacggcggatggaagagctcggtttggtcggttatggtggcgacggtggtggcttaaatcggagggggaaaggaagggagaagtaggggaatggatttgcctcgtcgaggcaaagttggtagcacaagggtttggattgggatgctttagggatggagatcgatcgatggccgacgatggtcgccatgggaggagagagagagagcttggctcatgtgtgtagagggagaagaagaactcgccggctatttatagggaacgatagacggttccggatggtcggttcggaggaggaggaagacgaggaggacacggcgacagctgcttaggggagaagaaaacggcgccggcggtggcctgtgattggtcggcgacggcggcgcgtacacgtggctgatagaactctctattggatcacctaggtttagatctagtcgggtggttctatttgagatgaatgactgaacaacaatagagattaatggaaaaagggtttagggatgtgactggttgacgcgttggatgaggaggaagtcccggccatcgtcgttgtcgtcgccctgcttgacgtgggcggcggcgatggtggtcgtgacggtgacggtgctgcgcagcagtggcggccgtaggcgatcccggcgaggtcgtgggcggcggtggagtctttccgtcactggctgcgcccccttgatcggttagggttttgggg

SEQ ID NO: 22335 - DNA, 11590 bp, Oryza sativa
tttatatggcacagtgtgacgggggcccaccagccattgggctgggcgcccccgatcagggcgcgggtcaaggccccattgagccgttgggctcaaggggagggagatctatctaacattctccctcttgatctcagtatttcttttagctttttctattccatcacagatttacatatagagcatgtttcatcatcacggttaattaccgctggatttgacagccactatatacatctctattcagaaacagatactttaacttttaggccctacagtccaggactcataaggcttcccttaaacccatgcatgctacatgttctttgaacatgttgggaggtaggcctttcatgagcggatccgcgagcatcctctctgttcttatgtgctcgagactgattgtttgatcccagactttgtctttcacaacatagtactttatgtcaatgtgtttggcagcaccacttgagggattgttgtgagagaacattactgtgggtttgctatcgcagtataactttagtggtttctcaatactgtcaaccgcctttaaaaccgggtatgaacttctttagccagttcacctgccccgttgcctcatagcatgctataaactcggcatacatagtagaccctgcagtgatggtctgttttgagcttttccatgaaatagctcctactgtgagggtaaatacgtatcccgatgttgactttgtattatcttttgcaaagtcagaatctgaataccccactgtctggagcgattctgattttctgtaagacagcatgaggccttttattccttgcaaataacacaagactttctataccaatttccagtgctctgggcctggattactctgaaatctgccaagtaacccggtaacaaatgccaagtcaggtcgtgtgcacaattgagcatactgtaggcttcctacaactgatgcatttggctttgttttcatttcattgagctcacactgatttctgggacattgcgatgccccatacttttcgcctttgactataggagcaggtgcagcactgcatctgttcatattgaatttcttcaacaccttttctatatatgccttttgagaaagtcccaatgcatactttgttctatctcggtgaatctctatgcccaaaacatgtgagtcctcaccgaggtctttcatgtcaaagtttgaggataagaatttctttgtttcctgcagtagactaacatcactactagcaagtagaatgtcatctacatacagaattaggaaaataaatctcccattcttaaactttgaataaatacagttgtcctcgacattctcttgaaaacccaaatttctttattgttccatcaaatttcaagtatcactgtctcgaagcttgttctaagccattgggctgggcgcccccaatcagggcgcgggtcaaggcccccttgagccgttgggctcaaggggagggagatctatctaacagtggcagctgtagtagggttgggcggcgggagaaggagagcacggcacggcgtcgatgtggcatggttggcaaggcagcggtgcaagccgtgggcggcggcgtgcgaaccacggcaacggtggtggcggcgtatccatgtacagaggaaggagaagggaggtaatatagacttattcctgactgggccagatgaaggaactttggcccaaaatgaataggaagctttgctaattttggataaattttaagaaggtattagaaatagaggaataagattttaacccagtatcatatggtatggactaaaggaaatttggatttttgaatgaaaaggaatgaaaataaatttcttagcacaagagcaatcattcatatatttgtaatagtattattcttgtgccgagaaggaaatcaagccacagagattaaattggtggctaggtcaaaaggaggaatttggatatttggatcaagagtcaaaggataggtttaagatcaaaggatgggctaacaattaattccaataaaattggaattactttggtttaggttcaagggcaacattgggaaggtttcttggactacaattcacaaaggggtttttaaataaatttaaataaaggaaatcatggtaaaaaaggaagtatcaaatcacgatataactgaagataggttttaaataaaagtcataaaataatttaaataaacgaagaagttttacgcaagttagttttaggaggtctctctctctctaattatattttcctaggtttagaaggttaataagaacataagaaccggcatgatcaggaaattcttcccgggtgcacacgagtgaggacaaagtgtgcagaaaagacttgtgttagtctgtgagggcattctatgacctatgagagctatcagatgtaagcggcccggcctgggagaggcggaacgttacagtcaggatcaagtgtgggcaaaatccatagaatattcaagtggtcgaagtggagcatggtgaagttcatgcagaatttcctgaaaaaggaaacaacgtttcccaggaaccgttattggaagacgctagtaaaatccagtacaccggccaagaagctagagcaaccggctcagaagaagccatctcccgcaccaaaaccaaagagggtgtggaaggaaaagccaaagacgcccgctccatcacctccggagacgggtggaaaatctgcgaactaaactgaaaggaggtacggtcttgcacgtcggacccaaaatgacacgaccctcgccaacaggtaaattggtatgtatccgcatatttattttcatcaatttgaatttttgcatcaacacatgtttgcatcaacacaggtaaattaggtttactaacctcttgcagagaatgaactcaaaatggaggagaatggacatcaaatcagacgatcaatcaatcggacgatgtcgagaatcagacttatcaatgaataggccaagaactcagaaatgacacgactaattgggccaaagttcagaagtctgtggaggggagaagtccaagaagccagcagccaaattatgggctggttgggccggcctctggttcggccgaacccccctcatcgccgttggatgcagggtttctcctggacggtgtagattggcccccaatgccggttggagggtatttccgaccattccaaccatcacaaccgtcattgggaggctatataaacccctcactctctccatttcaaaacacactccaagcaaatctctctcattttctctcaagtttagtttagtgttcttaagctagtagagtaggaatagaatagaaatcagagtccgaaagccttcgaaagagttcgggtatgactctagtagctctcctttcctcttttgtaagctttgtactttatttagaatactcttctttatacatttcttgtaacaaacccaaattgtagaaacttggaaattcaatataatgaaaaaaatattattgtggtgaaaatttgttttaggtgtttttggatcttctatgcatcatttcattttgcatatataaattaaattagaaaaaaaagggtaatacgattagtgatgagtataataaacaacaaatttaattagttataactcagcttttgcatctcaattaaaaagatgaaggcaaccaaaattaatttaaattggaataaaagaaggaaacttgtttgaatttccaaaaaataactgcacatgagaaaaatctcaaaaaaaaaatcaccaaatggagttcaccactacagtaacttgcagtaaaattggcgcatgcttttgagcagtgtagtcattccaaaaaaaaaaaagaattcgtcaaaccctcagccctctctaaaaatccctgggaagaaatgttcctcacctcccctattcctgtacttctctgatcaacgggcccaagcaccctggaccccacctgccagtggcccagcaccccatcccactctccttctctttcccatctctttccttgcagatatttcatcgaacacataggatgcgagccgaaagtcgtcgcctccaagccgcccattcctcctctgcccgcgaatctcactgcaaggctgtgcaaagctgacgacgcctctgccccgcctctgcccgatgccctgccgcgcccagcgctgccctcgcagccgctgcgcccaaccgacgccgtccctctgcccggagcgacgagacgctacaaactcgaccgttgcttcctccgtctgcaaagccgccgacctgcgtctgccgtctgcaaagccgacgcccctgcctccgtgtctcccggctgcaaagccggcctcgcagcgcgcctcgccaacccggagccgacgccctctgccaaagccgacgcccgaagcgacaaggcgagaccgaccgcccctggcttcctctgactacccctgcactccctctgcaatccctgcgcaaagccgacgcctgctgcccgccgtgttccccgccgaccaccgcctgcgcgcgcgagagacgccgaacgcgtcacgacaacctccgcgtccgcctctcgctcctccctcgcctataaatcgaaccctcgcgctagctaactctccagaccaccttcaacctccactcctaaagcggaagccctaaaccctctgattcaccgggaacggccgcgccaccgtcgcgccccgcgccggccaaacagaacgccgccgctgagcccacaccatcgagccgtcgcctcggtgagtttcctctcgattcctcgcgccatcaggctcataggacctccataaatccattttcgaaatctcttttatgacccctcgaccggagagccgccgccaccattgccgccgccgaccgcctcgggagctcgtcgccacgccacctcggaccgcctccgcccaaaaagaacgcggggtaagccaccacatagtccctaggtgcttccctgtcctttaatcgagtcgccgttcgccatagccgccggccgccatcataccgaaccactgccgccgcttgccatggccagccgcctctagccacccccggccacgccaccgccactaggagatgcacgtgaacctcctctagccacccctgcctctgccctagccagccccgcggccgctcgccgccggccagcccatccggagccgccctcgtgctcccctctgtctgttgcgaacggaggaagaagacaggacctgttcgtaaataagaaaaactctagggctcttgatacaaagcgccaatacacttacatgttggaccgagacctagatctcaatagccgcaagattagggtctgttctgtgaaacatcgagacacttacatgtggaccccactgtttaaagtggatgcgcgctaccgtaatacgttttgcatgtaggaaagcgtactctatatagtacgcttcagccttttgtaaagagaaattaataaatctaagaaaatggtttcggttaattatttatgcactataaaatgctgaaactttgtaaaatcatagaaaattcattttaactccgattgaggtgaaccaaatttcgttagattcataataatgttgtctttaatactgtacactcaaattatcaccactgttgtgaaaattttcactaatttaaatttgaatagtaaacttcgtatttaccgtactttaaatattagaaacacgataacttgcacatacaacatcaggtttaggcgattctttctcatttatattaaatcactctctttacactgaacatgttcatgcaccatgcatcatattttatcttggagttttattggatgttcatttgaatgtacgtttaaatttaattagaggacgaatcgattgttgccgttggcgagagtgtgcaggaccaagagttatttgaggaaccaactgagcaaggcaagtcctattcaattcctacttcgatcatgttgaatcctatatcttcgcaaatgctttattattttataaattgcatgcgatgttttataaagaaaatggggtattggtagaaataacctaattgctgcattacctaccttgatatattgattatcgttgaagccctaggctgagaatatgtgtgtgttgtacatgcacaatgtgggtatattcgagctgctactatagctacttgcttagccatgcttagaaaatttccaatggttatatatgacatggtaatcattctttacaaatggaatatttttatagaggagttgcctttgttgtttatgaagattggaaactgaaaataatgattttagacttgggcggcaagtggtgtgcatatggtagtagttgcgcaccgatagggggagtgttcgcctaggtcaattaaggactgaactacgtgtcaccaactaagattacagtgcaaccacatgtgttggttatggggcaaccttagcttattatgttgcttattgcttaaccttgcattgggaggccgttgtagtagggactagtctgagcaatggttcataggagctacacatgtgaccctctatgggaacggttgtgttcgccatatggcatgggcgtctgagcatatccaatattactgatagtgcctcgttgagggaacggatgtgttcgcctcacggcgttaggattaggttggggcccatctttcctagtggcattggttcatggccattgtggagaaacactctccgtgcgcatgcaaggttaatctttgagcaatgtagtggcttcgtcataggctagcaaaacaggtaccggtttggtatcgcgtggcatggtttacatgattgctagctcgtgtcatgtgcgtaaagtgcacaaactctgcagagtctaaactaattgattagccgtgctcacggtcatgagcgacttggtgaaatgatacaagtataatgttcgtgacttttgttaagtaaattctgaaatgggtatggtaaataatggtgatgatttatgcccagcatgggttaagaataaaattgttacttgttgccatggagggcacaaggatggcactatgataacattaatgttactattactgttgtttatcctttgatttacaaaatttcgttgcaatctactattatttactattgtgaaacaaaatttgctttatgctgaaaatgagccacaaatatagccatccttgatctcagcttacaataatcctaggtttcccaaggtttgggtaggacttgccaatacctagtgtattgacccacctattgttgttgtttttagacttggatgcaggatgtgaggtgcctagtgacgattactttgcaccgggtaccggagtttttgaggacggttctttctagggtgattcttagtcggttgcctgtgtggtttggtagatgggcataccggaacatatatatctttatcttttccgctgcgtttaaactcttttatttggccggtcggcctaactactatgtaagacctatgcaccgttaagttatgagaaccacttatctacttatatgtcaagtatgattgtatggatgtgataacaatgttgtggacgcgtgtactagccattgatcatgggactagtacagtgtacgctccaggtattcgggaattcaatccccgggtgccgacatttctggtattcaaatattttccgagtatatgaatgccagcttagtattatgttcatgttatactgattatactgctagcttatctgggagatgcatcggtacgggtataatgtttgcttatgcaattactctatgtcatgacgatgatattagagtagtatctggtagtttaggcatggtgtctagattacgggatatcattatttggggttatatgctgccgatgagaggtgggccgctgatggtgatagctcagtacgggtattcactactagaaaaatcatttgttgccacgaaaaaaatcgtggcatcaatactcaaattgtggcaatagatacatcttgccacaattgtaaaatcgttgctagccgtggtaataggttattgcaacgatttttattttgtggtaataaatttagatgttgccacggaatggatgtggcaaaaagtcatattgcaacacttcacatcgttgtaataaaaattattgccaccactccatatgtggtattagttttacgtaccaaattaaaagttcaaatattaatctatcatcctatctatttatctacttatttttttgattttgtgtcttggctaggattcgaacccaagacctatccttcacgcgtgctctcctttaccaactcatctacgcatcaattctgttggaaaatgcatatcgttccatttgagcctagctaactgagatttgaatcatagatttgaatatctaaaagatttcaaatgaaaaagttatcacctataaaattgtagatctcgtcgagagctataatttccatataaaatttgtctcaatccgtgtccatatgaaaaaattaatttaaattatgagacgacaatttttttattgcaatgaatttgttgatcgtggcaaaaaaaaaatagtgaaaagtaccatgtactatataaattgccacaaaaattaaaattgtggcgatagaacatgtttttttgcaacagtacgattttttgtggcgatatatcattttctattgcaacaaaagtattaaataaaacaacgattataaatcgttgcaataaaaaataattatttgccacagaaaaattatcattgcaatagtataatatattgctacgaattattttttgttgcaataatttggtggcaatagctcaattatcttgtagtgattcctccgtgtgtgtatatagtcctaagttaatttcttggggagggtactcctccgtatttaaccccggttgtatgatcatgacgggttgtcgtaaggaactcgacagtcaggggtggcttctcgaagtaccaggagggcatcgggtagagggtattagctagttaatcatataattagaatgtatgtatactatgtatactagaagtataggaatatattttctttctattttctttccacttagcttagatattttagtatgagaatgagtagctccatgcttgtgtgtcactctaccctttgatttatcttaacccctacttagactatgattattacaagtaatatataaattattagtatagttctctctattatgatcttcccatgggattaaacaaatatgatacccttggaatactctcgggtgaaatgctacaatggtatatccgtgcgcttgtggatgaactctgtaaccataatatatcaagagtatttctgcgccattgttgggaattatatttctagtaatgtcgttaagaaataccaacagcgagtcctcttcacccttgacacagtaaagaaactggaagtttggactgaggtgctgctggatacaggctaatcaaggccggccttgatgccaacatggttgacaacgacttccaccatcagagcttggccatcctgaactagtggagctgacggtgttggctctataccagtcctatggacatcagtcaaactcaacctgatgacttggaggaggctgcgctagacatggtttttgcgcatctcttaaaggtggcgcaatgcctgtcctgaaattgggattgctaagacacacgctgcaaccaagatcatcgatgtaaaagacgctaccctagagaacgcggaagatgcccctaaagatctagagctagcttggtcagtgcctctaatcctgcatcaactttatcgtgcaaagagaggaaacattatcagcatgtgacccttgctgagccagtgacaaagcaaaggaggctggtgactcctccccacatcgtgagcgaacaggactacttcgcctaggcaatgttggacgacgacgaagccgggacgatacacctcgatggttcggcgatattgtttccaacactgtttccggccaatgcgcgttctgaatttggcaagattcaatctcctttgattatgtgtcgatatacatctccaaatctgagtctatcttgtcaaatttcgctcttaacaccggattccctagcactgggcttcctcttgggacttagcaactaactccttggcccagtgatgtgttggttaggcacaactagttaatgaacatgttagttctatagtagagccaccatgtgttgagtttaaacatgttattcacattgctagtgtcacgaccgggaataacccaacaggcgttccttacgtgcgtgcattattccttgtcccaggaggcaaggtacaccaaaagttgatacaattcagagtttaacaagcggaagcgtaaatagttaatttattacatgggcggcgaaggcccagcacaccagaagacaaacgacaaacagcggaagactagggcgacgaccacaggcgcttgacggcaggcacgagctagacaccaaagccttcatcttccaggaactcctcttctgagtttaggaaaaattgagcaagactgagtacaaccaccgtactcaacaagacacacccacaagtgcaggataaatgcaagggagtacaagggggttataatataaagggttagggtttgcagtaaacagcattaaaagacacttagttgctcaaagctattttgtaaatacgattctagagctatacaagattattaaacaaggccgtcaacccacacgaacctgccttaacccaaggcctacgatgattcagaccgaactggcaacccgaccctgggtcccagctcgtcccaagccaacccaggccaaccattccacattttagttgttaagcaggttttaagaattaaaacactaacttgggtacattgctcggcttgcccataaccgagggcgcggctattcgaatagattatactctgatcagaggtgtacatctttacccacaagacacatcttcctcacgtgtaaccacgtgccacataccaccacggtatacggacggaagatgtgacatagtttccaacccatcctagccatagacaagagtaccgacccaaccccacctacggccggaacctccgggacaggtaggcaggactgagcccctagcagcaggacaccggccctgtgccatgacatctcgactaccgggccgcagctcgtgtagccttcatttgccctagagatgtccatcgacccccgacttcgtccatctccatccgtgtacttttgtttataaccagactgagccacaaactaagccttacccactagacatgtggaagtacggtagtgctttgcaacagaggcccgaagaccggtccctatatggccgaggtgtgactgtcaaaaccatgcaccccgagcccagcctaaaaccattttgaggattttgaatagagggggaggtgtgaatccaattccacaatagtccaacaattacatagtgtccaggtgaaaagagtattcccaaagtctagagttgtaaaaccacctaatgttgcctaattaaccagcgaagcatctacctaaattcatactatatatagaaaatatttgaattcaaattcaaatttgaaacgggtatataaacttttgacttataaactttaggtctataaactttagatgtatagaaatactatatatagaaaatatttgaattc

SEQ ID NO: 22336 - DNA, 1933 bp, Oryza sativa
taattcaaattcaaatttgaatcgggtatgtaatcttttgacttataaacattaggtctataaactttagatgtatagaaatactatatatagaaaatatttgaattcaaattcaaatttgaaacgggtatataaacttttgacttataaactttaggtctataaactttaggtgtataaactttagatatatagaaatactatatataaaaaatatttgaactcaaattcaaatttgaatcggatatataaacttttgacttataaacttttggtctctaaactttagatgtgtaaacttgaggtgtataaactttaggtgcataaatttactaaaataggaaagtaatgcggtgccaaaaaagaaaaccaggtggagggggggggggtgaattgatcgctacccgatcgcccttgcgatcgaccttgaagaggatgcagcagctggagggggtgcaggcgatgcccaggatcacctagaggtgtgaggccctccgccctttccttagatttttgaagtttttcttcttcttttttgcgtttgccgggaaaggcgaacaatgtacattcggcctcttccctccttattgtagccgaaaacgtccctttgggtatttggaatgtatgactctatcttagccactttttatggtcgatgcctttggcgtatatgattatgtcattttcgtattatgtaatatttcctcttctttcgccaattcttactatacaaatcgtcttttgccctttctgcacagtttaacagggtgttcgccaaaaattgtgtattcggcgaagcaaaaacaagaaatttgtggcgttgaagggtttgccaacggtgcgatgcccatttcggcctgtttattgcgaaatagtgataaacggccgcagctataaggtttttaaggttgccgactggctacaggcgctgacagctttcgcacttcttgacttgctcaacacagactttcagcatggtgggccagtatactccttgttgaaacactttggaggcaactgttcttgcggcctggtgtgcgccacagagcccctggtgtatgcactgaagcaaaggttagagtatgccggagcgatatagttggcccgagaccattttgtatttcgcggctctgagctgtaagcgctttgcttctgcttcatcttccgggagccagccgttcttgaagtatcttacgaatggggttcgccagtctgttggatcctcgcccagttctgtctggtcgattgccatgacatctaggccctctgcgggcacacttggtgcgtataggacttcgaaaaagatgctcggcgaatgtgggcccccataagcagtagatttcgccaaggcgtcttcttcctcgttctggcctctagataaatgttcaaccattatgccagcgaagcacttttccatagaccgaacagcctccaaatacttcttcattccttcttcctttgcctcaaaggagttatgaacgtgacctgccaccaacttggagtcggttcggatgagcaagcgccgaacccccaatgttttcgctttttttaggcccagaagaataactttgtattctgctgcgttgttggttgtgtcgaactgcagccttgcgacataccgaatcggcacaccccctggcgaagtgagtaccgccgcaacgcccgcccacttgtgcgaccacgagccgtcggagtacatcacccagggttgttcgacgggctcgggctcaggggcgaatgccagtgtccattcagccacgaagttagctagcacttgagacttgacagcagtgcgggcaacaaaatgcaagtcgaaaggggatagctccgccgcccacttgctgagtcgaccagtaacttccttgcctcggagtacttcgcccaaagggtactgcgatgacaccgtgactttgtgggcttgaaagtagtgttt

SEQ ID NO: 22337 - DNA, 10163 bp, Oryza sativa
gtttcccttagctgctagctgttgtaaatatcctctacgatgaccaaattacagttgcacaaatatgcaaagttacatgccagtcacctatacattataaaataattagatgcaagcaggaaaaacaaaccatctgtgcattaaatttttttccccaatatacttgggttgctataacagataattaagaattaaatactttgtctgtaagcagaacacaaatcaaacatcagctgtgcaagtgtgcagaaacagtattgcaattaggattgctactgttgccaggattcgatggctgaggaatttgggcaataccaggaagaaaatcaccgatgaatctgcggcgtgtcgatgctgctgctgtggggcaaacgatgggtgtgtggctggcggatgacgcgggggccatgcatctctggcggcgccagcggcgctcagcctggaaggcacaggcggcgatgggtggacggtgggtgctaggcggcacaggcggcgttcaccccggacggcgcaggcggcgatggcgtgggtagtaggtgcgcagccctggcgtcgccggcggcgctgagcccagacggcacaggcggcggccatggggctcatacgcgagaggccgccgtcttcacggtggagctaatggaaagattggaacagattttacaagagaaggagaggggtttgttctcttagataatatcgtaactacttccgagttccaagggagataaaaaaaatccgcatgaatgaggtaaaaagttggaaagattgatctttttggagggaacgagcaaaaaaaaattcctaccaaattgtttagcgctgattaatgtgattgtagagacggtctattatcctgtccgtaattagcgtatctacgtaagaggcaaagtgggagatgggctttaatagggacgacgtgcttagccgtctcttacggaacgtctctacaggccgtttttgcagtagtgctatggatacaaccattgctcacatcatggatgaacaaggagatatcaagatcaagtcctccaagtgctggaatccgattcggccacctgctacattgctgacttcaaacggccaccgaatctgcatacgaccactgttttcggcccgtaagtgcttgatggaaagctctcggagccctctttacagcctcattgccaaattccatgtcgtttggccgcaatcacataaataaggtgctgcgtcacctgtcttgggcctctggaattgtaactaatgtgattccactcctcatcgccgacaatgtcaaccaccgccagtcctctgagcgcatcaacctctgagaatgtcgaggtaagtacccatcggctaatcctctttcttttccgtgcaagattggtttttcttctgctcaatcttcgattttcctccttctgtagcatctctctcatcaagtcgcagtccctagtataaccgatgagttccagtttttccttggcccaattggtaacccagaccccacagagttcatcaatggtgaaaccaactgaatcccctttagatttgctaaccggatctaagcctatggaagaacaccttcaaatcttagccatcggccgaaaagagctggcccgcttggtataacaggatgtcagctagaaagttaaccaactgggaagaaatcggcatatcccaagccttggctttaactgcagcagacatggcaaaagatgagtccatgatggtagctgccacttacttctggtccacagccatgaataccttccttttctctcaaggaccgatgactccaactcttttggatgttataatgattactggcctagatgtgacctcatcggctaacctgaccatcttgaatatccaatccacccaagagttcaaaatcagaagcataggcggttggtcaggctatgttgccaagaacatgggtactaggccgatctttgcaagggagcatgcagctttcctcatgatgtggcttgagaagttcttttttcatggtccaagttgtggtcctactgcaaactggcaacatgtagacaagaaacaatttccccttggaaagtatctgctagagctatctgtaccaaactctgaacactgccataaccaagatggcctctggagtatcaatcggcacagggggtccctagtggttactgcagatctggctaaacttgcacaccagaatggttgtcaatcggccaccattagccgatacaagatttccaagatgtgagccgatcatcgatgatgatgcagaaagaatcactaaatgccgatgcaggtcctttggagaagcggcatcggttagcattgcatccaagctatcggctgaacccttcagagagtggttcaacaacttttacgatgggtttcccaaaaacactagaatttagtttgcatacgaaggacatggcacttgtaagctaccaggcgatttacggtttgatgagatcaactccgaaaaatatgacaaatctagagaagtattctcagcagccatcgtccttgcatccttcctattggcatccatcaaggcaaaaaaatccaaatgacatatgagttctatcatccgacaagtgctgcaaggcaattcggcatgggtcaactgccgatcagcttgttctttgccgataagatccagagtagaggagaaatcacttctttgcccataagatccagagtagaggagaaatcacatcaccacttatgatggatcggctgctgaacatagaaggaccacccctaggcagcatcaacaatatcaagctaaggatgttgagaagtgcatcctttgaccgatggtggatagagtggaaaaaacatcggcttcaccaatcgtcttcaatgtatctaatagatctattccctaagccgtccctcaagtaagaatcttctcctttgtcaattatgttaactacaagccgatgaattaatcttgaccttgtgcaaattctctcttgcagacaacagaatattctcctcctcatcatagcaacagcggtgtagagatccaatatgccccagggctactgctcaatggtagtggactatctcctccggtcatcggctacaatgcccccaagacttcaacactgctgcatggcatgccccgtgtgccaatagcccctgatgctggcagaaaaaagagagcaaaatcggctgctgcaccatcggctgcaaagaagaaacccaagaagcaaaagaccactgccgatgaattgccagccatagattcggatgtagcagaattcctgaagggtgaaacaatggcaaaacatgtggatgaagcggctgaacatgtcagtgaaacaagggaacaaactcctccagccgatccacctgctcctcaaagaacgccatcacctccagtacgtcccacatacaaaccaagagtatgtgcatgttttcaatcttcagcttaagtctattatgcctttataccaattctcaactttgattttcttgcagaaaaagattgcttccaagaagccacaagcaccagctgcatcgattgatttttaaacctcatcaactttcctctctcagttttttaaataaccgatgctaatttgtacttgtattttcagcctattcgtcctccaaccccaatttccaaatctagcgagccaactccatcggttgcaggcggtcaccatgtggaggaaaaagaagaagtggcagcaccagctcatgctgtcctgtaagtatataccttaagtttacaaatcatgtcggctgccatcctttttacttaactcatagtcccaatgtttctctttttcaagttttagccgacatgttctcttttgatatttggccattcttagataagaggaagaaacaacaagcacagctctggtgcccttagccgatgatatcaagtcaactctactagacatctcaaaaaggcttaaaggctctctggaaaccttggttgcaagctatggatccatccgagacagacacaatgaaatccatgacaagatcccggatgagctagccgatgcccttactccagcagccaaccttgagcagcatcggcttaaacttgaaaaagcccaaaggaggattgccgatcggcgtgaaagaagagatcttgaggcaaccatccaggccaacagggtttctatgaatgaagagaaggccaagctcgatgaattggaggctggtccagattcaactcaaactatcattgatcagcttaatgctcaaaaaatagaactcctggctgagttagagcagtgcaatgcacaaatcgcccttgaacagcaaaagcttgcagacttgccaaaagccattgaggatcagaagtcaaagttgaaggcatctagcaagcacttggccgatctaaccaaatctcgaaaggtgatcctaagcactgatgcagtcgatgtccaaatcatagacgaagtagatcggattaagcaaagggcaatatcagccatcaaaaaatacatgtctggatgagctaaatcttgtaattccaactttaaatttgcaaacataacttttgggatgcaatatataactttctgcttgtggtgaaaacttgctctttgatgtgaccatggctactacggatacatccgttgctcacatcatggatgaacaacaagatatcaagtgcaagggtgctggaatccgattcggccacgtgctacactgctgacttcaaacggtcaccgaatctgcatacgagctccgttttcagcccgtcagtacttgatggaaagctctcggagtcctctttccaacggatccagcctcatcaccaaattccatcctagtcaacagcagatgaagaaataaggtgttgcatcacctgtcatgggcctttgggcttgtaactatgtttgggaccccggcccatgtagggcccatgtggggtgcgccccaaccaggtggaggacgacgtagaggtcctcccacctccttaaataattaggtaccctctagagtatcttgggttttgtttagataaaagtttagcttcgctacttttccgtgtaatcccgtgatcggttagatcaccggtttgctcgttacggaacctcaaacttatcatttttgctccattcctatctgcaattcagattgcttttatcttgttcttgcttgtttcttcgatttgcttgcaggaataaggttgatctgcactggcaagatcaacaacctacggagaggtgtatcgatcgctaaggcgtaacacaaaaacgtctagtacggttgtagtcgggtcgttaacgtttctcccaaatcgtagttatcatcaactcaccaaaagatcgggccaaacaacagccttgagtgccgagtggagctcagggttcatcatttggtatcagagctttcgttgctcggtgagttttatctacccataaccagaaaattgatataaaaaaattgtcctgtacctagccatattgtgccattgcattgtttttatcagtttttgctttgttgagttttgtgttacatcgtcgagtcgagttgctggtgttagcgtctagttcgtttagagtttcgagttctggtcacgttttgtaccacagtcatcgtcacctccatgtatctgttgtcgtcaggacctacgaaaacggaatcggctcgctgccacgattctatttttgtagtttgcaaaagtttttaccggttggttttgcagttgttgagttgcatctttggtttgctgactgccgtgcttctgttttggccgtgcctgtgtcctgcacgagaggaggaaggtgaattaccatatctgattttggaagtagtcaagtttgttttggaaagatatagtagattggattggttaaaaatcagtttcctttttatcccatacaccaaattcggctgccatccactccacctcctagacgacttccactcacccctttggccgagtccgactccctccctccctttcacggttccgagttgtgtcaaacaccttggtgaatatttgtttggtgtcggttttgagatctgtttggaaaaatggaaccggcataaattcagcattccatttttgtataattttaattttgggtttagacttttacatttgagtccctgtaatttttatatttacgtttgagtccctgtagccttatattgaggtccttgaatctgtttttgtaaaaaaaatcaaaaaaaaaagaaaagcaaagaaaagctacaccctaaaaaaaagaaaagaaaaggaaaggaaagaaaaaaaagaaagaagaaagaaagaaaagagaaaatattgttatgtttgagctgaacttcatatatcagagttgtgcatgagttgttcctagtgctatcttatggtatcgtttgtgtctagactcgcgtctctagtacgttctagcctaggaccagcacggtacttgactttgaaccattattcaattttgcattctctgatttgaaccattgctttcctttgctacatattttaagcccacccagagctctacagatttgattgcagccgtacagcaagtgtttgccaaggcatcgatacatccaacctccattggggtgcttggttgagtcggtgtatgtcacctttccgcttgctttggtaagaacttgtaagagcttggttaaaagcttgagtgtgtgtgatatttgagctgccactacctagtagttgataggagcgtgcatatatttgtgtatgtttcttgcttgctactaaccatggcaggattgtgaaaggggaaacgagatggtcatgctcaacatcgacttcttcaccatcaacgagatatatcgtcttcttcacgctttgcatataaggtacatgataatgatcttgcaagggtagaatctaatttgcctgtttttgatggtaattatgattccgccgcttatgttaattgggagctagcagtagacaaacaatttgatgagtatgatttctctaatgctcaaatgattaaggctgctagtaataagtgtactggttctacatctttttggtggtatattgttggcaataagtttgaaacttgggatgaatgcaaaacaatgatgagaaaaaattttgtgttttcatattataaacatactctccttgagaaattagaacatttaaaacaaggtgacaaaaccgtgcgggagtactttcatgactttaaaatttgtatcacttatagtggtttaaaagaaagcaatgagaacacaatgactagattttttagagggcttaattctgatattcaggctgggcttattaacgtgacatataatcatataggccacttgttcatgcttgcttgcagtgttgagagcaatattttaatgaacccaagggagaaacaatctatgcttgtgcctcctattactgacattttgcagggagctcagtacattcaccatgaggagaagagcaatatgatcgagatgccatctccatcgctcacgaaggaagaagagaagactggtgcacctacattatctgaagagggcataaaaggtaaattaaatggtgttgatattactcaaggtgagtgtgcttctcccttgtcacatttctccactatccatgctaatctagagcaaattttggtggaaactacttctgatttgcctttgtcacgagttgatttacttgttgttccttgtgataaagaagagttgtgtgataatacttcacttatatccatgccacaactagtgaatgaaaatgctatttctagtgtttctttgtgtgctgattttaagcatgttgttcacattgctaatgatgttgaggaacgtaaattgataacttctttaaatactttgggttatgttcagtttgatgatttttgtgagctcaataatttggaggagaaattatttgctaactctgatttgccatgtccaactaatgctatttttcatatctttggcgaatataacgatagaggaatatatttggtgcatagagttttcatttgttcgaatttagagaaacatgttattgctaatcacactacttcgagtttctctggttttgattggatgaaacatgttattttgaatggactatgtgaagagcaccatatggaaaaaccgaggatggttttccgtgaagaaggggaggatgatgtgaccatggctactatggatacatccgttgctcacatcatggatgaacaacaagatatcaagtgcaagtcctccaagtactggaatccgattcggccacgtgctacactgctgacttcaaacggccgccgaatctgcatacaagctccgttttcggcccatgagtgcttgatagaaagctctcagagtcctctttccaacggatctagcctcatcaccaaattccatcctggtcaaccgcagatgaagaaacaagctgctgcatcacctgtcatgggcctttgggcttgtaactatttttgggaccccggcccatgtagggcccatgtggggtgcgccccaaccaggtggaggacgacctagaggtcttcccacctccttaaatagttaggtacccctctagagtttcttgggttttgtttagattaaagtttagctttgctactttgccgggtaatcccatgatcggttagatcgccggtttgctcgttacggaaccccaaacttatcattggtattgaattcctatctgcaaatcagattgcttttatcttgttcttgcttgtttcttcgatttgcttgcaggaataaggttgatctgcaccggcaagatcaacaacccacggagaggtgtatcgatcgctaaggcgcaacacaacaacatctagtatggttgtagtcgggtcgtcaacacttctcccaaaatcgtagttatcatcaactaaccgaaagatcgggccaacaacagccttgagtatctcaagtggagctcagggttcatcactcttgaattttccttttgaaatccagactttttatatatatttgcccccctaattttgcaatgttgaaggcattgataaaattataatttggactatgggtgatatatcaaataccggccatcatacatcggcaaagcacaaccgattatgataagaaaaaaaaacactaaggacgatataatctatatcggccatcatatatcggcaaagtacaaccgattatgataagaaaaaaccactaagggcgatataatatatatcggccatctcaaggcgatgtcaacacatcggctaacatgtattggcaaccatcagccgatcatgagttaatccatacagttggatagtatttcttcagatacttgccattaagcgctcgttcataaacttcaccatcaagtccttgcaacatataagcccctttggacacaattttgtatatttgaaacggtccttcccaattaggtgaccacttgccgaatttattatctcgagttcctattggcaagatcaatttcgagactagctccccttcagaaaaagactttggcaccacttttttattataatgccgagcaactcgttccttatccttagtcacctttgcaagggctctcaatctggattgaactagatcttctgtttcatcttctataagattgtaatacttatcggctgttaaatcatcctgtaaagctactctccttgagccgcttgtagtttcccatggtaaaactgcctcatgtccataaacaagcttataaggagggacttgaaccgatgcgtgacaagccatccgaaaagaccataatgtttcagccaaccttgtgagccattgccgaggaaaatcagaaatctttcttttgatcaacttaatcaagctcttgttagatgcctcagctcgcccattagcttgtgcataatatggtgaagaattcaacaacttgatacccatgctatcggcaaactgaacaaattcatcaaatacaaagattgacccctgatctgttgtaatagtctgaggaatcccaaatcggtagataatatactccttgacaaactgtattgcatccccataatcaactttcttcaatggaactgccaccacccatttggtaaaataatcggtcgccaccaatataaacttatgtcccttgcttgaaggtggattaatctgaccgatcatatcaattccccatcctctgaacggccatagtttgatgatatgattcatagccgatgctggtgctctctgaattgctccaaattttggcaatcttgacatcctttgta

SEQ ID NO: 22338 - DNA, 11245 bp, Oryza sativa
ttttttttgccaacacaagatcacctaatgatttgcggtgcattaaacagagtcgccaaaatcaataaatcaaaattggctagtgaaaccgatttcgagattaattcgctttcgtggaatcacacgactaatttacgagcaaattagtaaagaagataatatcgtacttacgtgacgacgaacgactagtttccgagcaaactagcaaaggataaccttctcgctttcatggagaagcacgaccgtttttcagcgcaaaacggcaaagattaaccaaattctagggttgctagaactcagccataaaaacaaaatagaaaagaactaaaaagtaaaagagatgaatattagattgaaattgggttcccttctattctaccgtggaccaatatatatagctaattgctctgatcttttggcatgtctactcggtcccacgcaatatgcaatgatggtttaccggaatatttgaaacaattcgatccaacaaactctttatcttctaactagataaataatatcgcacgcggcttggctcggtcgccgcagccctgctctcaacgcagatgccacgtgatggttggatccagcgaataccatcacatccatgcaagcagcactcccatcacagccgcacgtctgagcccctggctcgctcgatgacgatgaagactctttggatcagtaaatacgacacctgactttccatctgcaggagcaacgaaggattcccttgccacttaatcacccaattagggataatcacctgcctccgtgattaacgtaacgtgacggtcacgccctgtatagcttctgtagcctgcataaaaaccaaatatacatatgcatatatatgcaatcagcttgcacaggcaacaatactataaactacatcggtccatattcatttagtcaatactagcacatatgaccgacgcatcacaatttcctacacctgtaaactgagtagattttcaagtgaatcatttgacagttgtatcatctattctaaaccaatctggtaactataagccaaattatcgtacaaacacatgccccctgttttcggtataagaaggacgtataacttttgctttaccgaaaacaccatagaattaatcaatccagaccacgatcgtcctctcagaacaatactccacacacggtattagtcctaagcccatccacaatcatcttctcaaaacgatactcccacatatggtatcagtcttgagcccatctacagtcgtcctctcaaaacgatactcaaataagtatttgttctaagacaatcaagttttctaccttctcaaataaggataataccttctcaaatatttcccatttagtactaaactatactacaaattcagttgtccgtaatgtccacctaactgaattggctgcagttcttgggcctaaaataaattaaaaacaatcccatctaaacttcgatacattttaaaaaaactcatcctatagctcggcaatatatttagtcatccaacaaaggatggaattcccgaatacctggagcgtacactgtactagtcccatgatcagtggctagcacacgcatccacaacattgctatcatatccatacaacatacttgacatataaatagatgaaatggttatcataacttagcagtgcaatggtcttacatagtagttaggccgactggccaaataaaagagtttaaacgcagcggaaaagataaagatacataagttcttcagtatgcccatctaccaaaccacacaggcaactgactaggaatcaccctagaaagaaccatccttagaaactccggtaacagaaggaacacccgtttcctgcaaacgagactaaaaacaacaagaggtgggtcaatacacgaggtattggcaagtcctacccaaaccttgggaaacttttgttactattgcaagctgagatcaaggatggctatatttgtgcctcatttttagcgtaaagcaaattttgtttcgcaatagtaaataataatagattgaaacataatttttaaaacaaagaatagaccataatagtagcagtataagtaccatcatagtatcatccttgtgccctccatggcaacaggtaacaaattcattcttagcccacactgggtaaaaccatcaccaatattcaccatacccatttcacaattcatttagtaaatcaccaacactatacttgtatcatttcaccaagtcgctcatgaccgtgagcacggctaatcgattagttttagaccctgcagagtttgtacagctttacccacataatgtgatttactctagtttgtccggtacctgtcggtaccaccacactctacatattgaatgcggtctacacactgggtggtaggaaggtattatttcaaaggggtaggcaagcttttcagtaggtgcattctctgatgttttctctttttactgaaagaaccaataggaaataaaagaagaaaagtggcaggcaaccaaacataacaacacacagtcatcgcattatgtcttgctcaagttttttttttcacttgcgtgactaattgatttatggcaaaatctatttcaccctagtgcatcatatcctgggcttctgtgcttagctagctgatatatcaagtgtgacaggacgaaagagatgactacctttccatttgataccagtaaaaaaaatgtaatttcaatgtggctgtaaataaagctttttttttgcaaatcaaatagaattctagaataatttttcccagggaaagattttaaaatatttatttctagatatagtatacatgttgtttgaaaaccacttgtttgtaaaatagtagacagtgacgtatagacactgcttttaattccattttattttattttaaatcaagaaagattaaggaattttattttggaaaacctcaaaactcagagtcggtgcatgtattattttacatccaaactgctaattatagccggtttatctattatcaaaaacacactttactgtcttgataactagaatcctattatgccaaagaattttcgttgttaatttttcctgtcaatgtatctaaacaccggtccaaataatgatttaacagtccaagaaaaatgctgaattaatctattggactattaaaataccgaaagcatctacacccctcacaccaacaacgactaaactttccaaaccgaataatagagcatctactcggtctaaagtgcaaggatactctaaacggactgatagggaccgatgtgtcataagcaatattacttggtaaatataaaacaataccaactccttgccaacccacacaaaacatgaccgaaataaattctaaagaataatatatataaatacaagaaaaaaaaatatctccagcccttaattatttcggtctctaaaaattaatatcaacatttgtagtaattagtcaatatgcataactatatggtaacatccccccatgatataaagacccatatgacatccaaggataagaataaaaccatgagggataactatacataccttagaattggttccatgacataggtatcagtggcataagtgaagaatatatataatatggtggcgaaagaacctaatgattagatgtaaactgttgatttggtgcacacctcctaactcccttctcattctttgcccccatgtggacaccccgagtattataccatctagtgtccaacacgaccaccacatactattggagaagtgggatccatacacgcataaatagccactcgtcctcaatgtgtccatgatcgcggttgacaaccttctgttataataaccgaaatgtcgagtagtaagcacaagacataatcgtaagatagcttgccagtccaccacgtcatatgcccgtcaaccactcgaaggtggcgaccaaaagcataccccaatgactcgatccaaagcgctatccccaattatctcaagcgatcaaaacccgttactcatgcttagctagtccctaggaatgcgactagcctcacactttcatcgcaagcaattaataaacatagcaaataccataatagggttaaagtgcagcgaggtacatgacacataatagggtccgaggtcccaacatacaacacataaatatagcagcggaagtctcaaatagagttcataagcaaaagataaaatcggtggtgccacaaccccactagggcaaaccaaccgggcaagagccaagctgcaagagatcactcattgccctcaccacccttggcagagcactgaccacacaagaagcataactcaaaaccggattcctctcctgaaattgcagacaccgggttaagtacaagattgtactcgcaagtcttacccaaaattatatatacataagggagaaagaagtatgcaagctttctagcctatggtgggtctctaggttcaacatttgcataaagctaattttattgagcaattatgagtaaaataagcaaggaaaagtaagtctagcatcattttaatttatggacagcaagtatataattctgaaatgtataagcaaataagcccaaacggcgctctcatcatcaaccatggtccaccaaagtccataccaacatggcacaacatgccaacaccaccatcaaacataatcccatccataataatctacatttgatgctaacatgagtgagatacacatcaagcaatgtccataaccaaggacgcggctattcgaataggttatactctgatcagaggtgtacaactggacccacacgaaatgaacaaagatcaaatgctacacaccctgtcaagtgcggtacacaagtgattcaagctcattacatgccctttcttaaccccaccccaaccacctataccacgctggggttcccgacgactcagtcacgtgcgtgcgtgatgtgaccaaggcgggcgggccacgggggaggcacccccggccaacataggcacccgaggccctccaaagggctacctgctctcacgtctctccaatgtggtataaataatgatagtagaactagtaaaggacaagctggtcccaaataaggcatgtggtaagtatgaagggtgcttgaatagatgtcaaaatgttcgatccttaatgactcagacggggctacttgcatcagacgaaaaccaacctcctttcatcgccctatcacccgtccaagtccaacatatttcatcaaccattatttagtgtaagtactcaagttttatgcccaataaagcaagttgtctatgtaccacaattaatagcaatgtccatccctatagttctattagcactaagcatggctaagcattaatgaataagatatcccaagtaatcccatccagtggtaataggttataaggacatcaatattacaagaactaaatgcataaatagtttcttcccatacaccataaaccgacaatattaatatctaggcaatgcatgcacatatatatatgtatagattgcaaccaaatcatttttagagaaagcataggttctatatgcttaggtgcttgccttgctgctgagggaagtcactatcctcctctggatatggctcattactctccggaatctccaaatctatcgaaaagaagcaatatgcgaataagagccaaataaacatgtacatgcaaaatgatcaataaattatgaaataaatacagtgggtagatcatattttaacttgaatttaggtgaaagaatcaccggattatcacttatggtttgggagatatgaaaatgacaagctctcaggtgctgaaaatggcatttctgtaaatattaatgtttcctttacagcattgcaagcaacctataactcaaaccaagttttcataataatgattatttttagagtaaagtacatctttcacatgtcctaagaaaaattatttcatagctatatatgttgccattatttatttatggattttacaagttaaaatcatgggaatgctaaacaactcctaaacaagatttaagaggtagttttgccaaaaacaacaccacaacagcaaagagtactaaaatataagctcaacaaaattggtttcacaaatttagcttttaccaataatttcttacgaatttattaagagctataccacacaagggatacatatagctatttatatttttactgggaaaaccagtacaaaagttggtcatttttattttacaacgttgaagatcacgtttttcttaatccacagaaatttggttcactgaattcggagttcatatgaattagttatgaatttttaaagcgcacacctctttcagctcaatagctatctcagaaatcgatttctattttcactccccttttctccaacttccaccggacttcactcacatggcagcaacctggacgtagggttgtgcgaggctaaggccttgggctgatggcaagagatggagcaaggtcttgggctgcgcgcaagagacgttgcttagggctgcttcacccgaaatcaaaaaaaatgacttcgggttaggttcagccccctttttagtgcaaccaatgagtggaccacctataaaacggtgctaggatgtttaacatggagggaattcaaaagaggcaccatggatgaaaaggaagctcaccaaatggaggaaaacaaaatgctgctgctgcagccctgtaggctgaaaccagcactcttttattccttctcgatctctctcaactctccatgcatgtgcaagatgttgggatggatggaaagcttggatgatgggaattgttgtggtcaaacatgcaggaattgatcttgggctattggatgtgatttggggaggaggagtgagatgagagctcagcttgatgaagaaaagatagaacaagcagtgaagatgaaaggggttttctctgcccccccccccccttaagtcctgaggtgggagcacgcccatggatgtgttgtggggctatagaggcacccaaggtcagtgacaagtgggcccaagtcgtggctgtctatgagggtgagagaggtgggtgaaaaactgagtatagattcgttcttgtaatttccaggatttattttctttccctctcttggtaaattcaatttgactaggtaaaactagttcaaaaattaagggatttggtgtggtgacaggtgttggtttctaggttccatttttcaaagtttcactcaaaaattcaaaatattttaattctggtgaaaagatgaaattggttaggctgaaagttggtttgaatttttaggaggactaaacagaagtaaaaattccacaaaatttatattttttggtgataaataaactagtatttgaataaattattataaatgtacacttctgttcaagttattgttcaaatagaagtggtttcaattttaccgattagagttaactttgtcatcgcctatgatcaaattgcaatatagtaaatatgaaatgtaaaggacaacaaaagcacttctaaatacctggttatgaacctagggctgttacaccctacttcaactttaacatctgtttcattatgcacctgaacacttcctttaggaatccatgccatacctctcttcttcacattctctacacttagcttttctagctgcttcttctgccaatttgacaagctctgtgagtgtctcggttgattgccattgccccccgagctcttcagcagattttgacttgttactaactctgccgaagatgcctctcgcttcatactcacatggtgtaaattttctagttgttgtacacgtgcatgccccctaggttcaataacatttttctgaactgaagccttttgtacacccacacgtgcactagtagctaagcccttttcttgacctctagacttcggcacccatatttgctccttattgaactacctcccacctgcgccgaagaccacttcttattagaccacctagaccgatttgttttaccaaaacggtcatccttggcatgtgacattcctagagttgcaaaattcaatcggccttcattaatagccgattgtatcttctgacgaaaagtgttatagtcagtagtacaatgatcaaacgaattatgccatttgcaataaattcgttcttttagatcctgaagtgatggcatgacatggtgatcaagtaatttaatataattatttttcaacaatgcatcaaaaatatgatcacacatggttaagtcaaaagtatacttcttctcctctagccgacacttttgtgcagatggttttaaagctaagcaaacgaatggttcagatttgccatctacccattcgactacacggttagaattatccactatagtagcatcagcctcattaatattttccaattttagttttgtgtctctatctctagattgatgataagcaaaccatgtagacataaactttggcaatgatgatatggaaaatttaaacactttactattaccaataagaaaattaacctccccaatcgatccctttgagttatttcatgatgatattactagtgcaaatattatttttagataaatgatcaaattgggaaataatcgcattacctgcagactttacctgatctgatgtgttggagaagcgtggtgatttcttcacatgaacaatgtcctcgttcatcctctaatggccctccaacatctcctctgtgttctcaaggtatcgtgctccatcgacttgatgctcatcaactttcttggcacgaagttcatctggcaaaacaaaaactcctatgtctctagagaaatcaagcacaactacctcgtctttgttagacgataattctaaatttatcggcttttgttgtttttccatgacgcttttccttttctttagaaggcgtgcaagtttctgttttcttagctccacgctttctaccttgagctcccactctaactcgcgtcgttgatcctcagataaatcatctaatgtgacaatgctattgtcgggatcgaaagtgtgcttatgatcaatattgccagttcgtatttcagtttgccccctagccgaatttacaacatttgaactctgtgcgtgtttgaaaatatacatagtactatttgattgacattttgaagatggaactactagtggaacgactattaattcggctataatcgctactagtatatgaagccgaattatttccactagatattatgtagtgcgacccataagactgagatataacatgtgactgaccgatacttggcatggcatgcaatgatctaatagaatcaactgaattataaataccgccatagccatacatatctttcatcggcaaattttgttgtgtagtaataggttccgaaataatcgccgatgaattaaaaggtgcgcctacatattgtttattgctaccattattaaaatttaaagcatgtgaattattttgcataggctgtgacttgttattctcataatttaaagatcttgaacattgatttaaagcatatctagcaacattgacatgagtgttgatggcacttgaagaattattttgtggaacgagcaatgtgtctgtagagtgtacctcacaactggcatagcaaggtgaccacgtagcactccagtacgcatccatgtatttttctggtgcaatcaatgatgagggaatgttaggtcccgatctttcgataggtactgataaacagtcgatttgggcggagtcaccacacaactcgatccggcttctgaacgaacacgctactgagcctcccaatcgcagcaccacgtctcctctggttatcaaccgtgccgaaacccgattgacctcgccgagatggctaatccttgcatgcaaatcgaagaacacaagcaagaacaagatagattgcaaccaaattgcatatgaatgattaagcacacgaatttggggttccacaaaccgatctagcggcgaaactgttcttgacagattaatctaagcaaaacccgactctaaacgatgacggctactgaataaaaaagattagggacgtcctagggttccctagggcgcacacccccttgagctaagcccacgacacaattacaaggcccaaaacccaaatcagattcggactggatgagatacgtggcttgttttgcagattcccggtagctcggtaggaattttgacatgggaccaaaaccatatgaaattagactccataagctttgtaacaagtactcatgggccccgaaattccttctagatcaacagctaggtccgttcgaagttgatgctattaggaggcccgaatccgaatccaaaacatgtagaattttatctcgtcttctatgggccaaaagtgttgtggtgaggtagaagtagacttggagaaggtcttggtttggtccccaatcaacttctttaattatccatgcattaggtacgctcggtctcttttccttcgcccaagcaagtacttctgcaaacgaaaacacacaaaactcattgtgtagcaacgtttgttcaaataaatatataacaagtaaatctaatgtagaacatatgaacatttatttaattaatacataaggtagttatttatggttatatccgagctagttatgttcttatcatcctccctttcttgattggaaaccgtcctcggtttcaccttgtcatggagtgtattgtacttatctttgtctatcacaacatcctgtgcggaacatttcttgatggacatatgattggatcctaaaatctttgtagtcgaaaacctcaacactcctcttgcaaaccaacttgtaactcatttaaacaactagaggaactagatagagaattacttatatgcatgcggtcctctagacaatacatttcatcatgaaaaggaggtatagtcaaattcgaacaaatatatactcgatgcacattatattctcctttactttcataattgccaataatatgaaaaatcacatcagaagggcatggcaattcaaatctagcaaataatttcttctttaagcagttgagtggacaaatatcatcaaattgaatataaccccaagtatttaaagaagatagcaatttaatttcttcattctcgctagcaatgtgaataacatgtttaaactcaacacttggtggctctactatagaactagcatgttcattcactagttgtggcatggataaagtgaagcatcgcacaactcttctttgtcacgagaaacatcaagcaaattgttttgtgacaaaggtatttcagcaattgtttccaccatgg

SEQ ID NO: 22339 - DNA, 15198 bp, Oryza sativa
  unsure (1)..(15198): unsure at all n locations
caatagtatctttcctggtatctctgaaaatcacatcgattctatttttcgtcctttcaatactatctttgaaaattccttgattccattcttcatcctttcaagattatcttcgaaaatttcagtaaaactcatgggtaccaatttcatttttcgaccattttgtctaaatgtgtatgtattagcaacaaaattatgcgaaccattatatcatatagccatggttgaccaaacaacaaagaacattcttgcatagggacaagatcaaaattggcagtatcatggtaatttccaatcaaaaagtttattctcacaactctatttaccttgaccttaccacaagagttgaaccatttgatgtaatatggatgaggatgcggttgtgtaggcaattcaagtttctcaaccaaatctaaactcacaaagttattacaactctcactatcgattatagtacgacatgctctatccttaaccacaaactttgtttcaaataattcgtggtactgccattgctccgctttctccatttgagaacttagtacttgttgcaccaaagtactgtcatcacgtccaccttgttggtatcgctgattttgagcgcgactcatacctgtcattaagaatacaaaaacaacaacaaacaatgaaggttatccctaataatctgctacgcggtgtagtggtgccccttaacaactcagccaaacggagcaccttaccaagctcttacaagtgtcttaccagcaatgctaaggacggtacaaccggtggctagttcgtgacaccttgaaggacgtgatgtggcgattgcaaggatcagcggtgctgaccagaagtatatatgtgtagcttgggaggcacaatatatagtagcaaaggaacgcaattgtactaatcagaaaatgcaaagttgaataatagttcaaagtactagtcaatgtgctggcctagtctagactcaactctagctcaagcaagcacccgacaaaactaatgactagatatgaatcaatgcacaactctgcactctgaaaacatactcaaaggatgatttttttttttctttctaggtacggcttttttaagcacctttctgcccttttttttgtgcggctttctgccttttctttgcacctttctgccttttctttctttttttattttttttacttttttttaacaagaactgaaccactgacttcaaacaaggactcaaatgtaaatatgaatattatagggactcaaatgcaaagtgcaaaactaaaattgggtcacctcaaaaatggattgctcatatcatgtaggttccgtttttataaaaatatctcaaattggctaaaggaatttcagtgtaacaatacttgattgaggaaaatacggagagaggtgctagaggaactcagtcacggtatggatgactcgaccgaacagaccaaaaagccaaacaaaattggttccacccttatccacaactctatatatctctccctctccctgtatatgctattttctaggagatatttaatagatctgatactcgtgcgcgcccgaggggccctaatacgcgactagtcgcgcggccctccagacgcgcgatcagccgatcagtactactagtatagttcagtactagtactacaacagaactactagtagtactactacactactattactactactattgtcattatactaccactagtattactactataatatatatatatttatatgtatatattttttatgtataaaaaaatatatacatatacaaactttgtatacgatgtgtacaaactttgtatacgatgtatacaaactttatatacgtatgtattaaaaaaatacaataaaaactagaaaatacatcacttatacaaacttcgcatacgcgtatacaaactttgcatatgtacgaatacaaactttgcatacatacgaatacaaactttatattcatgcatctttgaaaaaacagggaaaagaaccgaacagaagagaaaccggaaaaaaaaagaaaaaccaaaccgaaaagaaacgagaaaaactcactactccctcctctcgcgcggcgcgtccgccgcccctctccgcgcgcgacatgtgtccagtcgcgcggggaggggtgcacgcgactgatcgcccaatagctttttcggtgcgcgcccacaagcacggcaacacataaaccctcctttcccctctgcgcgccaaaagcacggcaacacagaagcaatagcaataaatcaactctctaaccgctcgataaaattttttggaaactacgaaaacggaaacccaacgacgagacgattcaatttttcaaggtcctggcaacaaccaaccagatgaaaaactggacctaaaacaactcagacagacttgagtgatgaaccctaaacctaagtgatgaacagatgcaatactcaaaactaaaaattaaatctaaaattaaaccagcactcgacacgacgatgcaacatagaattcaacaaagcaaaatctaatagaacaatgcaacggctcaaattgtccaggtaaagaataaatatttttatgtggcaattttctggttatgggaacataaattaactaacgggcaactgcgctctgataccaactaatgagggagttaggtcccgatcttccgataggtactgataaacagtcgatttgggcggagttgcgacacaactcgatccggcttctgaacgaacacgctactgagccccgcaatcgcagcaccacgtctcctctggttatcaaccgtgccgaaacccgattgacctcgccgagatggctaatccctgcatgcgaatcgaagaatacaagcaagaacaagatagattgcaaccaaattgcatatgaatgattaagcacacgaatttggggttacacaaaccgatctatcggcgaaactgttcctgacagattaatttaagcaaaacctgactctaaacgatgacggctactaaataaaaaagattagggacgtcctacggttgccctagggcgtagacccccttgggctaagcctacgacacaattacaaggccgaaaacccaaatcagattcggactggatgagatacgtggcttgttttgcagatttctggcagctcggtaggaattttgacatgggaccaaaaccatatgaaagtagactccataatctttctaacaagtactcatgggcccaaaaattacttctagatcagcggctaggtccattttaagttgatgctctcaggagggccgaatccgaatccaaaacatgtataattttatctcgtcttctatgggccaaaagtgacatgatgaggtagaagtagacttggagaaggttttggtttggtccccaatcaacttctttaatcatccatgcattagttacgctcggtctcttttcctttgcctaagcaagtacgtctgcaaacgaaaacacacaaaagtcattgtgtagcaacgtttgttcaaatatataacaagtaaatataatgtagaacatatgaatctttatttgattaatacataaggtagttatggttatatccgagttagatatgtcctcgtcaatcaatctgtacaccaaacaaatataccaaaataatatacagagacaagcactgacctgatcgtttctttatctcttatgttcctgcgcgtgtgttgctattgtgccgtgcgaagaaacaaaacaaagtcaactcttgatctgcctgatcgtgtgaatattgcaagcttgtgatgagattagatagcgtcgccgaatggcgaaacgataccgaagcaggactgactggccgccgccaccgaatagatcaattcggcgtgcagctgacaaaaatgcacagtagattgatttcggttgaatcgcaggaccgaaattgttttcaccagtggagtcgccaagatatgttgacgcttttttttgctaatacaatatgacctaatgatttgtggtgtattcaatagagtcgtcaaaatcgctagatcaaaatctgctagtgaaaccgatttcgagattaaatcgctttcgtggaatcacatgactaatttacaagcaaattagtaaagaagataatatcgtacttacgtgacgatgaacgactagtttccgagcaaactagcaaaggataagcttctcgctttcgtggacaagcacgatcgtttttcagcataaaacagcaaagattaactatattatagggttgctagaactcagccatgaaaacaaaatagaaaagaactaagaagtaaaagagatgaatattagattgaaattgttcgggttcccttctattctaccgtggaccaatatatatagctaattgccatgatcttttggcatttctactcggtcccacgcaatatgcaacgatggtttaccggaatatttgaaacaattcgatgtaacaaaatctttatcttctaacttgataaatatcgcacgcggcttggctcggtcgccggagccctgctctcaacgcagatgccacgcgatggttggatccagcgaataccatcacatccacgcaagcagcactcccatcacagccacacgtctgagcccctggctcgctcgatgacgatgtagactctttggctcagtaaatacgacacctgactttccatctgcaggagcaacgaaggattcccttgccacttaatcacccaattagggataatcacctgcctccgtgattaacgtaatgtgaccacgccctgtatagcttctgtagcctgcataaaaaccaaatatacatatgcatatatatgtaatcagcttgcacaggccacaatattataaactacatcggtctatattcatttagtcaatactatcacatatgaccgatgcatcacaatttcctacacctgtaaacggagtagattttccaagtgaatcatttgacagttgtatcatcaattctaaaccaatctgtccttcacacatgcactaactataagccaaattatcatacaaacaagtttaatagtataagcaaattcaaaacttgccccccgaggagagattataaccaagctgataccacaatcatgagtacaaaccgatccatcaacgaataaagtcaagggcacaatttcaaccgagccgattgaatcatcacgatgttccacaataaaatcggctatagcttgtcccttgattgccttgggcgattcatacctgaggtcaaattttgtcaaagcatatatccactttccaactcttcctttgagaactggagctaatagcatatatttgatcacatcggctttgcatacaacaatgcattcattggataacaaataatgccttaacttggtgcaaaagaagtataaacacaaacataatttttccactagagactaacttgtttctgtatccaatagcctatggcttaaatagaaaatagctctctccttgccctctagttcttgaatcaaaactgagccgattgacttctcatcggctgatagatataacctgaaaggcactctcttttgtggaggaattaaaactggacgagaactcaaatatgccttaatgttgtccaaagctttttgctgctccgccccccaagtnnnnnnnnnnnnnnnnnnnnacgtttacaaaggtgtaaaaggttctaaccttccagacaagttagatataaaccttcgaacaaaattaatcttgccgatcaacgattgtagttgcatcttatattccggaggttaaatcttcttgatggcattaatactcctttgagggacctcaattcctctctcatgaacaagaaaacacaaaaattgtccaaccgatacaccaaaagcacactttgttggattcatctttaaaccatactttctggttctctcaaaaactttcctcaaatcggctatatggtcctccacctgctttgatttaaaaaccacatcatcgatatagacctctaccaacaagccaatcagatcatggattatgtaattcatggccctctgatatgtagcttcagcactcttcaaaccaaaagtcatcacaacccactcaaataagccgattgcaccaggacatctgaaagcagtcttgtgaatgtcttcttctgccataaaaatttgattgtaaccagcattgccatccataaaacttataatcttatgtcctgaagcagcatcaaccaattgatcggcgatcggcattgggtactcatccttaggtgtagccttatttagatctcgaaaatcaatgcacaccctaaatttgccgttcttcttgataaccggaactatattagaaacccactcggcatatcggcacggccgaataaaaccagcatcatataatcgagtaatttcagccttgatagcatcatacatttgagccttacatactatatattcttatttctacataatattagtaaacaattatgaaatcaaatataacattttgaaattaacatatcatatttaacaaactagatgatgggacgaccacatgacatcaaagagtatacataaaaccaacaaaaacataccattggaaattaaacataataattattttttacatgtcatgaagttttctctcctatctagatctaggcaaatagataagagcaatgtatataattttattccattatattacattataaaatcactagaagatgagagaaccccatagcatcaagaaaccacataaatccaacacacatatcaaagcaaaatacaaaaaaaaaaaagagaacacaatcatgggagctagcttttcccctcactattttacatgcatagatccatcctaaaaggaggtttaaattaccaaaaaactatgtatatagagtgcaaaggcatagatctaatcactgtagaaaaatccctcgaaaatttgaagttcaaaacctacccctatattttggtgcctttaagatagtgaaaatcgtcagatatgaatagaagctcggggaggaacaagactatatagccggcctgatttttgcatgcgacgaaaaatggtcgcctgcgaagatttttgcaaacggcaccaaatgggcacctacgaagttccatcttcgcaggcggaccacataattagaccacctagaataatcgcaggcggtcccttatgtggtccgcctgcgaagatggagctttacaggcggctcgcttggtccgcctacaaagatctatcttcgcaggcggaacaaaaccatggccccggtatcatttatcctaggtggtgctccggtttttaggtgcctacccatctgcaaaaataaatggccaacgtcgctaaagaccatttttctagtagtattgataccataaaatataatttcgtttccaaatatcctaaaggcgtatttgtctttctcaaccctaacgacatacgcatatccagtacaattgttcgattaaaatatacctgttgcgatcagtgcatttgattccatattccctcccacacgattattaaagacatctccccagtactatatatggtgcttgcagtactatatagcatccataaaatataaaatccgctctaaccaaccaccatcccctcacacaacacgctagctctaataatctcatttgcaccacagaataggacatataaatgttatagttaattaatcacacagcaacataccctgtaactagctagctattaaacagacattcctctgaccatgtgcatccatatatactatagtattttgcatgactactaaactgattagcttagctatagctcacttgcagacaacccttcagtacacttcaagctgttggactcactgaacagacttgtccaggagcgcgcatccagctctcgatcaaaacaagcacagttaagtgcatctctgtactaatgatactcgcatctgcagcggccagcacacagaagctagcttgcacacttaatttgagtactcctttaatttattgagtatactctttacagacctatcctgatcatttgccgggtttctagagaagtgtaaaagttaattgactgcagccattcatgaaagcctgtaggtttcaaaccatgcatatgcatgcgctgccccttcacgatttctgaaaacttctgtaacactgagaaatcagcgggttgccaatgccgtggcctcctggtgcaggaggccacagctggtgcacacaaggatgttcttaaattcatctatgaccgtgtttagatctaagggtgaaaagtttcagtgtgtcacatcggatatatgaacacatatttaaaatattaaacgtagactaataacaaaacaaattacagattccacctgtaaattgcgagatgaatttattaagcctaattaattcgtcattagcaaatgtttactgtagcacctcgttgtcaaattatggagcaattaggcttaaatgatttgtctcgtaatttacacgcaatgtgtctaattagttttatctttttgtgtatatttaatatttcatgcatgtgtctaaacattcgatatgacaggatgaaaagtttttgcgtaggaactaaaccgggcctctaaatgtagtcacagttgacatctagctagtatatttctgatcgcccgtatgttgcttgtgcgtgctgtactgcactttcctggatgcaatcactgtcttgtttgttaaattctctgcagatcacagggaaacttagcctgttctcatatgcaatggaaaagttaaggctagctagggatggggcttgtgtctgtactcaaggctgcgcaaagaagggaacaaactgagcgcagaacccgattgaaactgtatattctatcagatgatgaatacaagagctatatatatatatatgaatgtcttctggtatacatgttttttgttgggaagagaaaatgaaaacaaagagtagcatggagaaatgagaagggaatatgtactgtagagaatggaatccgtgcaagtactgctagctgcaggaatgcatcagaggaaatatatactagagagcatgttctgcatcatatgcatgtgcatggtttaactgctggaatgtgtcagtactgagagcttaatttgtagacaggggagggaagatgacatcttcatcctcacttgccaagcactacagtcaccttgtgtctgtacatgcagatagctctaccttcctcatagttgaaagctgatcagcatgacatgttaaaaacacagagataaacacgaggaaaacaacaataaggatgaaccaggctatgcatgttatactagctaaccagaccaattcagtcaggtataagatacacaggcttgatttactccttacggatggaaatatttgtatttacttgctggttgaatattaaatatttatttttttaatgatcattgagatcctcttcagaaactacaaagtaccatattttctcaaacaaatttaagatactttctaatattttggatacccaagggtactaaggacatattatcactaaaaaaaatgtggtaccgtgaatgttaagaaacttcttagatattatactagtataaatctcacctggcaggggaaaaaatacacatgttttccatgatattgaaaataaactaccaatacgaaagttcagatatatacgcgacatagttaatactgtaattgaatattgatcttttgatagatttccgttgttatagaagctgaggtcatatgagttttaatgaagtgattattaattgttcgatattcatatacttgcacgttgaatagaggatacggtgaaagagcactaattaatttaaactgacaccagcaataaaaataaatagataatggctgagaatactttgccaacatgcacaataagaaccagataatattggccacgataaaacacatgcaatctaaagtttatgctatcagctgatatcagttgaaagatatttctgtcaatgataataaatatttatttaaccggtctactacataaaattttataactacaattcaacacattgtgacagagtatgacaaatttttgattttttttcatgtggtatctttgaagaaatatacactatttccacagatcatctatggggggtaagagaattagcataggatataaaacaagaatacaactatatttgtttagcgtaatctaatttgacattgtttgagatcagccgcaagatgttttgaataactggcaattcagttcattcaattagtgtaatatataaggttaaccagagaaagtttggaactacattatgtgataattttcgtgcatcaatgcaaggttttaaattggaattcagtaccttcttacacagcatataacaagtcactttagttctttttttcattacagttccctttcaagagaaaaatgatttcttcaaatcattccaaggaaataagcagaattaacatataggataaaacaaggataaattcagatagtgcaaaccaacatttcaatgaaacacgagtggtgaataaatacaaattaaacatttgtaatcaagttgagatacaacagtggatatgaaatctactgttcttttggggcttccccgagtctaagctcaagatctagttcttcaaccgaggagctacgataaagttttagtatcttttcatgatgttggtcatcaccaccatcttgctgttgatgattactggttgaagaagttagaatcagggggtttacctccaaatcgattcttcttttcttgtgacttgcttcaacagtcttttcatcatccgcgcggtcgttatcgtacataaagtcccttcttgatcggcaccccaaaacagtagttatcttcaattcatttttcccaacacgcaggtcaagattagaactcaccgtgtcatgatcctgtgccaatcgaacagcaccaagaaacaacgtctccctcttaccatgttctctaccagccgacggcgacttcgatgagacaagaggggcgttcaggacttgtttgcccaaggcagttctagcagctgcaacttgaagcaaggatctagcagggtacgcgacaacatcacatatggaattagggttagtgtcagcagcgagaatactgccacttctagggtttgggctgtaggcgtgctgcagggtgccaatttggggagggcatggttgtatcatgtagttttggtttggcggcatgccgtggctttcgccgccggtgccgtcctccacaaccccagagagcttgagccttgcccggtccctccggtggacgttcatgtgcccgcccagcgcctgcgccgaccggaactcacggccgcagaagctgcaggagtaggacctcggcggccagatgcagcccccgagatgccctgcggagtcttccgcgaaggcacgttcctcccatgactcgtagtaggaggtggagctgccgccggcgccgatggtgatgtgaggggtggggaagagaggcgccttctgatctcccagcttcctcctggccaagatccagtaccttgctggatccatcaaatgacactaactaacttttacagctctagctcttgcaggtgccaaagatgatggaaagagggctagatagagaagaggtgaaacatctgaacccaggattgaggaagacagcagtacatgtgaggatctagctatgagagggccggagcagaaggggggaagaagagctgcaagctagccggggaagttagaaagaggcttgatttgcttgtctttatggatgcaactgactcatattctgatcgtctgtagtactattaattagttcctccaaccaataatagtacccaatagggccccatcattttcttctcagtttcttacacaagtgtgactttcctggatgcaatcactgtcttgttgttaaatgctctgcagatcacagggaaactttgcctggtctcgttaagcaatggaaaagttaaggctagggatggggcttgtgtctgtcctcaaggctgcgcaaggaagggaacaaactgagcgcagagcccgactgaaactgtatattctatcagatgataaatacaagaaccaaaaaagaaatataggaatgtcttctggtatacatatttttttatttgggaagagaaaatgaaaacaaagagtagcatggagaaatgagaagggaatatgtactgtagagaatggaatccatgcaagtactgctagctgcaggaatgcatcagaggaaatatatactagagagcgtgttctggcatcatatgcatgtgcatggtttaattttaattccactgctggattgtgtcagtactaagagcttaatttgtagataggtgagggaagatgacatcttcatcctcacttcccaagcactacagtcaccttgtgtctgtacatgcagatagctctaccttcctcatagttgaaacctgatcagcacgacatgttacaaacacagagacaaacacgtggaaaaccacaataaggacgaaccaggctatgcatgttatactagctaacctgaccaattcagtcaggtaataagattcacagggttcatttactctttgccacttaccataccatatgtgagtacgggtggaaatatttgtatttatttgcacgttgattaaatatttatttatttaatgatcatttagatcttcttcagaaagtacaatgtactatattttctcatacaaatttaagatacttttctaatattttggatacccgagggtatactaaggacatattatcataaaaatatatgtggtaccgtggatggtaagaaacttcttatatattatgctggtaaatctcagctggcaggggaaaaatagacatgttttccatgatattgaaaattaactaccaatatgaaaagttcagatatatatgacatagttactgtaaattaattatattgatctttggatagatatccgttgttatagaagctgagcacatatgagttttaatgaactgattatccgttgttattaattgtttgatattcatatacttgcacgcgttgaatagacgacacggtgaaagagcactaatataattaatttaaactgacaccagcaataaaaagaaatggataatggctgagaatactttgccaacatgcataataagaaccagataatataatattgaccacgatataacacatgtgccatctaaagtttatgctatcaaccctactggagaactaatctttgttggcttagccgaaaaccacaattaatagccccggttccaaaaagaacccagactaaaaatcatctttagccccggttgaaaagcccatagctattttatgatctttagtctggttggtactaaagatcgtttttagtcctggttaaaaaagtgtatgccccctattctttttattcccggttggaaataccaactgggactaaaaatcggtgcatagtatataatccctagcacttatcctctagcaatcacctcttctttatcctcctcttttttcttatcctctccctttcctctctctattcttatcctctcaagcaagcaggccagagggcgagcgagtaggacgggcgggcggcggcgggcggccggcgcctctgccagagaggaggcggcagcgacatcgcaaaattgtttttgttcttttttttgagaatttgtgattcattgcatggatctgagatgtataatctgtgatgtatttgatttgtgtgtgatgtgaatatgtgaagtatttgtgatgttttttttagaatttgtgatgtatttggatatgatcaatttagagatttagagatgatacttttttctgcgatgatcgatttggggatgatttggggaagtagtgaaatgaatattcaaagttaaaacaatgaaaaaaagaaaaaaaatctaccaactggagctggcctggctccatctttagttccggttggtaacaccaatcgggcctaaaaatggatatttttaatcatggttattttaactaggactaaagatgggtatctgtagtcctgtattcgtagtcccggttgcataaccgggactatagggggttataaaccggggttaaaaaccctttgtccagcagtacagctgggagatatttctgtaactttagttttatatcatttgcacgataaaattaaccgctctactagataaaattttataactacaattcaacacattgtgacagagtatgacaaattattgatttttttcatgtagttatctttgacaaaatatacactattcccacatatcatctactggggaaagagaattaacaaaggatataaacacgaatacaactatatttgtttagcgtaatctaatttgacattgttcgagattagccacaagatgttttgattaactggcaaattcagttcattcaattagtgtaatatataaggttaaccagagaaagttttgcaactaaattatgtgataatttttgtgcatcaatcgcatgtaaggttttaaattggaatttatcactttagttctttttttcattacagttccctttcaagagaaaatgatttcttcaaatcattccaaggaaatagctagcagaattaacatataggataaaacaaggatatattcagatagtgcaaaccaacatttctatgaaacacgatgtcatgtgggaattgcagtatgcgcgaagctgcaacaggaagtcagtgacaaaaacatggtaaggaatagtaatgtcagtctttgagtttttctgtaacacctgcctcatacatctgcacgggtgttgaggatgatgaactttcttgttcgttccttatcatgttgcgcgtctccctatatgttccacctgcacgagattcttgtatggtctgcaggagaatggttagttcatggcagttgtacaaatgataccccgtacttggcaacgggattttatttgtacaaccgggaaaaaagtatatcaaagatccatctgctccatgcttcaaaatatgcccttgcactagataagcctcatcaatacgcggacgagcggctgagataaaagcaatttggtcgctaacgaccccaagcccttttgctatccgagtaatcagagaagtgcactcaacaggagcagagaactttatactttctaaccattgccttatcatacatttcacaggagaaattttgatttttctaaccatggcaaacatgataattaattcatctcccctaatgggtctcatatcacttctaggaaa

SEQ ID NO: 22340 - DNA, 5436 bp, Oryza sativa
aaaccaagaagtgtacttaagcctttccatgtaagtgtgtactccttatggaaaaaacgaaaggaaatttcatcttctatttctttcatagtgcacagaaattgcaaagtaagcaaacgagaaccaagctcatctaccacaataaatctctgccaaccaaccgctttccaaatagaacgaaattcaacttcaatacctatctttttcagcagctccggtgagtattctcgcgtgtgagcatactcccggtcgctcagcatgtagtaggcttgtctcttccgatcactgacaaggtcgaggtcggtgtcgttcaggagtcgtcgcggagcttcggcgtcttccatcaaaacatctgctgatgaatgagtactagactcgtcatgacgacttgatgaagagccggaccccttgaacagacgagacagtcgcctcctcattctgcacaatggagcaagaacggagtaactcggcgggggttagagatgacaagaatttcacacgccggttagtttcaccaaagcaacttgtatacatgcaactaaatattttaatttgagggaaacaatcaaaacttgaatgaacttgagagcaaactttggagagggaatgaaaatgtgttgaaatggggtggagttccctctcccggctggctggcttttatagggtacccataacagtcagaaatgacatgtgggacccactagccgttaccttgccaaaagtagcaggtaaccgttgcctggccggttgttcggccgaacccctggtgggcccaaccggccccactttcggccgttggattccaatgatcagtgtggtcttggcatagcgaatattcgttgaaaattttatttcggtttgctctaaaagattcatttgaagaatttcctcaaaattcaaaaatcctaaatgcaattttgaagttcaaatatatgatgatgcaaaaattcaaattgttgaaagcaaatatgcggatacataccaatttacctgttggcgaaggtcgcgtcatttaaagtccgacttgcgagaccgtacctccttctgaatcagttagcggattttccacccgtctccggaggtgatggagtgggcgtctttggcttcttcctccacaccttctttggttttggtgcggatggcggcttcttctgagccggctgctctagtttcttggccagtatgggtggttctaccggcatcttccaataacggttcttaggcatagttgtttccttctccatgaaattctgcataaatttcaccaggctgtccattttgggtggctccacttcgacctcttggatattctgtgggttcggcccatactttattctgaccatggagtattgttccgtcctcggttgaaactcaaacttctcttccttgccgttgacgtggaacgggcgccccaggatgagcggcgtctcttttcccgtgtccatgtccagcaccacgaagtcaaccgggataaagaaatcccgtgtcttgactgacacatcctccgctatccctgccgggtaacggactgacgaatcagccagttgaaggcgcatcggtgttggtgccaacactgtgaagttgagtctatcgaagacgtctttcggcatgatgctgacactggctcccaggtcgtataaggcctggtcgaattgttgtgccccgatctagcaagtgatcgtaggacacccctgatttttcttcttctccgggagcttgtggagtatcacgttgctgcattgcttgaccacctctgttgttgggagcggtctcttgttgttgactatgtccttgagataacgggtgtatgttggtacttgcatagcatccaacaacgacacgttgatatggatcttctggattacttcaacaaaacgagcgaattgctcgtccactgacggtttcctacaccgttggggaaacggcagcaaccgtgtgtcgcagtattcctgcggcacggtcttctctggctgaacctctttgtcagccgagtcactagatggcgcttgttttgatatcccgttagttcctacagggttaggatatagcggatcacgagtggacttacatcctctcgtcgtgatcgccttgactttacctcctcacgagtcgggtcgccccagaatcctcccagtttcatttgcagggtttaaggatgccaactgagctagctgggtttctatcattttattgaagctcagctggttttgaaaagcagaagcgaagccatctaacttgacattaatgttttctaggatcttatcattggccgcaagctttttgcttaatgcatcggtggttttagcttgcgcaaaaacgagatccttcaaggagggctgttagaaaaattaccgttgttgttacctccttgataatataggcgtggttggttccacccctaacctccttgtgaacgatacccattgttgttgcccatgtacatcgcctcctcacgggtttccgggtagtcattcccagaatgacctgtgttgccgcagacctcacatgtgacgtgagagtccaaggccttgacggtgccttgtggccgtttctcgtggtcgtccaagcatttcatgaggaggtccagcttggcagcaagtaactccgactccttgacggtgtgcatgcctcgctgacgcatctgaagtcgttcctcgttccaacccatattggagaccatcttctctattagttcaacggctccttgaaccattttagagaagaaggctcctccagctgccgcgtcgaggtgatagcgggacatcggggtgagtccattgtaaaagttctgcaggatcagctagtcgtccatcccatgatgaggacaggcggccacttactcctgtagacgctcccatgcttcaagaatagactcatctcttgtctgctggaaactggaaatccttccatgaagggcattggttttgcccatcgggaagaatttcgagagaaatgccctagagcatttgtcccaggtgttgacagcagcacggttggcatagaaccactgcttcgctctctcaagaagggagaacagaaatagtcgtagcctgatggtgtcgggactgacgcccttgatggtgtacatgctacagatcttcaggaactgttgcagatgagcattggcatcctcattaggcttgccacaaaacgggctagcctgcgccatcgtgatgaggctagagttcaagtcgaaatccacgtcgcctatgttcacctgtggcccaatgaccacattgtcagcagagggagcagcgaactcgtggagagtcttgttagccatagtcttgaacgtcggtggcgctggtacggttggtttctttgtcggtagagttttctgcggagcaactacttgaggcctgacgctccggaagaaagcgtcagaaatgcttgttggtatttcttaacgacattactagaaatataatccccggcaacggcgccagaaatgcttgttggtatttcttaacgacattactagaaatataattcccagtaatggcgtagaaatacttctggtatattatggttacagagttcatccgcaagcgcacggatataccattgtagcatttcacccgagagtattccaagggtatcgtatttattttatcccgtgggaatatcatgtagagagaacattgactaataatttatatatgactggtgataatcatattctaagcaggggttaagataatccaagggtagagtgacacacaagcgttaactactcattctcatactttataatctaagctaagtggaaagaaaataggaagaaaatctattcctatacttctaatatacatagtatacatacattctagttaaccgacattctatccgatgccctcctggtacttcgagaagccacccctgactgccgagttccttacgacagcccgtcatgaccatacaatcggggctaaatacgaaggaataccctccccatggaattaacttaggattatataccggcgcggaggaatacccgtactgagctgtcaccatcagtggcccacctctcatccgcaatatataaccccaaataatgatatcccgtaatctagacaatacgtctaaactaccagatactactctaatatcatcgttatgacatagagtaattgcataagcaaacattatatccacaccaaagcatctcccagataagctagccgtatatttagtataacatgaacataatgtaaagtaggtgctcatattctcggaaagtatttcaataccataaatgtatttagaagagtattctaataaaagtacaaagcttacaaaagagaagagaaaagctaatagaaacatacccaaactcttccgaaggcttccgaactcctgatttctactctattcctattccaccagctagatagtactaaactaaacttgagacaaatgagagagctattgcttgaggtgtgtgagtgaagtgagaaggtgatgtccttttataggcaccatccggaatctgaatttcttcattctcaacggatggcggctcgggaactttttcatcaatcgagtcggtggaagtggaaggttcagattgtgactcgattgttgaaggttcctctattatggacacggatgcctctagctggggttcatcgcattgcgtcatgatggaagtattttctagaatgcgatctagaattacttttccttctgacggtgttttatgcatgaatgatcctccagcaattatatccagataaaatgcagactccttatccagacctgtataaaatgttgcaaaagcacatactcgggtaaggacatggttggtccggactgcactaaattagtgaatctggaccaggctgcaccgattgattcgctttcaatctgccggaaactgagaatttcttctcgaagggcagtaatacgagtatctgggaagaaggcaagacaaaatttgtctcgcagcttttcccaactactgtttacacatccaatggtagaggtgtaccattgcttcgctctgtcttgaagggagaacggaaacaatttccactgtacggtttcttgcttcatgccacgaatcttaaggcatgagcagacttagcttaaagtcccacatatgatggttgtggttttctagatcaaggctagaaaaagttttttcactaaccatacgattagttcggagcgaatttcatagctagttgtataaattggctccgatgaaggaggtgtaaattggctccgatgaaggaggtggttcatagaattcgctcttaggagcagacagctcgaaaagagattgctccatggtcgagaagaatttaaaaggaatacttctctggatagcaagggtaaaggtagaataaaaaaaatgaaaagagatacgaggatgaactgggttcgaaaatgataagcaacaattccccggcaatggtgccagatattcttgtt

SEQ ID NO: 22341 - DNA, 671 bp, Oryza sativa
cgatgttccacaataaaatcggctatagcttgtcccttgattgccttgggcgattcatacctgaggtcaaattttgtcaaagcatatatccactttccaactcttcctttgagaactggagctaatagcatatatttgatcacatcggctttgcatacaacaatgcattcattggataacaaataatgccttaacttggtgcaaaagaagtataaacacaaacataatttttccactagagactaacttgtttctgtatccaatagcctatggcttaaatagaaaatagctctctccttgccctctagttcttgaatcaaaactgagccgattgacttctcatcggctgatagatataacctgaaaggcactctcttttgtggaggaattaaaactggacgagaactcaaatatgccttaatgttgtccaaagctttttgctgctccgccccccaagtgaattcctgatcgggtttcaacgtttacaaaggtgtaaaaggttctaaccgtccagacaagttagatataaaccttcgaacaaaattaatcttgccgatcaacgattgtagttgcatcttatcctccggaggttgaattttcttgatggcattaatactcctttgagggacctcaattcctctctcatgaacaagaaaacatagcccccaagt

SEQ ID NO: 22342 - DNA, 9471 bp, Oryza sativa
agtttgaactgaatttgaacttgtttttgttagattttgattctaggtatatagcatccatacatataattagttaggtatgtaatcatggattgtgaaataaagttaaatttgagttgttttgttgataggtataggtatgaatcgagttattataactaggtatatactcacaatttgaaaattttgaaaaatttgagtgattttgtgtatttgataccatggtgcccgggcaccatggtgccccatatgagtgtcctatatatatatatatatatatatatatatgtatatcgggagatactatactacaacaggggtgtagtatagctaaaacacacccacactcctgtcctccagccagtccgcacccccccccccccctaagccccaagccccttgtcgcatccatattctgagtaatatttttactggacagtacctacacaacatatatagatgtctaaccacttctccattcagttacaatcaatcccgatcctatttttttggatctgagagacagaggcggtcgctttggcggctcggtggagcagttgagcgtcggcaacggcaacagcctcgactaggtgcggcggcggcgacggagaggatggagcggcgtcctccatatcactctcccggcgccgacgcccgcctcaccggatgtggccacttgcttcttttcaacacgaagagaaacgggagaaggagaagaaagggatgccagtgatgttgcaacgtctcctctgtgcacctggcatcaaccccatcgatctagtcatctcctttctcctgttccgctttgttttctttctgtctttgctctgacacaccctttgattttgtaggattttcaatgtagtcaggcccgctgctagaggctattgttttcatgatgcatttagacggccagtggtgctccccttcaaccaagtgatcgtcagcgagaggagccggccgcggtggccggggcgacgactggtgctgcaccactctcccaagctgaggccaacaagaagagcaagcagcgtatcccggctccaattggagagattcaaaatgtaaattacagtgcatcaattatttgttgggatgaagacatctgttttgtctttcgttttcattgattcgcaggtatccttgtcagagcagaacaacacctacaacatgcacatactctggtgtttttctgcatctgctatttttgccaacgagatcatcgactccccaccctccaggtacaaatttgatccttggatataattgactagtgaatgctagaatctagatcattctgaatttatgattgttcttttcactaagatcattaggtccatttttattcttttttttgaacattatccatttttattcttgaaatcgcttttcatctgaaaagatggcaggttttatgtagtttacaacttgtatgttattaatctgagatatctggatattttagcctgaagcatcccaattacctattctacatttttcggccaactgcattcttaatttttcttttttgcacaatgtcatcgattgcatatcgggtctaggcgagcccaggaaccacagttaaggaaacaaaatgtgacctccatgcttgtctgaataaaaaaagaactgttggctaaaagtaggcataaaggaacctaaactggtagctcaattttttatgaagcattttatttcttctttggcgaaccatatctcatttagagtcatttatgagtgtaaattaaagacttctcttatgatgtaatcgcttttgtctatatccaggtggctgtgggattctctctggatattcgtgggtgatggatatatgtcgatgggagacctaaggaatctatagtgctttgtcggctcaacatcgatatgtggcactagcatcgtcttgcttgttggattcgtgcatgtaatagtaatttagttactaagagacatatgttgagaactatcggtgcaatagtaacttggttactaagagaattttttggcaatatcaatatgttatgttgagattggtgtaatataaatttatttactaagagaaatcttgtgacgatgttaatacgctatttttaagtaatttatttactgcgagaaagtatgataaccaattaagtgtagtattattttaagtaatttatttactaagagaatgaatgagaacaacctgacagtaattcatttactgagagaagtaaccaattgagaagggctgaaaacaacctgggagtaatccaattactgagataaggaatgaattggattccgagtaatttatttactaataaaagatattaacagggagtaatttagttactacgtgtgcaagagaaatgtgcgggttacagttggaatggactatttactaataataagatattatctgcgagtaatttatttactgaaagacaaaaatggtgagagagagaaaaaggtgcgggagacggtgggagagccccctggtgagggtggggggtgggggtgggtgctgtgaagggagtagtttagttattgcgcaccccatacgcggtttagcgcatccctatgtatatctgtatatacatatatatatatatatatatatatatatatatatatatatatatatatatatatatatatatatatatatatatatatatatttgcttgtcacattttcttacctcttcaaaatctgcttgcgtttccggcatcttattgctagctacatgataaaattaataagatctgatcgtcaggtgtgtttgaaatggtatttgttctctttttatattaatcaaaaattcaaaatctttgccacctatattgtccttggactacatgcacactatgctcgctctgagtgaaatatatatatgtgatcatagcaatgtcgatgatgttcaacacaaatatatatatgtgattatagcaatgtcgttgatgttcaacaaaaaaaaaagcaatgtcgatgaactgtgatctcatcttaattaatcatttagtgacctgtcctttatgtaggacattccaggacatcgtcttcccgaatcaagatgcattgacagagggatttgaattaatgatgagagttaattgattacatgatagaaaggtctgtaactagtactgatcgagctcaggatacccttaatcaaatacatgcttagtagagttattttcttacctctttaaaggtaataataatgcatgcaagggaccacatcgatcgatctcctagtattagtttgtgatatatctcggtggaacgcaaattactagcattgtagagaaaggcaatatatatttgtcccacgataaccctcatacaagctaaggtagtatttggttacaagaatgggatgagatgggacgaacccacttttaaaagtgcttagtttaggggtgagtgggatgggttggtccttggagaggaatattcctctcagatccgggatcaaccgatccggccaaatcttgcggacgaactcgtcccacctgggactagcggatggcgtgacgacgccctgctcgccctcgggagatggtgggctcgagcgaaggcagacggatcgagcgacggcggcggtgggggcctcggcgacggtggatcccgtggtggggagggcggatccggcgatggggacggctgcggcaaccgtgctcctccacccggacgaccgcgatggtggccacggccggggccaaggtcgaggccgacagcgccctcctcggcgcggcagaggtggggcctgacggcgatgcggccatgggaggcgaaggagaaggagagggagccagggaaggagaggaggaggcacttgctggcagtagcggagagggaggtgagggcagaggcggaggcggccatagttgctctgcccgcttgcccgctcgtgccgctcctccaccttcttgtcgtcaggttgtagtcgcgcaccttcgcccggctgaccgtcgtcggtggttgcaaacggtgtccatcccatccctctctcatcccttcaaccaaacaaaaaactgggatcgtcctattctacaaaccaaacacgcgagtggaatcatcctaaccctaaaatcagaggtggtttcatccattccacatagtcccaaaaccaaacacatgctaagtgctcctagctagcaagtggcactctaataaatctctactattataaaaattaaaaatgtttttgtaggtattttggtacatcatccatgtttgagttggtttttaagttcgttcattttttgaaatgcagttctgtgtttgagttcgattttaaactcgtttccttttggaaatacagaaggagtcgtatataaaatctctttaaaaaaactcacatgctaacttaagataaaagtcgtacttctaattgcagctcatgattttctaaaaagaaacatttaagcgaattcccacagtgaattttaccctatctaaatcatataacaataataagattaaagtagcattcacccgttgcaacgcacgggtatattttctagttaaataaatatcttagtcattaattttcaattaactcggtgtacccgtttgtttcgaccatgagattagattcctacctctccttcccaatttacgatggctctcatgcatggtttggtcccaccaaaataattaattaggatttctcacaaagaaaatcaacgaacaaaattttagatgcaaagccacgggaacaaaatgcaacacacctctcagctcgccttttttaccactatcaaacaagatggacctacacatcgtcttttcgatatgtgcccagaaacaagctagaagaaagacacttacatctctttattattagatctctaaacataccgtgccacttctctcgatctttctttaagcgtgcaacttttatactactccatggtagtggtgcttatcttctgatctgttgtaactagcttcaacaaagtgatatatcaaagctccatggcttttggataatatatttgtaggatcgaatagcagtaactaagccaattagagagaggggtgaatggttgcagtaccaaaaaatcgaaacttttagcggaattaaaagttaccctcgaatccgatgtagatcggtctgatcggagttgatccgctagtctgacaacgcctatgtcgtgcggtctgaccggtgttgatctcccagtcgaaccgccctgcaatcgcctctacctcctgtcgccgccgccggttagaccaccgtgttcctgtcggtctgaccgtctgcgaatccgagcaaacacaaattgaagatgtctcaaagtagattaaaactttattacttctctctgtgtttacaaagtgcaacaacaacattcctcataaaaatctcgactaaactcaaaacactaacttttttctcttaactcaactctctaaaaaacgataacacccctccctttctatatatacctgacgtaagtagcctaaagccacaatccaaccttgtacagtaagtcttaatctcctaagaaaccttcccatacaagaaacaaactttacaaactccaattgtaccaaatttggactccctccaaatttgactacgcatcccatacgcacacaatactccatcgtatgtcatatggaatcttcaccaaccgcgtgcattaatctttagcctaagcatcccgcatgatatcatgatcgtgtggacatcatcttctcccaagttggcttccaatccatcatcgggaacattctcccgaggcatcaagaccacttatgcatacatcaaccaagaaaccatatatgagcatagttctcatcaacttaacttattgttagcaaacaacaatattacatacgcatagtattcatctagaagtcataaacatatatgaattatccacggatatccaacgaaacaacccgaaaccaaaaccgacacagagtcggctggtcagaccacgggttgactggcctgactgctcactatactccgtctgattggccttacccagccggtctgaccgcaaccgtcagacttatcaaacctatccatcacctgtaaaatccaatcatctccaaaaccacttcaccaataatctccaaatatcaaaactaataatctcagatgccaattgtttattatagaataagaatgaaataccctttgattttacaatatatactaacattgtaggtttttgggtgctgtcagttgaatttttagcacttagtccgaggtgcctcgaccccgcgtgctttgccgccggaaatttgtttattgatatttttaggaaagtaactaactctgtcagttagttgctaattaatcgttttcaagggggtaatgcatgaaaaaagaaacataatataaacgtaggtactcacatgtacacgtgtacttactcatatgcatgtatacatgtacaccctacctctataagcatctctgagagactgcaccggtatattttgagtttaacaaaattatcaccggcgcatcgctgtcgacggaaacatcatctaccattgaaaggataattacccatgttaagtgtagctatgggtaccatcctcccgctcctttacttctgtccctgtattagttgaaataacatttaaattatacatataatttttattcaatcacattgttatattttgtacaattaaatcaaatcaataacttaagaacaatgttgactatttttttttaccagaaacagtgagagacccccacaatatggactatattttcatttataaaaagtaattgttttgggccgtagtttgaccctttgcatatataatggacaaaaaaaagaaaacatatgttataaaatcatatatcacatcatgcataactaaattagttctacaatgttttaaaaaaaattcaacattaatattatttaccattaaattaataatttaagatctatattaattatatttttaacatgtcaaataaaattgtattttagtttgtatttttattctttgcacgtaatcctaaccgaccttgaaattttgaaaaagataacaatatagagtatatatatcagtatatatccattatcagttcacaaatatgtacaactgaattagatttataatatcaacaagaaacatgtcatatctttgggctttgcgtggcattcaagaattttgaaaaatcatgaaaagaaaataatgatatgagtaatagaatcacataaatatgcttactatgtagggttcagtatgtttgtgccacatcagttcacaaatatgttcacaaatatgcacgactcaattagatttacaatatcagtcatatctttgggctttgcataccgttcgggacttatgaaaaatcatgagaaaaacttaatgacatgaattatatcgtccaataaatatgtttagcatttagggtccagtctattcagatcatatggggataacctaaaatattgattctattaccatcatgtatagattctacattttgcaaactgcaccctaaataataagtaaaagaatggagagagtacatgccatgtttttttccctttgatttttattaaataagcatggtatacgggtatatcatactaagtttagttaattaggtaacataaatcatagtaaacttttatatgaaaaataatacaataaaaatatacttcaaaattggcataacaaaagtgtactttagtccatggtgcctaaatatttataaattatctacacatactaattatatttatatagctctgttgttatttcaaagtaaattcatttttagcagaaaataaggaatcatatgaaaaacagagggggtgtacacgtaaatagaaatctgtctttaattagaaatagtcgtattatccatatttttaacagaaaatatatttaattaatatgttctaaaatccataaatacatctacaatatacaagaaaaaatgttacgtaaagtttataaactccataagtaagacatgctaaatatttaaaaaaagaaacacacatagtaaataattgttcataaactaaagaccatgcagataataatttcatatgaaccaactccattgttgccattcaatattttctcataaattaaagaccgcatggtttaagttatttacgtcggtggaggccctaatgtcgtcaagttcaagcaagacatcaataacaacggtcaaaaagacggcgcctccatctctctgttggcgcaaaaaaagttaaaaaaaaaactagaactgcatgatctaagaacatcaatcaactaattcaacatcgatggcttagatcatgtttttccgcactaagcaaagatgaccatgtatgggctaaataattgagattatgtaaattaaaactccaacaggaatgtctcatgtatctctttattgtaacagtatggttatgaccacttttttcttattcaatgtaatgtacctgtttggtgagaaaagaagatacttcctctgttttacaatgtaagtcattctagcactttccacattcatattgatgttaatgaatctaaataaatatatatgtctagattcattaacatcaatataaatgttggaattgctagaatgacttacattgtgaaacggagggaatatataggatcacaaacaagctcagaacgaacacattaatttgattatcaaaaccagagatcgagtcacgtggaaccgtcaaatgtagagagccaacgaactgtgtagcatcgcggttgcggcttagcaacaaccatgcataaagtccttggaattgttggaaatgttggtaataaattggtcgacttgatactgtttattctagtaaacgttgaatatattgtcaaattttaaatttattgcatcttaattacaaattccaatataaatccctagcatgatgtgtcttgtttgaactcatattcactattataaattgacatacaatactaaaatcgttttcacaagcggtataaagtgatttttgcatgcagccatcccaaatgcatgcgccaaaaggactgtgaaaaatcagatttttgcatgcggccagtgcaaccacatgcaaaaatctcattaattttcgcatacggtcacctatacaaccgaatgaaaaaaaaatttggctcaaataaaaatctaaaaagcccaagcgaactctagcatgtcatcgtcatcggctggatccgcgtgaggtggtgcccaagccggacgtccttcacaccggatccgcctcccgccatcatcgtcggcgccggatccacgccgggcgtcgccgcccactcccgcgcggtcagtgaggagaggaagagaggagaggagaaaagagagacagagaggaagagacataaggagagggacagaggagaggaggtgaaaaaaaatttaaagtggtgagagggaaatgagagagggggagaaaatatatgtgaagaacatgcatggggtattttcgacacttaagaggcctacatgtgaaaatctattttatgcgc

SEQ ID NO: 22343 - DNA, 4129 bp, Oryza sativa
ccccccccccccccggtgcccttttgctgtcgggcctaatgggccgcgccctagcgcccccgctgccccttgttttgccagcccaatgccgcacggtagtgggccgaatcctttagatttcggcccaccacccaatttaccatttaaatttagtttttaattttattttcagcagcaattacattttagtccctatgttttctataatttagtggaaacagttcatcagctcttcatattattatgtaatggtccaatagactacttatgttatgtgttaattaacataggtgtttattcaaataccctatttcactaaatttatttgttgtcttaataacatgccttttgcatattatttcaagacacgctctactttctcgttttattaatttacaaaattctataaattttgtactttgatttagcaaattctcttaattatgtacaacataattaatggaggatttaatgcatgttccacttcacattttgacttggaaattaatcacatgtcgatggaatcctatactttggtcatatcgaccataacttaggcagcgagtatctcgcccattatcaagtggtctacattttgagatgattacccgatggagtcctacaaattgatcgcactggtcataacctaggcagcgagcatttcacccatctcacagaggtctacatctcacgatgattacccacatgtgttattttccgagaatatgtttcgaaaaatgagattatttgaaatttggttgaacacaaggtagtggagtcctaaacaatggctgcggtatattcaccagaatatatttgcctggagaccatgttttaggcagcaagtataacttgcccactattaagagatctactctactgtttaattacttggagattatccacattgtgccacctaatttcgaattctaactcaaaattgtcaggtctattacctgcatttttcgaaagattacaaaatatgaagttttacattacgcattgagattacaaccttaatatcatgtttttattaatttacctctgtaaattgataatgttaaccatgattgtagggacatggcaacaaaagagttcgacgaactcgccctcgattggactaactatcctatctgggcttctgatattaaaatcaattttgcctctcgggggattttaaatacaattgaggaacccaatgatggggacccggaaattgagcccaggaagctcaatacagccctttttcttttgagactctacattcacaaggatctcaaacatgaatacatgttagagacgagccctctcaacctttggaaagctctaaaagagcgttatgaccagcaaaaggaactcatttggcctgaggctaattatgagtgggttcatttacgcctacaggactttaaaactgtggcagaatacaaccatgttgttcataacatttgttccaggttgaagttttgcaaacaagagccaacggaggcagagaagatagagaaaactctatcaactatgcttccggaggacaggatactgactcaacagtatcgcgctaacattttccagaaacattatctgcttatacatacattgactcaggcagaaagacaccatgagctttctttaaagaatgcccaacagcgcccaccgggctctactccactgcctgaggtgcacttcaatgtacagaataatgctgagaataagaaaggattcaagggaaattcttcgaataatcctaagaatctgactggaaagcgcaaacgcaacaacgacaggcgcaaattcaagggtcgaaagaaaggaaaagggaagggtaaggcaccacaacctcgtagcaatggcaacaagcattgcaacaggtgtggatctgacactcatgtcgctaaagactgccgcatcccgaaacatcttgttctcttgtaccaaaaatccctcaaggacaaaaagtcttctgagaacccaagatttgaagcctacttcaatcttacacatgaagagcgccctaaggttgcaagttctcaccaggctcctgttgaaccagagagcaacctcaatgttctcccataagatgtcgctccactctctgcgatggacgatatgttcatcgaatactgctcaacggacccacttggagatttgcaatgatctcggtgcgtcacacttggagatgaagctgctcttatctcagtgtgattgaaacagtatattgatatcctataagtttgccaaacaatattggttgtaataagtagataagtacgaactcccttatattgtaaggttgtatggcttgctagtcattagagtatgtactattaacatatgtaaacgtcatcctatgtatttgatgttttaattattgtatgtatgtatatatattggataaagaattcttaatcaagcaattcttctttcattatagatgtctaaggatatcgctccgattggagaggaattatgtcttgtggacagtggtaccacaaactctatacttagagagattaaatactttcaaactctcaaaaagagagaaggcaaagttttgactatcgctgggcgcgatactgtgatagttggctcaggacgagcaattattacactcccaatgggtacacaaattaaaattgaaatgctttattgtatcctgattcaacccgtaccctactaagttatagagatatccgtcaaaatgggtttcacattgaaacccatatggataatcgagaagaatttcttctcttaaccaaacaaaacggatatggcaaacgcatttgcgagaaaattccatcactcacatcgggattgtactatacatacattaagcccattgcacatgttgcgtacaaagtaatttttcaaaatgttgatgcattccacacttggcatgatcgacttggccaccccggtatcgggatgatgagaaaaattattggcaactctgttggtcatcatttgatcactgacaaatttcccaaatcctctgatttcgtatgcactgcatgtgctactgggaaactgattttgagaccatcttatctcaaaattagagccgaaccacttaaattctttgaacgcattcaaggagatatttgtggccctattgtgccaagacctgtaccgttcaggtactttatggttttgattgacgcatctactagatggtctcatgtgtggcttctatcgacacgaaaccatgtctttgccaaattaatgtctcaaattataaggctgaaggcaaattaccctgaacataggattcaatcaatccgtatggacaatgctgccgaatttacatcccatgctttcgatgattattgtatggcattgggaattcaggttcagcactctgttccatatgaccacacacaaaatggtttggctgaatcattgatcaaaagaattaagcttattgctcgaccattattgatgaattgcaaattaccttcgtcgtgttggggtcatgcagttctgcacgctgctgaccttgtccaactacgaccaattgcatatcatgaaacttccccaatgcatttagtacgtggaaatcctccaagtatttcccatttgctgtatacataccgatctcaccaccacagcgtaccgctatgggcccacacaggaatgtggggatctatgtgggattcaaatctccgtcgatcataaagtatttagaacccaacaggtgatctatttactgcccggttcgctgactctatctttgacgaggaacatttcccggcattagggggagacttcaagtgccagaaagaatgccaggaaattgattgggatgcccaaggtattcccgccttagacccacgtactactgaaactgaacttcaagttcagaaaattatacatttgtaaagacttgcaaataacctgccagatgcatttaccaattaaaaaggtgtgactaaatctttcattcccgctcagaatgcgccagaaagagtggaggtaccaaataaaaccactcaacttccactcactaaaaagagaggaagaagtatggccactcagcgagaaacaattgctaataagcaaacaaacatggtaaatgcaaaccaacctttagtttgtacacaccaaattgataatatatatcaagcagatcgtg

SEQ ID NO: 22344 - DNA, 6929 bp, Oryza sativa
atgaaggttcctgatggaatcgacatcccgaatcagaaggtaaatcgtaacatgtattgtgttaagttgcagaagtcactttatggcttaaaacaatcgggcaggatgtggtacaaccgattaagtgaattcctttcactaaagggatacactaaaaatgatgattgcccgtgcgtctttatcaaaaagtcctccacaggattttgtattatctcggtatatgtcgatgatctcaacatcattggcaacacacaagatattaatgaagcacgtcatcatttaaagacggaatttgagatgaaggatttgggtcaaaccaaattttgcttaggtctacaacttgagcatttaccttctggaatccttgtgcaccaaagtgcatatacccagaaaattttggagatatttaatatggacaagtcatatccttccaaaacccctatcgtggttcgatctttagacgtggagaaagatccatttagaccaaaggaagatggagaggatgtacttggtcctgattttccatatcttagtgctattggcgcacttatgtaccttgcaaatagtacgaggccagatattgctttctcggtaaatctattagcaagatacagcgctgctcctaccaaacgccattggactggagttaagaatgtcttttgatatcttaatggcacaagagatcttggacttttctttaaaaagaaccaggattcaactttaattgggtatactgatgttggctatctatctgatccccacaatgctagatcacaaataggatttgtatttttacaaggtggaactgctatttcatagaagtcttctaaatagactctggtagccacttccacaaatcattctgaaataattgcattatatgaggcatcacatgaatatgtatggcttcgcagaatggttaaccacatattaacatcttgtggtattggttcattggaatcacctaccattatctatgaagataatgccacttgtgttgttcagatggaaactggttatattaagagcaacatcactaagcatattgctcctaaattattttatcctcatgagcttcagcaacatggagagataaacatcttgcaaactaagtcatgtaataatcttgctgatttattcacaaaatctctaccatactccacattctttaaatgtgtcgaaggaattggtatgagacaactcaaaaatttgcaggattcatggggagtatcttcctctagaaaataacctattttcgtcatattatactctttttcctttgtatgagttttaccctttaggttttctcatccaaagtttttaacgaggtaatatcaacataagttatatgtcttatcatttggcttttccccactggggtttttactaaatgataactgtagacattatactattttggatcatactatgagctttactcatagatctaaaatagtcaataatatatatcacggttctctccttatttttcccactgggttttcgaggggttttacgtgatgtatttaactataattatttctaagattatctttacagatatctggaacagtgaaacagcaatgatcaaagctagattcgataagggggagtgttatgaaacaacagggtgatcttatccatataaaaggatggatcgcaaccgaaggcaaccgcgccttccctaggtgctccttggcaatggacgcgatggttcccaaccatcgcgtctctggttgccaccccttccccatctatatattgtaccgcattgatcaataaagattccgctcattcattctctacattcttgtgtgcaattctctctctcactcactccctctcgctcaatcaattctatacactttcaacagatttaatgttctgcttgaaaacataaaggttggatactctctattacatcccattgattttctttttaagaaaacggattaaaatgaggtctctacgtctactgagcggatgtacacagccaactgtaaatcccattattaaaattattgagagaccgaagtgcattgcttttggtgtagtggtagtgttactggtatccgcagggctaaaatttgaagtcatctaatgacgcacccgcagctgcagttcgatcagttggtattcggcaaggtttatttatttattgttcattgcatctatctgtttgtatatgtgtgcatctttcgttaaaaaagctataggaaaaaaaagagaaaaattgtttacagtagcattcagatgtcatattttaatttcagagcacggaaaaatgttggttcaactgttagcgctgaaagtatattttcttactccttttagcatttcattgaatccaccattatccccctccccatcatttcttcctcttccccctcccgcccggcctccccttcttccatattcaaagtaagggatggtagaaggggaggttgctatcagggagggaagcaaggacggcgctgcaaccaaggcaaccatgaacaagtttatgtgtaaggggaagaaagaatgggtcgagggataatggtggtatttcgtacatgcatgctgtgtgttttttttaaagaaaaatgaaagctaaagaaaactatttgaaatttgggtaatggaatacttaatagccgaaaggagataactctccttgctcagaagtaaatctggatcaatcggtgttatatataaaactaaataccagatgaaaatccagatttaccgaaacaatttttcatagaaggaaacaaaatgccggatgaatatggatgaatggatcaatttttttggctctgtcaaacgtacatatggtgctgaaggttcccactaataacacacgtggatccttcgttacctttggatgtgccggttatcagttcacatccacgagtgtatagttgttgcatattagaaaaggaaaacttttacgttaccttttgccatcgatgatttttactgtcattgagaaagaatctagacagtccatcctttccgatctgaggtctgaaaacgcttagtacctggtggtaaagtccctcatgagcaatgtgtgtggatcaatggagaggcaccacagctgtgagggcaaagaatggaatttcgtttcgcccatacatttggatcataccaatctgcaagcatcgattccatgatgcccctcctacacacatcatctttctcctaccgctggccgctctccaatacaccatcaatctctttcggcgccaccacctccaagatatcggtgccacccttacggctatggcgggattcccgttctcttccactaccacctccaggaggacatccttccattcatataatataagagattatcaagaatatatcgtgcgtaagctattcgctcatcaatttgtaaattataagtaccgatcctaacccttacagatcaatagttagatgtagttggtacctcctcaaggataataaaaatatctttgttatcggtttgcaatagtagagtttaattatgtaatagctattcttagctggttacaaggcttgtagtattcaaggggtttttttggtttttgttttcttgttttctctgtaaataactcttttatttttaatatataactactgggcaaagccctggtagtaatttacataaaaaatgtaatagctaatctatagcacgattatcccttaatctatatagcccatataattggaacgaaaaacttaatatacattaagacaaatagtctagaaaatagtagcttttggattaatctcatgcttagatctcaatcatccatttgtcatatgcctttacaactcactaagtgtagttattattattataaagctcaatgcaaccatgacactaaaagagtaacaaatatgagatctctcttgcttgatacataactaatgtacaattacaatttcacaacaagtactatatagagctcaaaataaaatattgtccatttaggcactacaagtacatgatttataaattattttcttcgagttttctttgaattatttctaaattctctacttcaatatgcgggatattagctagtgtatattgtgtttgagacattttagcctattttttaaaaatgatggtattgaatactctttgtgatagacgacatggttttcgaaatacaactttgaccactaattattttttgttctaaaatatttagaagagctattaaaataagatagtaaaacatactaaggatccttaaacttgttgttagatgtcatccagatcactgaactcggatatgtattaaaatacccaaaactctaatactgctattgaggtccaaaaccgtgtttttgaccatttgaacaccaatgtggcacagcaacatcgactctgctggcatggggctcacagggcagcaaatgtcctcactttggacgatgtattttgtgcatgtgctgatgtgcttctcaactctttctcattctcatccacagttttcttgcccaaggaggatgccctagtgtttaaggaccaacagcaggtctctgtgtgttggcctgccacattggcactaggatggtcaactgagcttttcgacctttgattgtaaatttagcaagttcagggggtctaaatatgcttttttagagttttgagatgatctgaagataagtttcagaaccattggagtatttaactcttatgataaatcagttgtgcttattttataccgatagttccatatttatccgatttctttgtaagaataatacttcgtagtcaaatcaattgtgcttacggttgataaccatcagagttgttgtgtgaggattgtctgatgcttggtgacagagtataatagatcgtggacgtcattggtcatccttgaacaaatatatacttacatctcgtgaaagataactagcgatatcgaagagcacatcatagctagataggaagggcgcatgtttgttgaactgtggtggtatgagtgtgaagctgttcattaactatgtaaatcaacctcactctctaaaacaaaaataaaaatcttagagcaccataccacttatgaaaacctcaaattgaaattaaaatgaaaatatgtcgatcacaaacctaacagctgcaatattgtgggtttgtacaagcttgtgaccaaaaacacgctatctgagtgtaaacaatttccaatgcctcaaaaaggtagcagatctattggaccagagaaagagaccagtaccaaccactctgccattttatccatttttagtacccattccaggatcctaatgttgttcaaagataataaaaacacgtggtcaacaactgatttgggtaaattttagctccaacctttcttcaaagaaaaaaaaaacacaatagctccaaggtttctagagagcagagactgtatacgaaatactaacactgtattcaccataataatgtaataccaacaatttatctaaaagtttcacatacatttattcgattatgtaagtaatttctagcctaaacactaacttgggatacacacaactatgtgtattttatagtaatgttgtgcaagagaagcaaaatttaatatgcatgcatggatcagaattgatttcaagtcctttctttacagtgatttcaaggtaggacatgagcccaatatggtcaatgattctgttcttataatacacatgggacatgggttaatttaagccaatattctagaaaaaagagttgatacatcccaagttacatggcagtgtgtgatcgatcaaaatgtgatattcttaatgtattgcattgctatgtccacatcaaaatgtgagtaatctccgcgagaaatgggcctactcttttgactgtttttttttttaagagatcaaaggaagagtcctcgcaaaaaaaaaagtgatcaaattaagaaagagaagtaaaaaaaaactactatagtaggacacacagtagcttgtgtgtttgcttacacactgatatatatttaaaaagaatatgttgtactaaaatcctaaataaacattgctggcaaaaggggaaaacggaacagttgactgcaccatccatacatacatagtttggtcgatagattctgaagaaaaattgtctttcctaaataaattgagaatattcttcagatggactcatgaacagtgcatatgaaattaataacagtacttgctagaaaccccataaaatggatatacatttacgcggtcccggtttcagaattacactatataaaaaaaatcattatcagtcatcattcagttggacaactgctctctaagtagttgtgcatcaaagcaaattcgaccgattaaacacaaaacattgatgcataatatttgtctcggaaatgcacgacccgagtctgtttcaatgggccatgctgttgaacataggccaattcaagtccacatcactgttctggcacattgtgcattatatcatgttcatatgctgctcttgtttggtcttaattcctcaattgtacacgcacacaatggccttgtccaagcactcaagtaactagaggccacgcacatgattgttagtagtacatacaagtggctacttgtaggatcattgattattaattagctagtgtacatgctgagaaatgtggagcaatatatttatatatatttcagaatatatatatatatatatatatatatatatatatatatatatatatatatatacatatatacatacatatacatatacacatatatatatatacatacatacatacatatacatatacacatatatatatatatatacatacacacatatatatatatatatatatgtatatacatacatatacacatacatacatatacatacatatacacatacatatacacatacatacatatacatatatatatatatacacacatatatatatatatatatatacata

SEQ ID NO: 22345 - DNA, 10373 bp, Oryza sativa
  unsure (1)..(10373): unsure at all n locations
tatatatacacacaagacttgcatgtaaatccagtggagtagttgttaatttaggcacttttagtgactttaatttgcaaaggcaaattaagttggtctatctgttctgttttctccatgtttttttttttgattttgtgagttagtaaggggttaattgttggagcccaattaatacaacctaattttaattagggtgggggacaatgcatccaaaatccccccttgcatgtgagggagggggtcatgctgggtcatggcatatttagtggtcatgtgcatgttgggtgtgtatgggttgtatagtgcatgcagttgcctgtggttgcttaacttgcttgcttcatagcttctcttgaccgaccttgcttgcatcttagctgtccatttattttcttttcttttcttttattttattgagggagaggatatcagaagagtgctcagtccagagcttgcatttcactattgcagcgcagcagcacttgcatttgcttgaatgatccatccatctccgaagccaaatcgatcggttcattcatgcaagccggtgctttgcagctttaaggaaagtaaggtcatttgccagcccatcatatatgcctcctctacactgtcactactacactttactactctacagactacagttgtcacttgtcagtggacacactggctgcatattgccttaggttaggtttaccctccacatgcgcacacaccctacctttgagattctttccttgctccttaattctaccggctgctgctttcaagggtccagcgagtgatattccattccttcttttttacctatcgtaggacatcgacatgtttttaattattcttttttaaattcaatttatgaaaaatatagctacattaaagtacttttcatataaaattcactgatactattttcacaaaacaaatcttattagtttttcatatattagtgatttaggattttaagttttggctactcactcgtacagaaagagcaatcccttcctattcatcactaccggtttaacgtgagccaacccttactgcaggttcatggcattggagggaattttcctgccaataagccatgaaccggcaatgatgctaaacatccctactggtccagtgaccgacgggcaatgagctagcagggatttcaatggtctggactgttttttaagacattgggtggtccggacttgaacttttatttgaataactcgtacaagatgcaagacggtgcgaagttctattgatacagtagaagaaaaattacaagattacaaccccgtaagatcgtaaccaggaaaaagaaaaaaatataccaccactcacacatcaacagcttcaacacacagaacaaggagaggcctagcaccggaccagccacccgctaagcgtgaccgaccgctgctaggccaacaaagaaaacggctgagatcgcccaaaacccaacccttactatcaacacaaagccctgctctatccaaatcttcaggagttaaggagagagggcgaaagagaagaatggaacacctctccccctaggccctctgacgtggccaacttgtagagactagaacgccgccacaagagaatgaaatctagagtgagcttgcaccgattggttggggggttttggctagggcatgcctaaacgacgtctccaaggagagaagcaatggaaaacaccgccgctgccgtccgtgaaggtctcaaagagaaccgaggctgggctttcacctggcatccacacatgaaggatgagacggcacgacaatgccctcaggaggggaatgacgcttcgagcatcatcgctgccggcccggccgaggccgggctaggttctcacccgccgctcaccacctacgagtccacggcgggtgccccgatgctccaccaccgtccaacctctgccgacatgtgcgaccactgcaccagtgccctccaccggctggccttcgtgcgctgtagatcgcactgcaccccaccgccgatacttctcccaccgtgccccccctcatcactgcccgccccgcctcctcgcaccgtgccaggctcctcccgcgccgccatgcctnacccgccccggctagcctcatccaatgcccgccgcgcctcatcgcgccaagccggcctcccaccaccggccacgcctcctcgcgccatgccgatctccgccaccaccggtcgtgcctctacgcgccgagctagcctctgagcactcctcccgccactgacgcgccggccaaatgcggtcatctgccacacctccctggctagccgcccgtggtcgtccatgcctcctctgccgaaatgcccgccgcacgcgtcctgtccaccggcaaccgccgctgtagagtagacatcatcaccgtcgcggaggagtcaccatgacgccactgccaccacgaccagaaccaccgccgccccactcaatcccgccacaagccatcaccccaccgccaccgtgccggcctccacctgccgtgtaccgccgccaccatgccggcctctgccggctgcgaaccgccgccaccgtgccggccttacctcctcacgcgcgccgcgccgcgccgccctgccactgtcgcgccagctgttgccgccgccatcgcatgggctccgcgtgcgcctccatcgatcgcggattcgggcctcgcccgccgccgcaccaccatgcgccgccctcactgtcgccaccagcaagcgtcgtagccagcagctcctccttccccatcgccggtcacctccttcctggcccactgcgtcctcctcccgtgtgccagctatgcgggggagcacaggggaggccagatcaggtgtgaagcatcggatccggcgctgggggagccagatccggtttcgctctgtgccggcgagcccaccgccgcgacctctgccccgccgccaactccgcctccttcgcccctccactgccactacatcctctgccccgccgccgcctcctccaccctgcctccttcaccttgccagccggccgagcaggccggcgccaccttcttcgcgccccatgccgcgtcggtgccccaaccttagcgccgctcttggggaagaagaagagcgcccggccgccgctgtccttgctgtcgtatggctttgccgacggccgctcgggcggcggcgaggcggaggggaagagcgagggtagcggcggtggtggggttgtgtcgctgtccggtcgcccttggggtgggagcgacgctccggacttgaacttgaaccggcagtgacgtactataggtactgcaaaatgcgtacatcctaaactggcatctgtttgtaaaatagatggagtatcttgcatgcacaattagttatgtctcaatctccttatgaaatcatcggagttaatttgtggaggttaggcacagaaggtgccaatcggattcgatgattaaaaaaacatactctatatacctggcctagctgatctttttgtacaagtgtaaatcccacaatgcatcaaaggatgtgccacgtcttcaaaatagtattaaccattggatgctaacagtgaaatgacatacaccgttggatgaacatagattacaaaacacaggtgttagcaaatcttcacgagacttctagattccaaatccaaataagagaaatcggtgaggagagaccgggtccaaatgtcaatgcaattttttaatttgatccttctataaaattcattttacatataagccctcaatttgatatatctttgatttctcgaaatggttgcattgtactgccttcccaatatgtaagatgtttaggattcaacatgggtattaaaaaataggtaaaattaaatgacagaagattacgattgattgaaatgagcaagtcactagagaattaacaggttgaatgttgtgattggttatttagttaacattttatgattttcttttacaatttttgacaatgtatattaggttggttagagtcacgcgaatgcgtgacttcatagcctagttaatatggtgaatgtcaattaattaatcgttgtgtagattaatttacataggagcaaataaatatgtgtgcacggtacagaggactggaatgaaatctacctctggataggttgaccttatctatatggaaatgctaattatccatcacaaatttactctctctctcatgatcctttttggaactttatgtgcatatgatgctccaaaatcaaaacatttagcattattgtacttcttttagaaacctggtgctcataagatggtcaaatcaaaacattagcattattgtacaagttgaaggttagtacattagaagttttcaagattaaatacatccgaaccctcgcaatactagtgcgtttgtctgaattaatgatcttaaccgagatcgcttgatgtctatgagcctcataggtggccatattccctaataagccggaataaaaattaatttacaagtaaaacttttacacatttattcgtatcgacttaaaagtcaacacttaaaaaatcgcgttgaaaatatcttaaaatcaacttcaagttcaaaaatttaaattttggtgttttcttttggcttattaggccaaccgatagggctctattatttttgtttccttgaagttattgagtgcatgcaattaaacgttttaaaacatttatcacttatacacacaaatatattttgatttatcatatggtactgatattagtaggctggtatataaagtacttcaatatatattattctatatattttttattttttctagcgattatatgagagatgtactctcgaaaattaagaaatgtaatgagcaagcagtacatgtattgaacacaacattgacgtccagtggcgcaagtaggagaattttgataatttgacactttctttgccactttgctttaattgacacttttgaaatgatacgtgggatcatccgactgaatgaaagtggatcattccttctaagatcatggaccatcattgagctaacccgaatttgaatgtgtattaaaatcctatccaggaccagccagagtatacaaacgacaaattcatacacagatccacgtcttataaaaataataaataattcttacaaatgcagcggaaataagcaaaacttctaatagacacaaccaaaatgtagcttcctccataatccacaggcatcctaaacatccggaacaagctcaatcctcaaaaaaactcaccatctgaaccaatctctgcctctggggtggggaaaaatatcgtacccaacaagtcataccaaagggaaggtatgatgtaagatattcacaaaggaatggctcattggatatttgcagtaaaagcagcatttataaatcataatttgaataagtaaaatagtatatgtaattaaccaatattaaatcatcactgcccaatgctaaaaccccgttgcaacaggcccaaccaaaccacatgaactacacaaattcaaaaagtcatattattatagtggaactaatcacagtgagctggttgaccgcccaataactgcaggcacagctattccaataactgcgggcacatctattcgaatagttttaactctgatcagaggtgtacaaatttacccacaagacacaattccacacatattaccatgccccaaagtaccaccacgatactgcaaagggggaaatcgtgacaaaacccgttatataaccctccctaaccgaacatacccacctcaggtttcaccccctccttgtgccaagttgggcagttccctctcgtgcctaggtaaatccagaaacaacatagactaatatccaggtccgaactgcaccatcgcctctacccttgccatggtatgtcagctaagttaagttatactctagatttagcctgaagcccatgctggcctatggtaagtacgagtatatcttcctgggattctcgagaaccggtccttaattatcatggacacgactttcgaaaccatacacccacaacccaccattatagcatattttagtttaattaaaccataactatggtagtccatcataatataattaaggactaaattataatgaatcccattgcgagctaattgatataagcatggctaataagcattcctaaaccaatcatctagtcaattgtagcccaagttatcaatggcataagatattcagcaggctaagtacaataggcatccatcccacatgacattctaaaataatgatcaatcttgtatgtatgaactgcgttgctcttgatctgacgaaacctcggcaaccattttgaaataaactggatcactagaactgacggaatctaaatgacaaacaaagcatacatgaaatacaagcaataaggctactgaaacagcaaaagaaaccatttttaatggatttcatacattttaccggattcacttcaacttgaatgggttaaaacggagctcagattatttagttatgaattttacaatatgagctacgttattactaataaccgaaaaaccttattcatttattacatattaatgcccataaataaatagatcaatggaaatatacctccggtaagcaagcctcgcgaattagcgactcaacgagccaatacttcgtgacacgggaccatccaaacggtcaaccgaaccggtgaacagaaccggcggctcagaacgactatggctaaactggtaaactagacacggtttacggcaaagactcgatatggcaaacaataggccagtaggagtttagggatgcacctacggctttgtgactcagctaccgagcattcagtagagacagtgacttggtttgacgagacgcagcagtggcacgacgagacgcggcagcggctcagctcggctagggcagcacacggcagcggctcggcatgcagctgggccggcgtacggcagcggctagggcagcggcggcgcatggtggcggcggctgtggcacagcgaggcggtggctgcggcgcgtggcagagcagtgcggcggcagcggcgcggtgcagggcagcggcacggcaaggcacggccggcagcggcggacgcgacggcaatgctagggttttgcgggataaacaattagggttacgacgataacgctaggaaaaataaaacctaaactaggagatcacaggaaaattcctcaccaaaccgagacgatcggcgaggaggagacgacgacggtggtctggcagcaacacatgaaaacaacggtgacgctagatgagaaacaaatggaatagattaaatagataaattgatggttgcagcggtaaacacaccaatagagagggagatcggaataccggcgacacaacggcgatgacggcaatggcgggaggcggccggcggcggctagggcacgggaggtggtggcggcttgggtttgggcacaaataaatttgtgaagaaaattagggggatataatagcttatatagagtagaattaagagggaggtggggccggctaggggcgcgacaacaggagaggaggggaggctgactcgggttaaggggggcggccaagagggagagggggaatggagttggattaggattaggactttcccaactcggaaaagaaatgtggtgctattttaggaaaagaacggaaacggaaccggaaactgactcggactcggctcgttatacaaaacggaaccgcggacggaaagagaatactggactgggcatggttcacaaccaaaggcgggagaggaaaattattgttaattcaactcctcacaaaataaattaacatttattccgatgctctgaatattcaaagagaattcaaaaaaattctccctgatatttccgattattaaatacattgttaattagggttttctcctggttaaccaaagtaatttctatagataatttattggtaaattagaaactatagaaaaggggaaactccgagtgtgacattaaattatcaaatctcttgatagttaaaaagaacggaatagtaatttgtatttctaatatatagataggaagcattagttaaactaatgcaatattaaatgtttcggctaccataaaacttacattatgaatttgctctgctcctctgaatggaccaaactgagaactttttcaaacaggtcagaagctagtagtacacattattttatcaaagacagagtcccttactctatgccactaagtttgttatagttcaattctctatgccactaagtttgttctaattcaacgatttgctactgatattatccttttctagaatatactagtaactttatcaatatatattctaagatataccattaggctagtccttttaaaaaaaaaccccaaagtactattagagatatgaggttcaaaaaattataaaaaaaaactacgagacctccttacataacgtgataattttttatataagtttcaagatttttctggtatatttaatttttttagaaaaaatatttttatgtggtatatgggagataatttacttacacaaaatataatagcataaaaaaatcttatgtagcgtatgaaaaacatttaaaaaacaacacaaaaaagtattttatataacatatagctgataaattatattttaaaaaatataaatgcaaaaaacttaaaacttatatacaaatgtccatgttgtttaaggagaccacatgaaaattttcatattttttgaaaaactctaatgagataaattgaccttgtatgtccataaggttatttttggcactgttcaaaagaaggcccggcccaatgacttgttatagaataattgataaagtcgtcggtatattatagaaagagaaaatatcggtggtaaattattaaactcggacaaattcagttatatataatgtattctctcattacaattagacaaaattatattattttctttctggatcaggctatgattacattgaacaacaatatataaagattagaacaaaatccacaaattacaactatgtggccaaaactataactgccacaagtttaggtgggtatttcacaaaacatttgtaatagcaaacaattttatcaagaaactacaacttcatcccctacgtcactgctacaagtttaggtgagtatttcacaaaacatccataatagcaaacaattttatcaagaaactgcaacttttatcccctacatgtctctgacatatgggcccaacttgtaacatcatcactattgcgtatgtgtatgactagtgggccaagacctgtcattgaagcgaagttgttgttttatgataaaagcatacactatcattgcacttctatgaaatgtagctaaaattgaagcatactggtagttatgaaagaaatgttcttttttaaaaaaataatctaaagataaatttagaatgacatatcttggcatcaaattaagttaattagctactcgataaatctggggatgcaatacaacaatattaaaatttctaatttttaccgaaatacatcgtaaagcaagcattaagattaatgaagtttaggatcacatgtaactaatgcacagttggacatatgttagtatgtattagaatttagaactgagtaaataaaatgattcatggtagtacaaagaatggcttaggagtactacaatcatagcgtaattaaggtttaggccctctttggagcatatgataggaaaaacacacgaacatgaaaagcacataatcaaagtggcgtgttttttttcaatcatatagaaatcaaaatcacctgaaattgaaccaaaagaaagttttaaggagatccaacctcttgcatattttcatttttaattttaaccttttttttattttaaagataaactctccctaaacttatttttaaatctgaaccttttggccacgctagtcaaactgatgtggaaaaacaatgctgctatgacagcctggctgacagtagcattgttatttggccacgccgctctggcttgcgtggcaatgttattttaccactctagctggatggcatggtaaaacaaagctgccacgcccattgtagatggtgtggtagtgttgtttcgcaagcggggtgacatgacaaaaaaggttcaaattttagaaataagtttcagaagattttatttttaaaatttaaaatttaaaaggtttttaaaataggaaaaattcccatattttcctatggaattggacagtacgtaggagggcaatcttatgattttttttaatctttttctatgaaccaaagaggtctttatggaaaaaaatcctccaaaaatcttttgcttatcctccaccctgaagggggcttagaattaaaaaaaataacattttgtaatacacaaccaaggaactgtatgtagccatgcaaa

SEQ ID NO: 22346 - DNA, 12120 bp, Oryza sativa
atttctcttctttacttcagttatgtgtggggcgaggtgagcgaatgcgtgaaaaaaaaaattttcatgccataggacgattctccatttgactcagcttttctgctaaaggaattgtcaacatgcaaaagattaatttagtattaagtattaaaaatatgaaaaatgattttatttgttttttagatggatttctatatagctttttttttaaaaaaacaccgtttaaggtaaacgaggaagttggaaaagccaactgcaggctagaacgcaccctcagtcaataaaaagaaagaactcattaatttggtctgtggatccatgtttaattctgtgacatttgacaaggtaggcaaacacatgatgactcgcaattttggaactaccgaaagtatacttgagtatcagtactagtactgtatttcagtcagttgtcgacaacagatttttggtaagagatgttcaacggatttcttttttcctattggaaacacatgtgagcaatgatcttgacacgctgttgagagtattaattgtcaggtagtgctaattgtttttactccatgttgttgttgttgttgctacacagtgtgattattcttatactagtataaaattgacacaatgtggcactagtaatagtagtagcttgtcttctcctattaattttcccctagttttatcttgtgtttgtccatctttctttcagtagcagtcagttcagtttcctggctggccctgaacccaagaaaatgaacagtaagctaaatagaaaaaaataatcaatccactcccagtgaatgaatcatcagatgctgctgagcctaactctaactgtagttgttctagcgattctagcactagtacactagtgcaatttacccttcactttcaccttatcaaggaaaatacttaaaaagcgatgttaaagggaaaaagaggaaaaatctctgttaactacattgaacagccttgaaattttttgtaaagctgcaataaaggctttggatgaaaggagagatattttagcagcgattttatcatgctgcatttagtagcagcagattatttgttatttgaaaactcaaaattccaaccaagagattgatttgtacttatccataatctggtattaaaccccacctttaatcaggtgattagaattgccttgatgagcatggatattgtcactgcatttaccttcagacttttttccccttgaaaactcaaaatcccaaccaagagttcaatatgtacctatccataatttggtagtagtaaacccacttttaatcaggtgattaggatttaccaggtgcacacatactgtcgcagggactagttagttaatgggaggtgaaagaaagaacatgagtgagagagagagagagagagagagagaggggggggggggggaatgctgctactctagtagtaggagtagctaacaaccaagaagatgccatgtccttgttgcaggggcagtggtggtaaggtaagaaatgcagcagtataagcagtaagcactccactcactcaccaaaagcagaaaaagaaagaaagaaagaaagaaagaaaagggacaaggagattaactaagacacaccccacctacacactcttcttcctcctcttccttcttcttcttcctcttcttctcctccatttccatttctccacccaccaccaaacatctccggatccttcgctccatcctcctcctaagaagagcccaagaagccagcaagatccaaagatcaagagcagcatttgtagctgcaactgctggtgctggtgctgttgctgttagatcgaggaggattcaacaagtgtgttggtggtggtggaagttgttacagaattgcgggtgagagaagtttcttcaccgcacctcaccaaaatctccatccatccgtctgaatcccaactccacctgcaactgcaactgcacggcgagattgcagtacaacccaagaaaccatgatgaagtggcagcatcagtagcagtagcagcagcaggaggaggaggaggaagagggctcctctttaatccttgcttcactcatcttcatcagaatcctccttattggctccgcctcgcattctgtgctgcatcggctgttgtatggtcggtggcgaagatgacgatggagcacggcgaggattgctgcgtcaaggtggccgtccatgtccgcccgctcatcggcgacgagaagcttcagggctgtaaggactgcgtctccgtcgtctccggcaagccgcaggtattccttctcttctctttttatcactcactcatttggcttcttttttcttgtttatacgtcccaattcagagagactagattgactctcatcctgtcaattgtttctggatttctcttttattttattttttttgggggggacgtgatttcctgggaaaatccaaacaatatgataagttctctgcattgttcttttaagattacctgaaatttttaattaaattcagagattggagacatattttgtccaagtcaagaaagaaaaatctctgactctgtttttctctgttgagtacaagaacagaggagctcagaagaggacttgttgtttcccccaattttggtcctctaattcagaaaaaaaaacttgtcaaaattcatggagaatctagcttgcttccttgttttagctccctatgaaatgatagagatgcccatctgttcgctttccctttctcttagttttgttttcttttccttttgatcatcattaaatgaggctctagagtcttccttctccttttttcttcttcagaataaaattgtatatatttttttcactgtcggcagcgccaaatgttcctcattttttggtgtgaagttgcgtccaatgttgatgacgctaatgctataccctttcttttatctggggctggaattctgtcagcatcacgcaattatcacccaggttttctttctccagttttgtccatccaacactcatccttgttggattcttcccttcccttccttttctttcttccatcaagatttattaagtcattttctcagacaaaacgcagcaagattaattaggttccttaattaatctaatcctccattacacaaactcgaatgatgagatctggcttaggtatcatattcttttggtaagatggtttgctctccataagactgttgtttgttgatctttcttgggttccccaccaatttcatttctttgggagatgatgaaaagttactttctttcattctcccaaatcaatctttttaccggtggtggcggtggtgatgatgggggtgaaaaaaaagggcatatctttctttgttttgttgttgctgatgggttttgttgttgcaggttcagatcgggagccattccttcaccttcgaccatgtgtacggcagctccggcacgccgtcggcggccatgttcgaggagtgcgtggcgccgctcgtcgacggcctcttccagggctacaacgccaccgtgctcgcatacggccaggtccgccattgccattgccatccaatcatatgcttccatctccatccccatgtgccaccatggaccaccatgttggggaagatgcaaaagccagcaccacatcatgtgctcctgctcctgctcctcctgctgctgcctgctaatccccttttcttttcttttccttttcttttcacacttgcttattagttgcttttcttctccagctgtttctgcctcatgatgctagatcattttcttgttttttcacatcctctgtgaacaaaaaaaggaaaagaagagaagagattggaaaaatgctgattgatttggtggttgtttcatctcttcctttttacagactgggtcagggaagacctacaccatggggacggcctgcaaggagggctcacacattgggattatcccgcgtgccatggccacgctgttcgacaagatcgacaagctcaagaaccaagtagagttccagctgcgcgtttcgtttattgaggtaaattacctgttcctggatgaatcaaacatttgtgggattgtagagaatccaattgtgctcgttctcttgatagattctgaaagaagaggtgagggatttgcttgatcctgctactgctgctgttggcaaacttgagaatggaaatggacatgcaaccaagttgtcggttccaggtaaaccccctgttcagatccgggaggcgtcgaacggggtcataacgttagcaggatcgaccgaagtgcatgtcactacccagaaagaaatgacggcatgccttgagcaaggatctctgagtcgtgcaactggaagtaccaacatgaacaaccaatcaaggttagcaaacattatcctaatcattcgtcctttaccttttttagaggaggaagcaggtccattgatcaaccataattgatgacaagaaactagcatcattatggtcagaaactggcaatctttgcaggatacagctgtttgtgatgatttcttgcttctatgtttagtgtaggacctttttgcaggattagtcaatgtattgtcctaccctcaaaagagaaaccaattatttgtctagtttcaagtaattaattctctgctcaagtgctttaggacacattcaatcagattggttacctgatattccgttactaaattctacaaactttaatgaactttatgcttttggtttcggcatgtaatagtcgttcccatgccatcttcacaatcacattggagcagatgcgcaaagcagatcccatcatgactttagatggaatgcctattgaagagatgaatgaagactatctctgtgccaaactccacttagtagatcttgctggatcagaacgtgctaaaagaactggttctgatggccttcggtttaaggaaggtacttggcatgttgcttgttctatctgaatccctaatcaaacatccatcttgtcttgaaacaagatactccgtataatttatttatgtatcatgtcatcaggtgttcatatcaacagaggacttcttgctcttggcaatgtcatcagtgctctcggtgatgagaaaaagaggaaagaaggcgctcatgttccttaccgggacagcaaactcactcgccttctgcaggtattattcttctgacccaagtgcacaggcctttgtacagaagcattgaattcatagctctgttcaagaagtagggccagctcacatttaagcatatataatacttgaatctttgcatttagtttctttcattttactaactaatctgttttatatctattttattattataggactctctaggtggaaacagcaagactgtaatgataggtaattcatttggttggagattgtttaatcatatttttatatgatttaggattttttctaaataatgcttgtcaaagttccagaattggggtttaaaataaaaaaaaataaaacgatgatctattcattttatcttcggtaaaaaaaaatgcatcttgtcatatgatttaatttgttttcataaataagaaaactcggatgtaccttgattttcactaactgttttggttgatattactattacatgcaactgacatggatctatatttttctcctgcagcctgtattagtccagcagatatcaatgctgaagaaacactgaacactttgaaatatgctaaccgcgctcgtaacatccagaataagccaattgtaagttcattaaaatggtctcgtcagaaaagtatctgacatttatctgcgttatgtttctttaattaattggtttggttccgtcaaggtgattatttgacatccctatatttactttcctattttcaggtaaatagaaatcctgttgctgatgagatgaaaaggatgcgccagcaaattgaatacttgcaagcagaactcgtttcagctcgaggaggagttgtcttagatgatgttcaggtaaattcttttctcgtctatcctcagtgtccttgaccatcttgttctataaggcacactcactcacaataacagtatgagtataataacaagtggttccattttcagggtctcagggaaaggatctcaatgcttgaacagaaaaatgaagacctttgcagggaactgtatgaccttcgcaaccatggttacactgatccttgtgaacctgaactgcaagtatgttgatgagttcttctgcaagctttcggagattttacatttgaaaacaagcatacaatttactcttctacggcttctttcatgatagattcccttttctctcaaaggaaataaaagaggggacataacatgacattgtctactatggattgttttcatgcaattgcgcttgaaatggtatatgataaaccatgcatataactatttttatctctttcagaaaattggaactggttacactaaaggtgaagggctcaaaagaagcttgcaaagtacagaaccatttgatgtccccatgactgactcagtaagaggtaatctattagcaccttcattatttcatctcgttggcattcagaaattttattcagtcccatcttaagccatgactaagcagtgaacatggtggactactattttcattttatttttccttgataatttccttattctgcgataattctggacctccagcaggcagccctaaagatattgatgatgaagtggccaaagaatgggaacacacaatgctgcaggatagcatgggcaaagagttgaatgaattaaacagacaactggagcaaaaggaggtaatacagaaaacgtttaaataaatcaatgtgttttaatcttctaggggtgattaaacaaatacacgagctaatgttcgttcctggatgatatatgattgtacatatctcaatcaagcttcttgtgcaacttcatttttctggatactcaattcatctccatatgttgtatcatggtgacagttaaacgtgttgtcaaagaagttacaaggatcattggttgtaccatttttaatttcaatatgatggaagtgtggatatgaacattatttttaatggttcactgaatgtacatgcagtgacatgctactcttgttaatctgctcatgcttgccaagacctaccttaaattttctcaatttctttgcagtctgagatgaaaatgtatggatctgacactgttgcacttaaacaacactttggaaagaaacttttggagcttgaagaagagaaaagagctgtacaggtttgttttaaaaaaaaatcttcccattagcatattcactcatccaacagttgtgttttcctaacctttgctaacgagaaagttctgaacaatttcagcaagaaagggacagattgttagctgaagttgaaagtctaaatgctgatggacaaacacacaagttgcgagatgcccagctgcaaaaattaaaaacccttgaagcacaggtgaataaacctttataatttgtttgaatgcagttcgtgttgttcagtacatgttggtcatacaagacttggacctgcagattctagacctcaagaaaaagcaggagaaccaagttcaacttctgaaggaaaagcaaaagagtgatgaagctgctaagaagttgcaggaagaaattcattctataaaggcacagaaggttgtcttccctttctcatcatgtcaagttctaatgcatcacattttacactatcgtaagtcataacaattttgccaaccttgttccattatcaggttcaactacaacataaaatcaaacaagaagcggaacaattccggcaatggaaggctacccgtgaaaaggaactcctgcaggtatgaataatttaatatgcagttaaagcaaataactgcaaaattgctatgtcattaaattaaattcatatagaacaaggaacgggtaaaaatgatgtgaccgtatctacttagagattcatctctaacccctttttatgtaatgtttctgttgtactatttttgtggtaagcattatgagaagtaaacctcacttactgtttcctgaatgcagttgaggaaagaggggcggcgaaatgagtatgaacgccacaaacttcaagcacttaatcagcggcagaagttggtaagcttcttatgtagaattgtatttcaaagaaaagaaagtgtcaatgtgaaagtttggaaaaattataagtttattgtaggcattatccaaactatcattatttggactatcttaaaatactaagcttcactttatgtgtaactagctgccctgacatagttttcgtcaaagttcatatcttacttagctatataattacgtgtaagtttttccctcatattatcatgtctatttataaaatattaaatatcaaagttttgcatctttatgcaggttttgcagaggaagactgaagaagctgcgatggctaccaaaaggctgaaagagttactagaggctcggaaatcatcaggacgtgacaactcaggtatctctctccgcattgcgaccatttttcgcattataattaatactcccaatctaacagctcttccttctttttctttttttttttttttgctttcttccaaacacatcaggcatgaatggtacttctcctggctctcatgtaagttattttccatacttaaagaaaaagatcagttgcttatttggaaatatccttgagaatacttttttttgtaatgcagatgactgagaaatcattgcaaaaatggctagagcaagatttggaagtcatggtgcatgttcatgaagttcgaaacgaatatgaaaagcaaagtcaattgtatgtgattcattttatttccttcccaaatgtaaattatagagatcattcctcatgtaatgcatgattatgatgactaatttaaatggttttaaaggcgtgctgcacttggtgaggagcttgccattttaaaacaagaagatgtcatgtctggtgcagctagtccgcccagagggaagaatggaaactctaggtaactgttatccccatagttctattttgtagttcaggtacctttaagctggacagtatctttaatccatatattatcacaaactgtttaagaaatataagagcaccgtttaatatgtccttgtctgtaatctggttgttatatttgggtccgtattttatatttctcatattttctcaaaatgtgcaatcagcacatccaaatatttatgcttgtattgctgcattttgtttctcagggcaaatactttgtcaccaaatgcaagacaagctaggatagcatcacttgaaagcatggtgacaatatcttcaaatactctcgttgctatggcttctcaactctcagaagctgaagaaagagagcgtgcattctctgggcgtggtcggtggaatcagttgcgttcaatggcagaggcaaagagtttactgcagtatatatttaacgttgctgcagatgcaaggttggtatttattcttttggcttcattatttaatagtatggtagcatccatccttgtaggacttctcaatttgcagaacctggaaacaaattatttttactaaagagctaaaaatctcactttttctttctaaatagttgaaaatctgtaagtgttattttgctaagaatatggcactgattcgaataaaagagtgtggtactgatttgaaaataggaataacaaaaaaaaaattctgaactcaaagggcaactttatttcttcctgaaagcatgacaacaatgtgaatggaagaacaatgcaaagccgtttttatgatactctgtaaaaatgatcatttgtacaaaagtatggaactaaccttcactggtgaaatatcagatgccaagtaagggagaaagagatggagatcaaggaaatgaaggagcaaatgacagagcttgtgaccatccttcgacacagcgaatcacgtagaagggaaacggaaaagcagcttaagcaaagagagcaggcagctgtaactgccactacatctccagtatggtttctatgagctcacagcaattacccctcagtagaaaaaaatgttgaatgatgaaaggattacctaaacatctaaaacaaatatctggtggtgaggagggtatttaacatctccattacccatgttcaaattctctcgtacgccctgcttgaaagggcgaaaagaagaaaacatatcatagggtatagtagatggaactgacaaaaaaacattgagtcacttgaatccctaactgatagtcacaagagtacaagatattcaacaaatatcgtgatagttcttaatggaaattttatgcatcttacagggaaacggaaatggttcagtgaagcactctgctgatgactccaacacaccattgtcaccagttgcggtgcctgcacagaagcagctgaagtactctgctggaattgtaaatagccccagcaaaggggttcctgcattcaacaaacaacatcttaaggtatctctacccccctgaaatactctttgttctatctccctctctcgtatttaaaattggtgacgtacaatgcagatggttcctatggcacagttgcctgttggcaagaaggtttcaatagcagggcaatcaggaaaactttggagatggaaaagaagccaccaccagtggctactgcagttcaagtggaagtggcaaaagccctggaaattgtccgagatgattcgacacagtgacgaaacgatgacaaggactcgacccagaccccagcttcttcctcatagacctcaaagagtgatgtgaaaaaggcttttcttttcttttttttcttcgtctccacatggactgacacggtttacacagctaactacctccacaagggtaacaatgcagctaaaagctccaggagatctccttcgtgcttcgattttacttagccacgggatcgaaaaaaaaaaagtatatgttcatagggtgactgtctttggatgtaaatttcttgtgcctatatagtgagtgtgaatgttagagatgaaaatttagcgagtgagcgagggagggagtggccgttcttcgcgaaagcactgactgagcacaatgcttcatgtttcagcactcatcaactggtgagatgtcatacttgttgtccttctgcatataaggaaaaatctgtcgaaggatggcgtcttgtaaagtcctttctggtgtgcttttgtgatcttgcatgggtatagttgcaagaatgatgatgaaagttgagattttgggtgcttgggcagtgcttattttcttgtccttttttcttttttgttgatacaacactaagattacattggtttggtttgtgttaggagtctattgatgtactacagcaacttgtgcccctatattttggccaattgtgtattctgtgctgttgatgctttgactaaatagagagcagtttgtgtcgacgtctatctaaagactctgaacttcgatggcaaacagccaacagcgactgttgcttagaatttcagcatctacagcaacgttttgtgtttttcattggtaacatgtgccaacctgttcaagtgtgcataactatttattaaaacatactagaaaccgctactttatgtttgatccgcattttcgctgcgaatagtgagctaacaatgttcatatgtttttgacaatagtataataaaacacagacacggggtcgattgagctaacgatgtaaaactaagctagtctgtttctgccaatcttagctattttcttgttgcagtcgactgatacagtcatttgtcggtaataacgtgaaaagatgccaatttctgaggaattattctaacacaaaattattgtgtcataatccgttgtagtctagctggttaggatactcggctctcacccgagagacccgggttcgagtcccggcaacggaatttatgcgttttggcccaacataaagaatcactgttgccttcacaagactcaaatccttgtctgatttcaaagaattgtccaagtttttgtttttctggttcagagttcagagggcaatttcagcatccatgtttgtcattcaagttccgaacccgcgtgctatctttgctcgggcgtttgggtgaaatagggctttcgtgctatcacacattcacactccatcaaaccaaatgcacagaaaaattata

SEQ ID NO: 22347 - DNA, 8385 bp, Oryza sativa
cgaaagatatagaagaatttaagatgcatatagaagaactgctgaaactaggagcaataagagagagtagaagtccacataggtctgcagcatttatagtaagaaatcatgcggaagaagttagaggaaaatctaggatggtcataaattataaaaggctaaatgataatactatagaagatgcctataatatcccaaataagcaagaatggattaataggatacaaggtagcaaatatttctcgaaatttgacttaaaagctgggttttggcaagtaaaaatggcagaagagtctatagaatggactgcattcacatgtccccagggacactatgaatggctagtaatgccactaggattaaaaaatgcacctgccctatttcaaagaaaaatgcaaaacatttttaacgataatcaagaatttgtgttagtatatatagatgacttgttaatattttcaaaaacttataagcatcatattgctcacctagaattattttttagaaaggttgagcaaaatggtttaatcctatcaaaaaaagaagatggagatatgcaaagaaaaagttaacttccttggacatgaaataggagaaggcaaaattcatttgcaagaacatattgctaagaaaattttacaatttcctgatgctatgaatgacaaaaagaaattacagcaattcctaggacttgtaaattatgctagaaatcacatcaacaatttagcaaagctagcaggacctttatatgctaaattaagaaaaaatggtcagaaatattttaattctgaagacattaaattagtaagattaataaaagaaaaagtgaaagaactaaaacctctagaattaccattagaagaaagttactttatcattgaaaccgatgcatcacaacaaggttggggtgctatattaaagcaaagacctactaaattttccgctaaatcagaagaaaaaatatgtaggtatgcttctggaagttataaattaaaaactgtcaataatacagatagagagatcatggcaattatcaatgcaattaatgcctttaggttatacctagggtttaaagaattcacggttagaactgattgtgaagccatctgtagatattataaccagcttaatagcaagaaaagctcaactagaagatggattttatttgaagatattattacaggaaatggttatagagttatatttgaacatattaaggggaaagataatagtttacctgacatgctttctcgtttaaccatatttcaggtatgaaaagatcaatgaattacgccggagtcgagtgcttcacatttggagatgacaacaaactcagaatattcccaccaaattcatataaatttaagccaaaggaccatataatcctagatgaagttcaagagtgcatcttggataatttctggtaccaatacaataataaaagggaagaaaaagggtatttgttatcaatattgaatagcctctctgaatattttcacctaataaatgggtcattaatgcctgccaatgaagatcatgaagtaatccaacaaaagcctatatatgtagtatttgatggaaagctccctggggtctacatttcttttgaagaaattgtggctcaaaaatagatgctaaattaatgggaggaatatcttggaagaaatataaggatattgatgaagcattaagccaagctagaaaaatattaggaataaattattatctagagcctgctgcaaaagaatatattcaaaaatgcaaaaaagctaaaggaaagaagacttcagaaatacccattaagatgactataaaagaagaagggttttttaaaaaacccacatacaaggaatgcttaacaaaaggagtggatccattagatggggaatatattgattggaagataatagaaaaatttgaagaagcctccccacagttaaagaaggaattgaaggaagaaatacttaaagaattaaaacaagaaatggatcagaaatttgagcaaataaaaaaggcagtagatgagaaattagaagtttctttttctgatttggacacaatggatcttggtggccatgggcaaccagatgaataaattaatataagctaaatatgtttttcaatatatattgataatagaatatcaacaatttgggcgtggaagaagaataaaagaatgaagaataaaagaataaaagaaattcagaagattacccaagaaagaatccagaaggacaccctataaaggataaggggacaatatagggtgcggtgaatgacatatcactgtgaagagtaaaactttcggtggaaaggcctcgactttagccagctcccgtgaagatacagtagcgaagagataagcaggaggcacaggcgacgccatccctggcctctataaaaggagacgttggccttcactccggagacacacaacaacaacgaagacaccattcagagcaaagcttccaagcgcgctctcaccctccattccaccgttcttagtagtagtgacttagcctacctggggggggggtgggggggtgggggtggggggggggggtggggggggggggggggggggggggacctaccttcgggtttcccgaaagggaaaaccgtatgtaagcttatctgtttaatatgaagtaattttccttaagtattcctgcacgtttgttctagacaagtgtttatgctaaggaccctataggagaaacctcttcggtttgttctcgtttttagcctgcatcttgcataggtgtctggagaatcggtatccgtagagaagtgttcccttcgggtggaactgcctggggagacgataaactcttagctagaacaagtgtgacttggaatatcttgttaagttgcttctaaaaagatagataggtgaggcatacggtgagtaccgagtaggactttacatcatccgaagcaagcttctgaggctgtctaaataggattcgccaccctgcaaagatcctaaagttaaaatatctctcgaagtgaacagtattgaacagtaatttaaacagtaaactgaatagtgtttttgaatagtaatcagccgaataaacagtaaactgaatagtattcagccgaataaatagtgttttgaacaatgtatattgtctgaagcataggtttgtctgaagcataggtgtggtgtatattatctgaagcataggtgtggtgtatattgtctgaagcataggtgtggtgtattttgtctgaagcataagtgtggaatatatatggggctgggagtggtcgtcgtgttcaaacgctaacagtatctgtttggtcaagtgctaacagattctagcttgtgatgcacgagcagttcgaagcatcagttttcagccattttaatttgcccgatccgcccaccatgacatcattgattcatcatttaattttcacgcaacaatggccctaagcagaatcggttgtagtcttgtggagaaaactaatactagaatatatcatttgtacgtataatttttttttagattatttaacagaggctaagaatgagggaaagagtctctttcagtcatctcgttgatcaaattttaaaatttaaattgtttcacttcattactacagatccggccaacgttgatgaactatctgtgatgaataccagcaacctgtcacggaggccgtcacctctaacgggtagcaataaacccagttaaagttaggctaaacagaatgacccgtcacatataggagttatatataatttaactatttgccaccattgacgggcaacgcggcgccgtcgacccctgctctccccgcgtcggcagaggcaggaagggtagtgcaagatgtgaactgactggaactaggaagaggttagtttagctatgattgcctttcttttagctattgcacaatgtattgcttacgctaaccaatttttttgctggaagagaaacaagaagacaaaaacaaatgtgggaaggaagaaagcaaagggtgccattgatgcccaagccgctgcagttgatcttcaagcgaatacacaccaggaacaagagcagctgcagcgaaagaagcagctgcagaatcacaagtgcatgcagcataaactcgcagtcctggaccaatcgctaggaaaggcttaattgtgttgtttttcattttttttttcacttaactttggttcctgcctcgcttacacccatcaaaaacaacacgaagttggcagtaggggtatactggtcatttcaggttcccattccatgctggcaagcccatgtgggcagtgtacaatgtgaaaagtggcaaaaaattagaaaatcttctctcttcaatggcatattgttaactgcaaacctaacaggggcatttgaacaattgccaaatgtaaaagtggtaaatagttaaattccccgagttatatataatgaaccatcatctgtgataggtcatatgacatagcccgtcaaagttgtcaagtatcatcttacaaactgaccaatgtgggtgggtatctttatataccagagctcactcactatgagctatcctaaccatttgtatcgtttacattttaagttggggacttgagggaatctttgctataaaattggagggaaaatttttgtcatccgatcctaaccctatatattgcactaaaattttgggatgcgtattatttgaattattcttgatattttagtattgcagatggatcgaaaatggatgcactactggtggagaaagcatctttaatctcggtttgcaactcctttagttctgggttacaaaccgggacgcccaatccgggactaaagataccctgttaaaataaccggtactaaagattcacctttattccctaaagatggcagcgctacatggctggcactaccctctctagttcctaaaggttttattttctttttcttcattgttctttgcatattgatttcacgtcaaactgaccaacatcacaaaatcaaagattgacatcccaaattcacgtataattgaattcacatattattgacaccataaattcacaaaaattcttcactgctgaggaccattgcctgccaccgcctacctccttccctctcgcctgatccggcagaggagagggcaccgtcaccgcctgccgccgcccatcgcttgctgccgcccgccgcctccccccttcgtgtgacaccgcctgcctcctctcctccgccggaaccggcggaggggagggcaccgccgctgcccgttgcccaccgcctgccgcctcccccttcgtgcgctgccaacgcccactgcccgccggctcctgcccgccactgccaccactgcctcagtcgaacggattgagaggggaaggggaggatgagagggggaggaggaggagtggaggagtactgagataaatccggcgtgcgagggaggagataaggacgatgggatcgaggcatgtggctctaatattgtcccggttggtataaacaatcgaaactaaaggtagtggggacctgacagctttttgaaccgggactaaaaatcataaagtccccttacacttttaaaccgggactagagagtatttttagtctcggttcttattggaaccgggattattgtgatttttggccaacctagcaaagatgtattctctagtagtgtacagtagtattcgcttgagtacagaaatggagttgctcagttttcgaatggtgcagaggatgacaagtctagagtctagacggagcaaccaatatatggtttgtccagactgtttggaaaaatgtttgctgaaagagtgcaattatattttcacttgatacgatctggaagggttatacttcttgaaccaaacatggtgaggaataacctaccggtactacactaatgaatggacataacgagaagcaagatgaagacgacagattcgtcttaagcccccgtcacagatgataggttttttttagtgattcccctaccaaacttctgactagccaaaatgcttggattcccgtacattggaattagtgctgcataaatacttatattatgtaccaaatttgaatctgaaaatgcttatatttgagaacatatgaagtaccttttaagtgaacataaatgtatcaaattaaaaagttgaaatattcatattttcataattcaaagttgaagtatgttgttaatttaaattcacataatatgaaagtataaaatcttgcacggtaattggattcagaaatgttgtcattaaatgctaaaagtgtttatttattattcgagctatagttttgtataaactcaattctgaacgtacgtggtgaatttaaaattaagaaatttgaaatgaacaattaatattcatattcattattattttcaaggaaaagtcaatttcttcttccgtactcaacgccaatatcatctaattttttttagataatggaataaatatcccggcctttactcaaaagagttacaactaattattacatagaaacgtttaacgaacatagtgtaaatctaattgaatagaacataccgcaaggaacaataaagaatccagcctaacataaggagattacaattattgaagtctatttgtaaatctccaaccataattggcaaaaagttgcataaccgtagtctccaacttccgacatgcaactttcagaaactcttcatcatcttcacacctttatagttatgcccaaaaccgaagccaatgggttgctctgaaaatgacctgcatataggaaaatgatggtgatttgtcaaaaactatatcattcctactcagccatattgcccaacaaatggcagaagctccaacaagtatcaatttactcattttcttatgaactcccaaaagccacccatcaaaaatatgatatacgctaactgaaagattaaaaccaaaagaaaactgaactgctctccacagaataattgtgatccttcaactcttaaaaccacatatataaaccttacactcaacctatccaatggcagttttgactcagatgacatgcgatccgatccattgtgtttatatggctcacttgtcacacacagtgggagagagatgaacaggctatagatgacatgcagatagtgtgaaatccagatagtgtgacaagcatcaccatcttagatctttcaaaacgccatatgttgcgccaaaacttctccatgacaagtggacccagtgacaccttgaacccccaatgtatgcaaaataggttttttctagggttttagaattcagggatgaaagaggtattcaatgataatcatagtcaaatatatcatatgaacacgtattccaagcattaaatattcgagatggctaattctcgcgcacgagcgagatcagcaagtcgcgagcatttttacgagacacgggagtagttacacctaattaactcggttagttttacataatgacactaattaagataagatttttctttttccgaagattttttttactaatatattgaaaaattttaagttagatttgaaaactttctacttaagatataaactttaaagtcaaattttgaaatatttcaactcaaactttgaaaattttcaactcgaaatttaaatttgcaagataaattttgaaaactttcaattcagatttgaaatatttcaactcgagatttgaaagctttcaactcaaactttgaaaattttcaactctaaatttaaatttgtaagataaattttgaaaactttcaactcagatttgaaatctttccactcgagatttgaaaactttaaactcgagatttgaaaactttcaagtcgtgatttgaaaactttcaactcagatttgaaaactttcaactcgagatttaaaaactttcaagtcgtgatttgaaaactttcaactagagatttgaaaattttcaaatcaagatttaaaaactttcaacacaaaataaacagaaaaaagagcgaaaagagaaaagaaaggtaaaaacaattgtgcaaaaaaaatcgcggcgtgggggagagcctgtcagctggtgcccgcgtgaattaggcgcccccctaaatattccattttttatactttgcaaaagaaaacgaaattcatcacattaggatagaatgattttcctatgtatcattgctgcttattagttggttttctcagccattcatagacctatattatgtattctcccgtataactccagtcttcttttaatcgtcactctccagtcatcttttaatcgtcactgtttttgcttgtttagtaggatatataaagcataacgacaatgaataggcacctttacaatgaattgtaaaatatgtgtcattaaatgaaaagttgctaactcagccttgatctattttggatctttagggctgcaggaattc

SEQ ID NO: 22348 - DNA, 8566 bp, Oryza sativa
  unsure (1)..(8566): unsure at all n locations
aaattatagcagcatctaaatatcaatcggttttattaaatttaacactgaatgtattttaatatgtttgtttttttaaaatactattatttttctatacatttgatcaaatttaaagaagtttgactaaaaaaagtcaaacgacttataatataaaacacaggcagtatgtccctgcttagatcccactccaaaactttccaccctgtcacatcgaacatctgaacacctgcatgacgtattaaatataggctaaaaaataactaattatacaaattgcgactaatttgtgagacgaacattttaagcctaattgctccatgatttgacaatgtagtgctacattaaacatttgctaatggcggattaattaggcttaatatattcgtctcgcggtttactgtcggattctgtaattagtttttttattagtgccaaacaacccatgcgacactttatataatacccgatatgacacgacaaaatttacacaccgggatctaaacaccccatatgtaatactactaccctgcttctagcttaattacgattgcagttctagcttaattacgattgcaggcagctgaggatgccctgcgcttgtgagctgatcaggacaatcaatcaatcatgtctactcaatggtcacactataacacacagcataactcaatttggagctagagagatgatccatgcaaaatagaggcctgtgcacatgatccaattcttctagggaatctttgcctagcttatcaatcgatcgagttggtagctttgcttttaggtcgcatgcatcaatgcatgtggccggatcgatcgaacacgaggaagctggaaagctaacctacatgctgaagaaaggaatggaagcaacctttttctgcacgagggagctcttgctagctttcttatcgatctgtcccttgattttcagcgtgtcggcgtcgtgtcaccacgtgccatgtcgatccatccatggcttttgtgtctcggagacgattgatgctatttatttgttatactagtaatcactggcatatatatatatatatatatatatatatatatagtaaatttgtttggtgctccatggtgcccgggcaccattattgaaattgagtatatacccaattcaaatgagtatgaaactttttcaattacttaggtattaacattaactactttactaactagtttaaagcaagtttgaactgaatttgaacttgtttttgttagattttgattctaggtatatagcatccatacatataattagttaggtatgtaatcatggattatgaaataaagttaaatttgagttgttttgttgataagtataggtatgaatcaaattattataactaggtatatattcacaatttgaaaattttgaaaaatttgagtaattttgtgcattagataccatggtgcccgggcaccatggtgccccatatgagtgtcctagttagtaaagtatacctagttactttactaactaggacacttatatatatatatatatatatatatatatatatatatatatctgtgtgtgtgtctgtgtgtgtgtgtatacatgctggcttctatgtgaaggtttattttttttagatactggaaatagattacatctccggcttatgtcataagacacacagccataagtttaatagtaataataaaatgtaagataaaagtaaatcaaaatgagaaataaggtgataggataaatccccaactcccatttattattgactagcgttaaaccacataaaatattttagctagcaattcttatggaactacaccacccatagtggaataagagacccttggctaccaattccaagagtatagcaccattgcgcatagtatacttctcctcctgtggtagtattatagatcaaaagtggagccagtaggaagacatgaagataacctgcatagggttagataattgtttaccattaaaaactttatcattgcgacaacgccgaattgaccaatatacaacactagctccaattagaatcatcttcttaatggacctagatacccctctaagccaattaccgaaaatgtttttggcgttacggggtgggggatattaaaagcaaaaaacacacatctcccaacaaaccgagcgacatgacactaaaaaaaaagatgttggattgtctcttgtgcatagcagaaagaacaatgtttgtctcccccattttcttttagccaggttatctttctttagaattactttcttgtgaagaaaccacgtaaagaccttgatctttagtggaattttcaagtcccacagaattctctttttgatccgaacattacagttcatgatcgccgcatacatagatttgacggaaaattgaccattcttatggagcgaccatacaaagcagtccttttcatttgacagagttatattagctagcctgaggatcaaatcgttctactcgattagcttttggccaacaatagctgttctaaaagagatatttagcggcgttgtgctcatgacctctgccacagtagactgcttctttcgagccacattatataatgtagggtattgatctttgaaaacacgcgatcccaaccacgtgtcttcccaaaatcttttgtttgtcccattgccacatctaaaagaaccaaacctaagaaattggtctttgactttcattaaaccggcccagaactgagaaatacctatcttgctggacataccaggaagaggtttaccctttaagtatttatttcacaaaaggacttgccataggccttcaccattaaacaattggaaaagccattttcttaataagcagctattttttatatcaaggttatggacacctagtccgccttgatcttttggtcggcatatgttttcccacttagttagtctgtattttcttttccggtcatcattactaaaaaaacgtgacctaaagtaatcaaatctttgaagcacacttcgtggaatttcaaagaagaataacataaacaagggaaggctcgaaagaactgagtttagaagggccaatctcccaccatatgacaagtttttgcctttccatgtgctgagtttcctctcaaatctatcttcaactcctttccaatcaacattccggagtttccgataatgaataggaataccaagatatctaaacaggaatgatccagaattacaaccaaatagttgtctatgaaggtttattagtagtaattgttcattcggctttgggttgcatctgacctactgtgtggttctcaattaaaaaggcaagatcaatttcgttaggattgcacctttggctaaatattgctgtgtccagttgtgagttataacaccgctggagaaagggtttttaatcccgattcgtaaccccctatagtcccggttatacaatcaggactatgaagtaaccaggtttaaaaatctatctttagtccaactaaagatgaaagaggccaggtcccgattggaccctccttgcatattaatttcactccattcccaaatcatccccaaatcatctctaaatcatagatcaatcttcctcaaatcgtgaaatccctaaattatctccaaatcacatatcatacatcacaaattctcaatgatggttacatcacaaattctaaaaaagcatcacatattcacaccacaaaatctcaaaaaaaaatcacaaatcctaaaatccccgctggccgccggcgaccgccgcccccacccggtcgacggccgccgccgccgaccccgcgcccagccaccattttttttttgatatattttggggagtcagagaaaagtatcaccatattttttttaaaaaaaaataccaaatataaatttctagatgaatttcataaaaagaaataatttagcatttttcagcctgccaatnnnnnnnnnnnnnnnnnnnnnaattcacagaagatatatacacatttgctagtcacaatgactgcctcatcgaatttcatttatttgattgaagtttcttgaaaattcaaattcaccatttgaattttgctcacttttggagattttgtgatttccataatttctagccctgggaacatatatttccctggcaatccctagggcaacatagttatatactccctccgtattttaatgtatgacgtcgttgactttttaaccaatatttgaccattcgttctattcaaatttttgtgcaaatatgaaaatatttatgtcatgcttaaagaacatttgataatgaatcaagtcacaataaaataaatgataattatataaattttttgaataagacgaatggtcaaacgttgaaaaaaagtcaatgacgttatacattaaaatatggaggtagtatttgagaagaactaatagtgaataacattttgagcatgtagaggatgcgcacacaaaagttctacagcgagatattgaagacaagaagagaaacacacagaaacactaagaaactcaactacggaagatattgttgattataagtcctaacgtttattagcagctaaaaataatttgtaaatagaacttttataaatatctttatagtgactaataaaccaatgatgaaaaataaagtacaatcaaagtcaacgatttaagattgaaattttggctgtgggggtaaggtgaagagcaaacgatggagctcgtgtggcaacacttctttctacttggcaggaatggtgatttgttctcaaaattgtttggtatacaagtaaagatgaaaacaatgtatgcttttcagtccatttatatgccccgtattagagggttgctagggaatggagtcccgtcggatggatatgtactttaatgaacctcctccaatttccttttttccacccaactggactctcatccataaaaagaattgtgtaggatcaaaacaccataactaagccaactagagaggggtgaatgtccaaaaaccaaaacttttagcggaaataaaagttaccctcaaattcgatagatcgtggtccgacctaggtgtatgcgccggtctgaccgcctgatgaacgtcggtctgaccgagatcgaactccggtcgaaccgccgagatcgcctgccgctccctgtcgccgccgccggtctgaccgcaggtcacctgctggtctgaccgccccttgccgccggtcggaccgccggtgcgctgtcggttagaccgccgaaacccggtgaaacacaaatcgaagaactcttaaagtggatgacgactttattgattctctctgtgtttacaaagtgcaccaccagcactccttataaaaatctcgactaaactcgaaacctaactcaactatcaactcaattagtctcaaaagcgatacagggaagcctcacgcttcctctctatttataccccaaggtaggcagcctaaagccacgaaccaaactcatactagaagtcctaatcaccctagaaaactctctagtacaagaaacaaactttacataaccaatcatactaaatttggactcctttcaaattcgactattggattttatagattgaagtaaccatgaccccacattctttgcctagtgtggatgcacaacgattctagcatgacacgataacatcggggctagtggctaggacactaggaggaggcagagtagggcatgatcatagccgtagtagcagccgaggtgactcccaccacaacagctgcaaagaaaagaggatggagtcgagaagagaaaatgaagagaaaaggggacaggagatgctagaggcaagcgtcttcccagctggcaaagcggcgatgaagtgcgtggctccccttatcttgatatcatatatatgagataccaagacttgatacccacaagtatcaggtccggtacctgggtactatggtacatgcgtgtaccaatcttggctgacacctaggtaccaggggtatcaggcctaatattcatagacatcggatttaatactatgaatatcaaccatgataccatgggtatcatgcctgatacattatgggtattggtcgaggaagacaatgcacgatgtacctgtacacaaatgctaatgagcagcatgatggaatagtgaggagcttgccggatttggtgccaccgtgccataaacttgagatgaaggaaaccgacgtagtccagcgtcctcgttgccagtatcgaacgatgggtaggagtgtaggacctaggcctccagatccatcgcccatgccctactctgccatcacaatgccatccgacagattagctctccacaacaacattgatatcaccgtgcctccgtatgcgcatgctcaaggtgagagagtgaatggggagcaagaggtggtgtagtttggaggtgagggagagaagggaagcatcgttaacgccgacaggtttcgccgtcactagctgcaccgctattagctcatcattgtgtcctacgttaggctcaagagacatactagggtgatgagtggatgatactacctctatttttgtttgtatgacgctggttagttaaagttaaactaaccagcgtcatataaaaaaaactggagggagtagttgatagagcagtagcacatgtgggatatgaacgtgattttcttactggtacatctactatcttttaaattatcccatccgaagttatttcgttgcttagtttttctgttcacattaagggctcggttttttaacttgccctaaagaatttatattaatttgttgtaagtgctcatattaaaggctcgattgtttaactttgccctgaaaacatatattaattccgaaaaaaattaagaaaacttggttctactttctctagctaacaggattgcaaattctttcctacttagcaaagaaacctaaatcccgaattttttacattttaatcattttgaaaaacttattttactaatagacctctgaaaaaacttatttcaagaatggtcatttttggtgagctagagatattggcgctgtcatccaacagggcaacgctaccacctctagtgtcgtccctgcgccaccgtggcaccgtgttggctagccgagctgacctggcacgaggttggagaaatatttttgacttatgtaagatagaggtatgactccgacttaaactatcggattataaattatataagtcaaaaagataacttaaaaatttaaaccattaaatctaagcctaaacaaaaagccctaaataattaccagtgttgaatcggaaaagcaaaggaagaaattatatgccccctttgcattatccgataagaattaagaaaggaagtagattaaaagatggagtagtagcaaagttcatttttatgttgaaagaatatttagaaaggctgctagtgtagtatgggccgcgggtcacgtggccgggctgtaccacaaggctgcttttacgagcggagtgggggctcgaggtgggcccgatcctagggcctttaccagccagttggcccaccaattattgaaagctcaaacttacaggagtactatacactgattaattacttaattaattgatgaattgtccatatggaatccaaaggaaacgtgtgttttgcaagtttgcaattaaggtacaaataatgtttgtatagtaatgtttgcaataaaaatcttcataccaatgaatattgtctaattgagcgtgttttaagagagtgtctttttttttaacgaatcgacgagcgccaatttcattgaacagagcaaagcaagagagtgtatttatgggtgtgtgcattcattcatatgtaataaaattaagaaatctagcatataaaacaccagatttcgagacaagcaaaatgttaaactctgtatggttatagcctaaacccatgaatgaaccaatgtcagcaatgattttattaagataaacagcattatatgcagggtagattttgttccctccaatcgacgtgccacagcaaagacacataatttggtggtcccagaaatcaaggggcacaataacttattatgttaatggcagattaatttgagtatacttattatgttgtacacgcacacacttaattagattgttgtcatctagtactagctacaacaactcgatcgatctcttacgaggtggatgagacatactgaagataaaaaaagaaaaatactactgtatatatagctagtagcggcgccagaaattattaaagagtaggactaaagtagaatttaaccagtgagttttttatttttttcttaaatttacaagctgatttaagataatttagtcatgattttttaaggtaggccaaaggttcaaacccttttagacatgcctccgtcccggtatacagtatacactcgacatattaaaatataacaattgttagctatatatatggataaagatacgttcaaatacatatagcaataaatcgttatattttaaaataaagatggtaaaaatgataaagtccattgacacgtacaggtaggaacaaccgtcagtacctctaatgattcacatctactactccgtccaaaaaaacgaattcctagctacctgtatgttcctaggtt

SEQ ID NO: 22349 - DNA, 19674 bp, Oryza sativa
ctttcttaaaacgctctcacgttgccacttggcgctctaaaaaattagagaaagtcctaaaaattctaagaaaaaagcaaaagatctagccattgattttcatttaaactgatggacccataattttacaccgttagattagattaatctttgggcccctctcctgccaaaaccttatccacgcacctgcgggcacatagctgccacctcccgtacgcccctatttcttttttttcctttttattggtggttattggttaagatatttaatggcctattttatatagaacttaattaaattctcacttctctttttctgacgtgaaggctgagagcggactatgcaccgcttgcatccatgcacttcgcatgcatttgtggtttctactttttgagttggtccttttaaaaataaataaacagtattttaagtggttatagcttttaaattatatataatcaatttgtgatcgatttgaaccattctatgtatttctttacttaaacgatttcaggcgcattgaactatatttcagagtaacagacaaaaattacatgttagtcccaagaccactaattaaagacgatcattaaaaattctcaaactttttttatggaactatatgtatcttttgacggaaaatgatgggggtaaaacatgcaaattttttaccgttggatatgctttaagatccatgcgtggaagagagaaaaaaaatcaaatggcacatggataccaaggatcacaccggcgatcgacgctgtacacgtgcgcaatcgatgcgcaaaacactagagcatgtgttcactaccaagctttgtaactttttctattttaccataataattacatctttcttgtactgcagttacatatgagttacaaatataattcaactgctattgtacgataattacatttgtcagatttttagggggattttctatcgaatgttagataggcggtctctatttctttttaaatctaaatgacaatgatagaccgttagaaatatatgcaatgccttcctctcatttgaaatatacacaatgcctttcttccaactgtaccaccacccctctcctcacctcctcttacctcccctttactccttatttttatagtagttgagataataattttaatttatcataataaatctcaaaaaagtaacttttaggttacccaaacaattattattcgttcacgccgttatatttattacaattaaatttctttgttatctctattttaatttataaagaaaataaatattattttggataggaccctatgcatcatatctaagggaaaaaagaacgacaacatatattgtaatatcatctatcgctgtacaaacatgcgtaactaaattagctgtacaatggttgaaacaaagtttacaccattgcattatttaccattaaattatcaatttatgatctatattgcttgtattttaatttgtaaaataaattatgctttaattcgtattttgaatctttgcctgaaatcccaacggacatgaaaattatgaaaaacatgacaatataaagtatatcactatataactttaaccagaataaattaaatttataatgacaacaagtaacatatcctatctttatctttagatttataaatatgcttaaagtatcagcacaatttaccaccatgtataaattctacattttggagactatattaactccctaaattataagtaaagaacataggagtacatgttttctctttgatttctattaaatatgtatggtatgtaggtattttatactaactttggttaattattgaacacaaatcatactaaacttatattagtgcccgaactaataagagaatagtagtgcatatcatgtcatttcctatgtgatttctattaaatatgcatggtatgtcatatatcctaaaatacataatgacgagtatagtagagcagaaaaaattttagcaactccaaaaacaagatatggtaaatattcaaaaaaataaaaacacacgcaccataaaaaccatagttccataggagccaacaccattgctgtgctatcatattttttctcatgaattcaagattgtatggttttaagtaattttagtttagaatttatatgttgcaagagtaatcaaaagaaatccatagccaacattcagagtaatcccatacaaattattggccaaaatagacttagaatagagttattgaatatttcaagaaaaatccacctacatagaatcattattttaagttaaaacaagtgcccatgcatattggagccacaatcgcatgtgcgtgggctaccttcctagtttagaaaatactccctatgtcccctaatataagagattttgacattttgcatgcactgtttgaccacttgtcttatttaaaaaatttgtacaaatataaaaaacgaaaagttgtacttaaagtactttggataataaagtaagtcacaaataaaataaataataatttcaatttttttaataagacaaatgatccaacagtgtcagcaaaatgtcaaaatcccttatattatgggacggagagtaagtggtataccaaaataaatttccttgctatataacaatttcaaacactagaataattttgattgctatcataatttcaaattaatttgtaatatatcaaaatttcaaactaatttgcaaaattgattagtactcattcatatatatatagacactactcgtacgtagaagaatgatgctcatatatctactacattaaaactacactacattaaaaatgaaatcgtcctcctttcttctagcacatttcttattatttggatctagttagcaaggtttaccaaactattttaattagggttatcatcacttcatgtttaacgataatcacgaggtatacaatagtttcaaacactgagaaaattaccgttcataagctgtgttcagtttctaaaattaggaaaaagtttaggaaaaattggtagtttgaaaaaaagttaaaaaaagttgagaatttatgtgtgtagaaaagttttggatgtgatatgatgtgatgtgatggaaagttgaaagttgagagaaagtttggtgtgaactaaatagggtcctaataatctacggccggcgtgttagtagtatagaagaacaacgtggtacgtgtcactgaccgtcatcaagcgacaaaagtgaagtgcagagtacgttgcttctgaaactagatcaatgattaaaaaaagctgaattattaatgtataggaaagggactgcagaacacctttgaagtcacagggctactgtttgtacggcaagaaccaggaccctttttgttaaggcacaaccatcaaaatttggcttgtgagcctgccacattaccattatgggccgggaattaacatggcaccacaatagtacagcccatactgagatttcagtctttgctactgttgccattaattggtggccttcatgtggagactgcagaggacaatatacattagctccctctcagctcaaactttttttatatatttgtttgatttatatacatggagtaaatttcacgagaccttttataatatgtagttttacaatcaaattgatacttaaacatatagttttgatactacctacatcttagaatataacatttttttagagttaaacattctattaaaaaaaggaaaaaaaattgggaaataccatcgcaaagatacgtgagttgcaaaataccatcgtacgtgagaatgacatgtggggcctagacccacatgtcaatgacacatacgatggtattttccaactccgtgatttttgtgatggtactaggtaaattggcccttaaaaaagtaagtggaattaaatatgtaaaggctgtgctaggttacgagtagaaaattgatgggggaatttgaactgtaaaagaattatgattgattaaaaagggaatatgtatacggagaaattattatattttcagactgagtgaatagtaaaaatcatgatagcaagttgactacactaccacactttaacgcttcccgatcgatataaaacaaaagatgacagagttaagttaagatatgttgcaaacttcatcggaataacaagtattccctccgtccaacaatataagggattttgagtttttaattgcaacgtttgaccactcgtcttattcaaatttttttacaaatataaaaaacaaaaagttgtgcttaaagtactgtagataataaaataagtcacaaataaaataaataataatttcaaaaaattttgaataagacgagtggttaaatattgcaagaaaaactcaaaatcccttatattatgggacggagggagtagcacgtttttttagtttgattagcttatacatgtgggctggaacctactccttcggtctcataataaataaacattgtattatataggagtctattgtaactcactgtactggactacactatatttgtttattttctaatttacagtactgcaatacactatatttgtttattttatttggaacgaagggagtagcatcatatcaagcgccaatgaataatgtaggtgtcggatcctacataatatcacacagtgcaactgcattttcttctcatgtcctatctagtgatgaggtttttaattacttcatgcggcaggccaccaaactgcctctgcacttgtactacagccaattactacactcttttgccagcaattcatagtagtatgaaataattatttgcttgtgatttatattaattggttcctgtgaaattttccgatccaaatgagtattaattattatatatgattaaagtgtaattttgggagcaaataagattcgctaaaattatagttaagataacattaattattcagataaatatagactaagccatatctgtgattaagatgtagagcctcatcggtttgtccatatatatcccctaataaaccaaaacgatttattagggaataaaaaataatttatagttaaacttttatatttattcatagcgacttaaaagccaacgctaaaaagaaattttgttgaaaatatcttaaaataaactttaaaattaagtccaaaaattgaaattttggcttttgctttggcatattaattaggccaactgatggggctcgtagattcaacatcggttttcgttagctcgtttttcaagcggttaaatggtatgtttcatgcgaaaaccttttatataaaaattactctaaagtattagaaaattttgattttaagtttataataattagaacttaattaatcatatgtgaataactttctttgttttttttatcctaactatatcttctagtagaaacgaacaccatctcaattgatcagccagccgttgaggtgtctgaagaaaaaggaacaagctagctagctacaaacaaatttagcagctgcagacacaaatggaagatgctgcatgatatatgcattcagctacacagttgtggcgccaaagaaacggctagtcgattcatcagtaatgtcaatcaaatgtgtcaagcaagcatgcatgtgggcacagggaattgcagtggcgatatgatggcccaactaaaaacagaacgacgctgctgaatttgcattaacagatggtaagctgcctcattagttgattagctatctaattagttacatcgtcgtcaattagttgcacatcaactcgtagaaatcttctcacctaatccatgcaatctaattagcctgtaaattaacggcacaccactcaaatttttttaaaaaatatacttttttcattggatttacgtaaaaatacacgtttagaaaaaaaattgtagaagtataccattacagaacgaaagtgtgaaatcatgtgttaccatgcaacttcgcgcggcgagtgcacgacttcgcgcagtgagggcacgagactgctcagtctttgcacgacgagtgtgtgagaccgcgacttcgcatccctaactaaagcgctcgcaagagtaatagattaattagcattattagcaattaattaattactgttatttctttaattattcaggagaccatgaattttttttatttttaagactttttatgttttaattttattaatagaccattaaaaaaatattttcaaatctaaaccttttggcgtggccaaataactctgtcacgccgcatgcagcgggcatgacagttttgtcctgccacgccagcgagagcggcgtggccaaataacgctatcatgccagcgatgccgccgtggccaaataacgtcgtcacgccagcgagtgcggcgtgatggccaaaagtttcagatcttgaaaataaattttagatgggtttatttttaaaattaaaattaaaaggttcaaaaaataaaataaaaaaatttgagaccatgttgttggttggccaagcagattgtgtggtctctcgcccaggcttcgggagaccgcggtgggtcccgcgatctcacggcatggccaccggtatcgtcacgccggtatcatttttacacaatggttaagtaatatcgtgtctttttcacactcccactttatgatgatggtatatttatgttaaaaatagttgcatcctggatatttctgaggaaaataaatgaaaagtgtattttcaaatttaaatccataccactcactacaagaatccgtttggttgccaagatatattttcttggtggttttcagactacccttagcggttgttggctgccaaaaaaaattacagattcttgtagtgactccacgtcaccacgtgcgtacatccttaattaccatctatcgatacttccacatagctagagagggagcatgctaatctatgtagtaagatatatctaagctaacatattttgataattaaatggataaatctgaactgaagaaagatgccctacttttctgagtcaaaattatgtgtcatgcatcacgactcatatgcatgtacaggcatgcatgtacatctctgaacagattaagctgtgcataatatattagtatgctgaacagtacaatataacgtggccaaattaactacctagctagtctatcttgttgatagaagacgttgatgcttaatcagcttttgatgccatgcatggtagtaaaagttggtaactggttctagtcgacatgagaccttaatagtgttgtctttgttattttagtcagttgtgttctaattttacgcgtgcatgcagtcctgcattgtggactctgtgatcgaagtacacatcatgaagtgaacattgcacctagtatgtaatgtcttagtacaaaaaaatcagttggttaattaccatcaaacatatatattagagtcatggattttacgcacttcaactctaaaacataacaattaattgaaaaacaacagtttgtgcaaattattaattacttggcttactgaatttgatgcccatatataaatattgcttttttttcattattaaaaaattaaaagaaatatagtatatgttcagtttagctgatttatttttaccaaagtttcaagttaaatcctctttggcccacaaattttactttggatctctcttttacatttactttaacacatttttgctgtcatctaagcccaagaataacctgaaatataaaataaaaggatgagaaaaggaggtctaaagtgaaactttagtaaaacaaacttaaatttacataaaaataaaataattatcttctactggaaattttatattcatgtacgacattcatctactggatcaatattgatcgagctagcgataaaaaggttggagacagtatcgtctttatggtaaattaaagattcattgtcgatcggtcaggaatttcaaaatttaccaattaattatttagtgacgattgcaatacaattttgaaataagttattaaaaaaatatggctaaaaacaaaaaggttcaagatgacaccagttttacggaaaaacgatgctagatccgattggaatttttcatcacccaaactgcctctataattattatgataaaaagtgtaaattaattggtagcaaatataattatcatgtttagaactgcaaactaatacaaatatctgaaatacaaattaatgaaagatggcattattcaggtaactgtacattcagccgttgaggtgtctgaagaaaaaggaacagatgtacatgcagctattagagacacaaaggacagctgctgcatgcatatattgagctagctagctcccgtgtcactcatccatggcgccaaagaaacggctagtcggtttcagtagtctctcattcatgtgggcacagggaattgcagtggtgatggcccaactaatgaaaacggtaccttcgctgaatttgcattaacagattataaagttgtcgtgttaatcttcctgattaattgactgcctatctaattagttacatcgtcgtcaattgcacatcaaaatcgtccaaatcttctcacctagttccatcaaaaatcttctcacctaatccgtgcaacccaattgaggggagaaccctaaaattttcatattctaatccgcaccgtttctctctgtttaaaggtttttcgctctagctttaggaagtttcactgttacttgtttattattgatttatcaataatgggtttgttttttttatagaatttttgttaattttttttaattagtgtgtacagtgcatacacgataaaactttgtgtgcatagaatatttttactatatgcaatcatgcatgtatctaggttaattatatgatgcgtctttttctagcacaagcatcttttggtaagcacactcatgcatgagcatcagcatatatcgaaaaaaaaaatctatactatatatgctgagtcacacattaagcgccatgcatatccacagagtcacatacatctgaagattaataaaagttgtgtattgagcacaacatatataatgtggctgggacgtacgaagttgatgcttaatcagtatatgatgccatgcatgcatggtaactggttgaaatcgacatgagagaccttaatagtatgtctttgtcatttggttaatagatgagccatcactaaataaaggaacgttgctcgtgcagtcctgattagggatgaaaacggagtccgctccggacaaaaacagatacggataccttttggatcggataattctcggatatttcggatacggatacgaatacggatattttctcccggatacgaatacgaatatagtatcagggtttccgtcggatacagataataattcggatatccggtgaacagtgctattcggatatccgcaggacccatgagacataccccatttctttctaactctataaccttcaatatacctttatagattttaatagtagtttatctcttaacactagtccatactattaatattatttaaattttaaaaaatatttataaattatacctcattttatataaaatgagctaattatatatgttgatatttatttctattagaagttgagttggttttcgtgttccgagaaaaatttgtttccgtattcgtgtctgatcatattcgattcttattcgtattcgagataatccgtatttttttccgtattcgagctatccgtattcgttttcgtatccggtaaaaaatatgaaaacgaatatggtatgagcaatatccgtccgtatccgctctgttttcatccctagtcctaatcaagtgtgtgtgaaactgttaattaactgtagtacaacacatcaagagaagtgaaccctgcacctagtatatatgtcaagtacaaaaaagatggagtaagttgttacaggcaaaaacagattagcgacgcatcaactctaacatgaactaaatgcatgcaatggttacttagtttaaacttgaatctgatagccatagacatatatattggatttattcatttccattgtctaaaaatgctgtattattatttatattttagacaatgaatatatatatccaatatatgtttctcgataatcaggacaaagttgtaaatttagggggcaaatgagattatctgaaatataaaataagatgacattattcaggtaatttttattttgaaacttcttaattttcttaccttttcgcgcttcactttgaatccattgtcctcaatattattgccatccatctctaggtaggctaggaacgacaataatgtggtggtcaaggctaggaggagatcattgtgatacaatgagtctaacattgacaaaaggagtaaatgggctccatttgggcatccaaagaggaaaatgtgggttagaggtttaacatgaaactttaataaagatgaggagtccaaattaagtccaaactaaaatttacacaaacaaaagaaattaactctcttttatggggcaagtcatggaaactcatagaagtgaaaaaaaaatccataatacaaagatgcctcgatcgataattaatcaggacaaaggtgtaaatttaggggcaacgattatctgaaatataaatattaagatgacattattcaggtaactgtacagtcggacagccgttgagatgtccgaagaaaaggaacaaattaaccagctataaacggtgaccaaaaagcttcagacacaaacgacggatccaagctcctggatgcgttcttgctgcaacgttatggcacaaagaaacggctattcgatcgatttcactagtgtcaactctcatgcatgtcatgtgggtgcagggaattatattgccgtgcgatgtcccaactaataaaacggtactccatctaacccagttttccatctaattaaaatcatccctaaataaaaaacaccaaactaaagacatcaaaatattcattattctgatattaatcctcatcgatctaggtgatctctcgcttcgtgtccaacagaaattaattcacacattaaataatacatgggttgcactaatagagattaattttgttgcctgaatgcattccacgatgtgcatttactcttttgtaaaaataaacaaagagacacttgatcatatgatgattatttttggaaaatccccaaaaaattaggtgatgatacaatgctgaatttgatgcatgttatgctggctatctaattagttacatcgtagtcaattgcgcatcgatcaatttatcaaaatcttctcgcctaatccatgcaatctaattagcctataaattaacagcccacaccactccatatacatcttaattaattacgagcaatattgatggccgctatttttttcattagattgaagacacaaaaatactctctgtcccacaaacatttcacacgtacttaaataaacaaaaatatattttattttctgttttttctaaataaataaaatgtattttcattttacaatgctaaattaaatactcatcgctctcacgcgtgtattttttatatttgttacatgtgggataagttaatttcccttgctctaggtggaaggagagagagtaccagacacagagactttatttatttataggcattacaatcaataaaactcgttcgcgtttaattagagcctagataatacaaacaaggcaacattgtcatttcccgtcactaacttttttaaagaacggctagaaataaagtctttccaagacggagggagatcatatcaccgcccttacctgcgcataggcacaattgcaccccagtaaattcactactacgacacaaaccagttttgaagacacaccatatttatatttacaggtagctagacttaaaaaattacgcctgtaaaaatatagaaggtctctcggcaaggttccttagcgaaaattgattttcagtactgatgggtctcttaaaagtaccactcacaaaaatcgacttttggaaagcaatcaaccaagaggacctcatgtgaaaactaatagatgcgcgggcggatccagtcggtggtgatggatccaggtgatggcaaacgaatccgaggcgacggcagctaagaagagggctgcgacgggtcttgggggcagtgtagcttggtgcaacggagctcagcagtggtggtggagctcgttgaggagaaggaggtggtgcttgttgagaaggaagtggatccgaggtggtggctattaacaagaggggcggtggcagtggaggacgtcggatctggcctcctacgcagtgcgaccaccatgacaccggtaactgctagctcctccactctccctcccttccctcttttggatcaaacgaggacaggcagaagaccgcaacaataaccgctgcgatgatgatgatttgtgaatgctatgtgatttgtgaatcgaatttgggaatttttgcggattgaatttggttgggggtttgattgagagttttgtggattggatttgattggaggatagattgaggctatcaccaagaggagcagcgacagtggcgctgaacgatattttcgcaggaagacaacataggctgcaggcagccggacacccgtatgtgaaaatacactattttcatagacttcaattcgtaggcagcatggctggctgcctacgaaaattattttagctacctgtgaaaatgtttttctaagtgattgtttctattattttaattcttgaagacaatttttttattaattattttttagtgtcaaaagttacaatggatggactgttagttagcatggaatttgctagatgaagaagcaagcggcagtacatcttgagcccaatataatgcgacaaacggttcatgaagatgttgatgcttaatcagtttttcactgtcatacatggtaaccggttctgatcggcatgagaccttaatattgtctttgtcatttggttaattagttgatgttctattgctaattaaaggaacgctgcgttgcgtgtgcagtcaattcattttgtgtgaactgtgaagtacgtgctgtgaaatacacatcaagaagtaaacactgcacctagtatatgtctagtacgcaaatcagttggttaccggcaaatggacatataagcagacattacatgcacatcaactctaaacacatgcatgggaactgaaagcaatggttacttgtgcaaatgataacttagtttctacttgaatttgatagtcataattaaaggtgagatatttttcagattagttaatttatctttacgcatcaaacaatatttgggattccaaaagtttctttgatggaagattgaacaaaagaatcaagcaataggaggcaaaaaacttgaaaagatcaaagtaaaagggttaagacaagaaatgtccaatacgtcacatagaaaggtaaattgcatttgtagcgcctgaactgttcagttttgtgtattgaagcacttgtacctgaattttttttatttgagaccctaaactaatccggagcgtaaatcaagtctttccgttatgcctttcccttaaattgcaaatgtgcatgtatgaagcaattcagaactaagtatttatatattgctgtaggtaatttgccattttcttggagcatgatttacaacaagcaaagaatctgaaattgattttatctgtgtttgaaaagttgtctggcttgaaaataaattttcacaaaagtgaattattttgctttggtcaggcagtggaatattatgctcagtattctaatatttttggttgtaagtttggctcttttcctgttaaatatctcggtatcccaatacattttagaaaactgagtaataatgattggaaagtcattgaacaaagaattgagaaaaaacttagtagttggaaaggtaaacatttatctgttggaggaagactggttttgattaactctgtactttcaagtttagctatgtttatgatatccttttttagataccgaaaggggttcttcaaaaaattgattattatagatcacgtttcttctggcaaggggataaccataaaaaaaagtacagacttactagatgggatatcatttatcaacctaaagatcagggaggtttaggggttcataatttggaaatacacaataagtgtcttttgagtaagtggttgtttaagttgattaatgagaaaggtgtatggcagaacttattgaagagaaagtatctttataaccagtctataacccaagttaataggaaacagggcgattctcatttttggtcaggtctcatcaaggtcaaaaatactttcttaaacatgggttcttggattgtgaataatggggaacagataaggttttgggaggataaatggctaggaaacctggcttttaaagacaaatatccatctttatactctattgtccgaaggaaaagttctactattgccaatgttatgagatctgttccacttaatgtttcctttaggagaggtttagttggtcagaatcttgaatattggcatgaattatgtgcttctattgtacatattcagttgaatcaatcctctaattgttttagatggaattatcaccagaatggtagattttcagttaggtcaatgtatctagctcttattaataatggttatattgagagaaataagattatttggaagcttaagatggcgcttaagattaagatctttatgtggtacttgctaaaaggagttgtgctaactaaggacaatttggcaagacgaaattggaatggcagtttaagatgttgtttctgaatgaaaaacgagaccattcaacatctttttatagattgtcattatgcgaaatttgtttggagagcagttcagttctcatttggtttataccttcctggaaccatatctaatatgtttgatagttggcttttgagggttgaaaagaagaagagtaaactcatacttgtagaagcatttgccatatgttggactctgtggttgagtaggaatgatatggtatttgacaaatcaccatctatctcatatttgcaggtaatttttagggcaacatattggctccggtgttgggcacagctgcaaaagtatgaagatgatggagagcttatgaaggttgcatgtcgtaggcttgagacgacagttatgcaacttttttgcaaactatgaatggggattcacaaatagacttgaataaatgtgtactccttatctcggtttggtcttttattttgttgggtgtgtttaatttcattttgaactacactcttcgtttgagtgatactttgtaataattagctgtagctttgatgagcaaaggccggaatgtttcattccattatcttaaaaaaaaggtaatttgccatgacataagtatttactagaatgcactggaacttttctcatgaatatcactatatcagtgtaccactcccaataattcctcttcacagcatggcacggctaatgatggaacttgattagtagtatatattattattttgcttgaaactaatctgtgtgtccatgccgtatagcctctttttggctagcatatactgatcatcaataagggttttttctcggtaataaaaacttttattgaactaaacgaaattcatcgagagagaaattaaattatattgagaaacatgatatgccttaaatgcaaatgcggtaaacatatatgtagcagttaattgttcatggagcgaatgttttgttaattgtttgatagatatgtagcagcaaaatttgattttgaaattgtgcctcttgtcagaatggtcggtttggaaccatttcttttactagtaatatgcatgtacatgataattaggaatgagcctggggatgattgaggatacaacgttggatccagaggttactttctacgtacgcatgcgctgtgcacggtgggaggaggggatgtaagaagaacgactccatttttaaggtacgtagtagagacaatgggattaatttcagcctttgccaattataataaaagttttaggatgaatgatcgtgaattacaaaatcacaatcttattaaaaagagaaagttacttagaatactaccttaagggcagagattatacaacaacttacaagttacatatagtccttatcttcctcaaacaaaaaacataatatcctaaagttacaagtatatagtgtttatcttcctcaaacaaaaaccataatctcctaaatcagtggttgatcattgcgtcgaacgaatttgcatatatcaccatggatgactaacgtcaaacaaagcggaagataacgttaaagagttactgagttgtaaatcagttattcacctagatcttgccaccgtcgtagccatcaaagccgatccgattccaaggacgcccaaccagcaagtaacctccaatgtgacctctccaacaagcacaacatctacgatgtcaccatcactattttgaacatctagaactaaattttcacccaaaagatccaccatgatgcacaaaagtgtgggagatgacgtcagcaacgctgcctataggaagatgtgtggcgcccacatgctgttagaataaatgggctaggcccgataataatactaccatgggaattaaacgaggagtatctcaacttaaatagggagttattggaggctccctgttgactggttgaggtggggatcggaaagccacacgcgcgcgcgcgtgccgatccggccggccggcccgggccgggccgggcccaacgggtggatatctctcctgtgctataaggaaagaggcaacccgattagatcctcttggttactttccaactggtgttcttcctcctcctcgcgcgcccgtgctgctactgttctgcttccccgcttctgatcgcttgcgcgcacaagagatcggaacgagcagggcctccgaaaccacaccttcgcctaagatctgcaccgagtaggcgggtgatcaggtttttggggagtgcttccgcacgattgctcctcgtcttcgaccgtacgtcttcaccatgtctgccgccaccactgccgcacctagagatggcacgccgggagccggatctagcgctgcgaacgacaacaccaacggaggcagttctgcctcacgatccagcggagggacattcacagggtataaccttctacgcttactgttatttcggtttttgatatctctgttagtcgcaattctattgcgtacgatgtatgatgatgatgcttattctaccttaagcatgctcctgtttatgtttgattttatcactagatcatcccacattgttcatgccatgattattgtcttaatattttggattaaaatatgccgatatatgactatatttctaacacatgcatctcccatgtcaatgctcctagcattgacagccttggcctcggatctatggcaatctgaactcaacctccatctcggtgttgaatgtcgccaacagttttcctaagaacaatggcaattaatggtggcagccggacccgaaccggtgggaggtggctagcgatgaggtgcccgaacctctgtggtcaagatccatatggtgctgatgctagaggagatattcaaaggtggaggaggagccacctccccatatttccctgcctccaatgcaccagagtaaccacgtcacctgactgtagataggtgcaaagacatgccgacttcccggcaccgccctccttgctcgccgcatggattgttggcagcttgctccggcataggggagaaggagggttgccatcgcctttgaatcacccacgctgtgtgacacggaaaccatgttcctatgccatttcttcttcttaaacttagtttgatcactttaagaattcatttcacgaaatcacgtacttgggtttgtgcagattatgaattatcacagaatcacacttccttcaattccctttgtcacctagtaataattacttattggactgaccctaccagtcagcagtcctaatgcatcttcctcaataatcatctctattgactgtacttgccacgcaagcacgtggtaagctgccacacctccattttgttcagctacatgttctttctacaagcagcaattaacgaatagtgatggcgatgagaggaagttaatggtagcatatgatggagaggaagacatagtaatactggacaaaagaaagagcacgtatgtatttattatgaacgcattctcaatagcggcagaaagatggaagtgcatattgtatgatcgaaaataaaaaccaagccaattagagtggggtgaatggttggaacataaaaaccaaaacttttagcagaaataaaagttactctcaaactggattaaaccgcacttgttataccgctggatcaatgccggtctgaccgccgccggttcgactgcctccttgccgccggtgtgaccacccaccgattagactgcacaatgaacttcggtcaaaccgtcggatctagaaaaacatgtatcaatgaagctcttgaaaatagatcaactttattatatcaatatgttttacaaagtgcatctaatgcattactctctcaactcccgaactagtattgaaacctcgaagcaaatcgtaacttttctcccccaaaatatctatctcttttagcctcgacccctcttctattttccataacgtggctacccctagccatgaatccaactagaactaggactcctaatcacataggaaacttaccaaaccaaagaaacaacatccccatgcaactccacactctaatcttttcaaacttggggcttcaatccaaatttgactcatctttctataagcacataacataacgtatatgccatatgaaaaccttcacctccacaagcattgttatctagcgtgagcatcccgcatgatattttgaccgtatgggcctcaacttctccgaagcctaatcccgatcgatcaccggctatactcctatggcttcaagcaacacttgcacataaacaacaaagaaacttcatatccaaatataagtttgcactaacttgactcacatcagcacagaatagtatcacatatgaatagaaaccatctagaaattccatgaaaataacccaaaactgactcccttccggagattgtcggtctgaccgtcgggctacccagtcagaccgccccaacaacaccggtctgaccaagcggcacccgcccggtcggaccggctacccaatgtcgactacactacgcaccgagcgaaaacactacttaccttggacaatttgttcatcacatagattaaatcaacaccttgatttcacacatatactagtcgtgtgtacatatgtgtatttcacataattgtaaaaacatagtgtagttttgtgatacatttgttacatcagaaatgatagttaaacacaaggacgtcatgtccttgaagggatgaaggtattgaatttcttcatatttctcatgaaaaatattaggtcttgtgatgaaaataacacaattgccaatgactatataacaaaaaagtagattttgagttatcttcgtaaactagttgggcatacgatggcttggtatataccaagagcacactagttggtatatatgcattttgtgtgtgtgtgtgtgtgtgtctgtctagttggtatatatgcattgtgtgtgtgtgtgtgtgtttgtttgtttgtttgtgtgtgtgtaggtacttctttatctacacacctatagttgacgtaacatataagtgt

SEQ ID NO: 22350 - DNA, 9555 bp, Oryza sativa
tatggattggtttaggttggtttttttaagtagtagtaagccagagggctgctgatatttatcaataactgaaggagttaacaaaaacgaaagggcaataagataaacaaaaagatagaggtgttgtaggactcacaactacttcctccgtttcacaatgttagactttctagcattgcccacattcatttagatattaatgaatctagacatatgtgtgtgtttagattcattaatatctatatgtatgtggacaatgctagaaagtcttacattgtgaaacaggggactatctatcaggttttcaagcaatgaatacttgcttattaaattttatactttgaccatttcttcttgcattagttttgtgcagcgtcataaatataaccatataacttttattcatgaaaatctaattaatcattcaaaggtaacttacggtcatataagatgacaataataattaaccgtgttaattatttgagaacagagggagtaggaattggatgattttactatgtttgagtgtactccctctgtcctaaaattaaccaaaatcgtactaggagtacaacgagattggtctattttgagacggagggagtagatggtaaactaagagctcggctccctgccggcacaacggaagctggctgaaggccaggccccagctgagcattattgagccagtaaaactattgtacaaaggcgtttcggatggcaatatatccctcagggcagtgaagcagcatgtggccacaactcgatcgtgacaaatcaacagagatgttcgtgctttcagataacactagatggggctttgccgcgtcgaagtattgatgggctagtccaaatagcttcatcgcttagaatcttctttttttaaaactcttagagtcagttttgaaatgccttatgggagcagtaagctacaaaggggatggccattgactaccggtggcactatctcaattcaactagttgataccccacgtgttgctgcaggatagctatatcgtgaatttggaagatgtaattctagaacttttgactattggtatagtatcattacacagaagggaacatatagttgtaaatttatcaaaattgcatgatcaaaatggttgaacgttcgatctttacattgtattgctatatgaatagaaatggcatgattccaattaagatactcccaattcgaagaaccatgaacggtaagcaaacgggacactatttttatgatgtagtaaattgacttaacatctcatttagatattttaaacaactaataaaatatttctttttgagagaaaacaaagagaaaatatggataatgctgcatgcatatgttggtatatgatcttaaaaaacaacaactattgggtgcatgaatctagtaatttcaagaaaaatgttcacctataagtaaatgggaggaactgtggagaacaaatttagtgattgtcggtatgaaaagcacaaagatatggcatagccttttaatcaaatgtagagagtcaaatgtgagagtggaccaatccctcaatacttaaagttataaaaaattgaagttaccatagttgtgatacattggcatatgaagcttggtgataaccgaaaaaaaatcagatataaaaagaagcaagatcatgatagagtaccaaaaatcaatcaccataggagataaacattcttgcaattggtaaaggtcatcgagtgttgtaatctgtaccaacaaattttcgatgtcatctatgacagtgacaagccaaatttcattggacaattgacatttcctccttagatgattgaggaagcacgttcaagcataaatattccaagaaaatccattggatcaacctagatatggctagtagatgcattagaaaaattaaagggaatgagaaagaggtagacacaaatgtagtggtgtgggctttcgggtgggagatgtattagtggttagtgataaagggagatgtaatgatgcatgaggtaattaagaggaagacaaaaggcattgttcctctcagatgccatcggatgagaagaacttgatctaacggttgatttgcatagacgcaagatgatctaatggtcaatataatcttgatgatgcggcctcacagaatttgagctttatagcataaatgacttgtagtgggtaccaactatataggaagaaatgataggtgacgtcaacgcaacatgtacaaaagttgatgatcaattgattcatgttagtacatacattattcctttttctcagccattgtgattttagttgagtgcaaatcagtacataaactatgttgcaaaacaaaagtgccatgctacgaaactcaacaggcaattaaaataatctaactatctggttctcgggcagtgagcagatattagcacgttatcactgtccagagagcttcaagatgatgcgttcttcctagctacgtaaaaacaaagtaaacttacgggcggttcagattgatgccattttcaaccataccattttttttggtaaagttatcaaaaatgtgtctatgtttagtttgttaccaaattttagtaaatacataagaaatcatgcaaaaattttgtcaatattatctacgtgcaaaaattttggccaaccccaaaatttggtaaggtttatttcggctacaatcttaacaagcccttattcttgtaggagcatactgctatatatttggctctatgattgagtagaaatgatattgtttttgacaaatcaccatatatatcttatatgcaggttcttttcagagcaacatattagctccaatcctaggtacaactataaaagtgtgatgaagactacaagcttttgaagtctgcatgtcgtaatcttgagacgacagttatgtagctttttgtcaactttggattgagattcacaaatagaattcaataattgtgtgctctttatcttggcgtttatgagtttgtgttcgctttatgtttggaagagtttttttaagttctctttgagttgcactcgttttaagtgatttcatgtaataattggctgtaactcgtttgagcagaggccgggatggatttctattccattatctaaaaaagttacgtaaatctggtaagcaacaatgttccacaactgcaacggcagctgtaactgcaaattattggtacactatttgcctccaactgtcagtcatacacaaaatcataaatagcttacttctcatagatttttttgtcttactaaacctgtgctcttactgtattctgtagtaattggcatgatggatttgtacaagagacaaaggcaaatacaaaaacacactttagagcagaagagtgacactaacttacctgagacaacgatgaggggaacggttcagaagttgacggtattgcctatatgctttaccatcttcagtctctcctgttcagaagtccatttatatgaatgttatatgacatggttgatattaagtgttttaccattaggcagcataaacaaccatgaccttgtgcataaatatatctctggcatggcgtgccaaaaattggcaaatgattctcagagttaaataaaatgtcaaaaaattcacaatgaatgaatattgtatttcaagcttagtctagatataaaatctatttttgatcttttaacctgaacaaagatatcaagttgcagaacagaactattacaacattcatgctatcattatgcttcaggaatctggactgattattgtaacaccaagcaaatcaaaatactcaattacctgcaatcatagtagcatatgtttttgcacaccataaaccaagctctagtcaagtcacaactaataacatctttttgttgtactgtatagacattgttcatatggtcattctccgggatttaaaactgtacgttatgtataatattatctcatatgtacacatcttgatctatcaaaaccttaaagttgagaattggatatcagactcaattttcgttgttccaggacataacagtacaatatatgtatacagtaaaattatttagaaaatgacaagccttctaaaaagaaaattatgactgcgcagcatggcagacgatataaatatgttaatgcagcatgacagacaatgacatggaaagtttgtgtgcttgactactatgaatcagagtgtgtcaaatgacttgaagcaacaaaattcagatgcttttatactaattgggcaatgaagggtaacattttgatcacggtggctgatatattccaatgttgtctgtaacaagtataatttgtctacagcttgcttcataacgggatgaccatcaacacaattctctaagtgataaaaattctgcattcttattttgggaacaatttttactgattttccatctcaacgctgactcagaaattcagcattgaaccttgaattgtttggtggttaaccaatccactggtaacaattatcaaaatccaaggtaactgaaacataacaagatcggcgaccccaacaccaaatatgtgaaagaagtgaccatagtcaataaatgaattgtcaatggtgttatgcagaagcctggcagagaggaccgttgcattcgccccaatcttcgctagcagcatggctgtctctacacaatgttccaactatttatcgccacttgactgggtctaatcacagaaacatataacaaacataacaagatttagtgactcatacagaaacagttcaactgttgtagaaccaatagctaaagatttgagctcgtggaatgagtatgacctgaccagggtgaaccttctcggacttgaagaaggccttcacgatgagctcctcgtcggaagatgcggtgtcaagcctaggcactggcaaagaagacgagaaggaggggcgggttggaggagccattgaagcccgggtcgtcggcaaggactcctccaaggatggcgggcggcggggacgtgaggccggggctatgtgtgaccggccgagggatcgagaacggttttggggggtgagtgtaacttttttcttataatagaaaagatgcccgtgcgttgtaacgggtaaagactctttttcagtgatatattaagagctaagtaataaattgaaatattgggatcactatacactataattgaaacagttaataaaaatcttaacattgggatcgctatagattataattaaaaaaagttaatgaaaatatttcctgggtttttggccaaaagccttcctcctaggctagcccgctaccttcctccatttggtctgcttctcttcgaccctaccatctttaacttcccgaatatgactaccatcttcaacctcccgaagataatcccgtgcccgtacgtttgccagagcaaatctcccccatcaaatccggccaaatctttcttgggtaaccaaaattgttcgagggtttttgatccactcgatctactctttccgttttccccaaaatcagagcgtaaaactcgggataaaaatgaccggggaagatcactgtcatcatcggcaactgcagaatagatattaaatccagcaattaaagctgaatcgaagggtaaatcattgagaaaatgatgagagaggagtggggaatcgatttttacaatcaaattggaggagaaaacacacgatcgatatggcggcggcgcggcactaggattcacctcaggaggtgtgcggcgaacagatgggattataaaatcggatgagacaaacaaaaagcgcatgggagaaaaaaccggcgataaaaaagattgacgaaaaaaactaaaagcacccgagagagacgcggtgaatagatcggattaaaaaaaaggtaaaaaaccaaaagccttagcgtgggtgcataaaaaactcttatgcgtgaaaaaaaaagaaaaaaataccggtgccaaaaaaaccaagtggattttttttaactgggaggattttttttctttttctatagaagtagaacaagagatgtttttttttactgactacgacggaagctttttttttttaatagctcgttaactgatgtttgaaacgcatgcgtccaaatgcgaaacggaaagggacgacgtaccaaaatcccatggcaaaaacaagttaaacttttataatagtagaagataaacccttgtaactttgcatattacaatgatatccatagcagcgatctctcaccgtagatctgtgatcgtacggctgccggagggggagaaagctgtgccatgtggcagggctttttgcacccgaatccttccagaattcggtattagagattccactatacatgtttttttttatttttaaaccttttgaatttttaattttaaaacaaacctttctaagaacttatttccaagatctaaatcttttaaattctatacggtctaacatgataaaactgtgatgccagctgtggatgatgtgcagttttgtattaccacgttaggcgggctggtataaccaaaagattcatatataaaaataagtttgggagtattcatttttaaaaaaattaaaaaggtcaaaaagtaaaatctccaacacagaccagatataaaactttagcatgccagtctgaccggaaaaaaattctatggcaccgggtgccacctagcaagtatggcacccctgttggatttaagacacgtggctatacgaatctcgaaaccgtccctctcgtcttcttcccctaccgtgaaatctatgaatctaccatacaacgatgaagtgagttataccttgtctcttcttccatgaagaattatcaggactttcatttgcaccaaattaaatcaccttacacatgcgagaagtgaattatctgaactttctttttacaccgttacttgattaatcggagattaaatgacttgttggatgtagtatattaagttcggttgattaaactaattacctagcgttttggttccatgtattttcatagttcattggaagtaatggaggaacaattaatctgttttggatgaacaaggccggctgatggactactactactagtatcgcctgtgttgtaggacgagagcaacgcgtaccctcgattctgtgccggtggattagatcattaattaattagataggaagaagagacggaggagcggttccatgcggggaaattaggagaagcgtttcgaagcctgattccttgccggtgattagaggaagggaaggtagaagatgaagttgtaccgagatttgtgcgcggccacgtgtcttgaatccaacagggatgccatagtgagttactctaaggaattctttttttaagcaacgcttgcacagtacacatgacacactcgcacaacctggagtgtgcgacacatgctcaagaaagagagccaacaataaacttgtgaacatctccaggaggccagtttgataagccaaactcattacttactctaacagtttcttcatccgcacttttcattctgactctacgacactaagacctatatgtcaccctctaccacccttcttcctcctctttcccattattctttctcttttctctctctcttttcaccccgatggcggatggtgacagcaacagcagatggctaggtggccggcagggatcctggtggccattgactccctcgatctcgcccaaaggcagcgcaaggaggagccagcggagggggctgaggacctcgtcgtaggatctccgagcaatggggacagacgaggcgagcactggaggcaacgcagacgacgattgcgacggatggcggtgcagaccacgatgacgatggcagccgcagcagtggctgcgtggatggcgggccagacggacttcagcgaggacaacagccgcaacagtggctgcgtggatggtgggctcaatgataaccgcagcgggcgagacgaccacgagaggcaacacaaacgacagttgcgtggatggcgggctcgaggaggcggcagctatagggcgaccatgaacgcctcgtacgagcagagaggggagggaaaggaggagggtgtgaaggtgggatccactagataacaaaccggtttagctagccagatttggcttgcgcgtacccatgtttggttagctgcatggtaagactgttggagtgcattttttttatcaaacttgtcaaattttagcttggtgagccattcggtaactctgttgaagatgctttcactagccttgtttacatattaagcattatcttgttgtaagttgctcacctgggtaaggccattaatcactgatatttcttatggatcttctttataaaaaaaaaagaggaaaagacgatggttgttggagcaatgcagaacaattcaatccaagaagaatcttcctctcattatctgaaaaaaaaggaccagtcttaaacgggccggtggatgatcgaccctacaagaaaatttctcaatccattcctatatggaaaaagtacattcggtccctcaacttgtcgtcgagttacaaatcgtcctctaaccgttcgcttttgatcctaaggtggttttaactctggttttatccaacgtgacggctgagtcagcatgggccctacttgtcaggtgcccacgtcatcaccctctctctcccttcctcctctcactctgctccggccccagcccttgacccgtcgctgcacccgggggtccgtgtccggcaggtccacagcgtggcccctgtcccgcggcggcaccttcaccgcccgcgtcggcccggccaatgtcgacgccggcgcagcctccgccgctgtcaccaccacgacggccgccgccacggcgaacagcaacagcagtgaaaccctcctccgtattgcaatgtggcgggagatcgattggcgggtagtactatgaggaatcagtgcgagtttggagggaaatttataggagccgaattgggacaagatgggtggcggccggcgtgtccgctctgctcaccatcgcctgtttggaatgagaaagttgatgcagatatgtaaatatgtttagaattctttttgcaggtggatgaattcatctcgatttatgcgaaattcactaaatatcctcctgttttcagaaataaaagaatggattcagcagagatcacagacgaagacagttgcaatttttgtcgtgtctgaaatggataatgtcgttccctcgaggaggacgtggtcgctcaacaccttgtagcacgcggcgaggacgcgctccgtcacctcggtgcacacctcgatgccgtgctcaccgtcgacgaggatctccggcccgacgatggggaccagcccgttctcctggcagatgatggtgtaccgcgcgacgccctgcgcgttggtgttggcgagctgcgacggcttggacgccggctgcggcgagcacggcgacgaagggcgtcccgtcgcgacgaggacgagctggggagaagagcggcggcggccacctccgcgctctcccgcgcgtggcggcaccgctgggagtcgctcccctccgtcgacctgacccacagccgaggcgtcgcggcgtccgacgtcgacgcggtcctcctccggcgctccgtccccgtctgcacct

SEQ ID NO: 22351 - DNA, 5388 bp, Oryza sativa
  unsure (1)..(5388): unsure at all n locations
cctccccccccccccccccgccggcgtgcggaaagaggcgaagaagaaggccgccacggtggcggcaacgaggatgcggatagcggcgttgcctccgccagcgcgacgccggccgccggacctcctcctctcccctcccccacggcagttctccccacccatcggccgccctgctgaagagcaccgtgagagaaaaaggatgaagaaaaggaggggaaatacgagagaggtgaacatatgggattcacgtgggttccatgctaactcagccgccacgtgaaacaaatccggagtcgaaaccaccgaagggcgtaaaatgaacggttttgttaagttgagagatgtcatatatctagttttgtggttagggacgattttgtaactcgatgacaagttgagggaccttcggtgtactttttccttcctatattaagatggcctagtaggcagtgatcttggaccaataaattttcttcataggtaaagacatcttgataagaggcctaatatacagtggtctatgggccaaacaatgcctagcaacctgcaactagacctccaccttgtctgttttaatggatcattctaatacttcacacttcacagtttacatcnnncgtnnttnnnnnnnncnnngncccccccccccacccccccccctacatatggagtaacttgagaaatgtttatattgttttgttacaccagactgtaaaatctatttgttgaagtccaaaatatacaaccagtgtgaattcaggttggactgggccaaaggtatgggcttcatttgtgttatacattggcaaatatcacttcgaaataacagctataacaattttgattatgtgagttaacatgagggctcctttatagcattaactctcccaactagctaagggaaggatttaaacttttaccactctaatttataaggtttaagaatatatactatactatagtaacaaagtatgttgcatgttaaattgcaaccgtacatcttatcaaagtctgataatttaacagttactataagtgagtaaagttaaaacagtattagttattcccaacatgaacaagtatctgagaacaaattaaaagagatggtgcctacaagataatagtatctgatgtatgatggcagtaagcattccgaccatggtatatgacggcaaactaaacacgagacgagaccgagagaattaattttgtagttcaaccaaatgatcaagtcaaatccatttcctgatgttttgtgataccgtccacatcttaccttcaaatattgatatatgtcttgttacacatctcagtgaaatgacacgattgtacttggtcagcactgttaggctgccaagcatgtgccttgttcaaggaagtatctgtcaggccagcaacctccagccatgtcctctaatgcgcatctatctgaaattcttgtgcaatcgtgtcaacaattctcatgcaacctggttggcgccacatcgattttcttccctgcatgtgtagttctgtaaacatgaataagcctaaggccctattcttttctgattttggatttttcattttctttttcatgttttaaagctttaaaacggtacattttcatgtaaaaattttctatatattatttaaaataattcctaaatcaagtctcagctttatagtatttaatttattcgtttatattctcaaataactaaaagaaataagattatccatcaactttagctatatcaaacgaagcattagtagaagaaaagttcagttttatactagttcggagaaagcgtgcactttgacaccataacctttttgcattaataagaacaacaaatccaaccaaataggagtaattcacacaagcttgaaaaattaacagtttaatttcaaatgattaccaccaaacctcgcaaaactaaacatcaatgtgacttgcaagttgcaaataatcatactccatgtgcttgtcccactattgagacaattgtgagttggtgacctagcagggacaagagcataaatatagctaattagccacacaaacaagatggatgacatcgatagcaatacacgagattaaacaaccatttccacaacttggaagtaattaagaaccaattgtactcatcagcttcttcccttgacaggccaagaattcttccagaaagccttagttgaagcagtagtagggaactggtatctcaactggtcagcttcaaagtcaactgccggtgagtggcctatgaaatggccaaacctttagaaaaccgaaaagagtgctccatttcattgaacagtctgcatggaagaagaagattaagaatattctgcactttcagttgttcagtctttcagacaccgtgtgtaaaacgtcatgacacaaatgggagaagcttcagaaaccattgaggtccatgtcaactacccagtggagcagaatagacgctctccataggcacaaacataagtgacaattgacataacattggttccaatcactaaaacacatggtttccagggaaaatatctggcagaaaactggtacttaaaacaaatagtcagtggtgtctaaatagaccagacattatctgtaagctatagttccagccttcaagggaactgcctgagaactgtgatacaagttgcccattttctggtttggacaaacattgtataccacacaaagagagaaacaagcattccgttattagctttaggtaagtaatgaatgatcagtggcattggtgaggaacaactaaactcatctcccaactagaaaccaaaacacaggtcccaaaggaaacaaacttgtcacaagtatgcacacaaaaaaacaagcagaagaatcaaacctaatatttggggtgaaaagaatacatttatttgatatgtaccagtaagacataggtgacaccagggatgcaagtattccacatatcaccacccagggatattcagcagatgagaatgtaaaaaagaattggcacccccaggtgttattccttgaataaaagctcatgtaatgtagtccacttatgcacttcaaacagacaataataacttcattgtttgtattatgcttatgtacaagaaatacatattctccatgcaatccagcaccctatcaaatcagcaagaacataagaaagtatccgcatttagaagagacgaaatgaagaattaatttccatcccagtatggtgacatcttgaatgagtggaggaggaatatcccctgtacatgaaaatcacaaatcacacacataatataaacagagcatcacgttcttctgctacatggcttggttttatcatacttaataatcaatttaaaaacagatgcaagtgactttgacttaagaaattgatgcatcagtgcccctcttcaaactaattttttctctcaaatacacagcagatctgtgtatcattatattaagaagaagaattaatgggtaggaaaaccctcgcgtacataaccatccacacagtcgctaagctcttgggttacatgtgcgcctatgataaaaagaaaaacaactatgaccacaaacatagccacaacttcaaactaaagttttcatcccagatgtcatactttgattgattgctaacaataattgtttcttcttccttgaattgaagtaatgatttttgttcagaccttgaaacaaacatgggaagctaagataaacatgaatcaaattgcaggttttccatatcttgtttccaaagaaaaaggctacctaaaataagattgcgctgtgctattgcatccatccctgctattaaaagcaagaataaataattaagtatcctgccaacataaactggaatttctataaacaagccgatcaggaagaacagcatgttaccatcccaaaagacaaaaacatcggtcgcaacgaacaacataaattaatgtaacatacaaacatgaaagaatgaagaagctaatggagcaaccaaagcatccaattctcatgactcataacaactcacacgcggccgcctccggaacatggaaacagacaagctccttgacataaaagcacccatccgtgctttccaccccgatggcctgccgctgctgccacaggaaaggtcagggccccctatccgatcatccaaatcgtccggcagggtgtcgctaccagcattctccaggacaccactctcatccacgctcctagcatcctgcaattcaccagcaccacctggcgtgtcaacattcacagcaagggctccgttgcggctagcccgaagccgctcagcacactctggcgtcactccctgacacttcttcaccttcaccttgacaagacgtgggcagccttgagcgagcttatccattcctgcatcagaaacagggcatgccttgatgcagagcttccgcaacgcagcacatttcgtcgcgacgcaagatatctcggcatccccgaacgtatcagacccgcacagtgcgaggcgctcaagggcagggcagttggcagcaatcagttcgagactggcggacgtcaaattcaccccgatgagaaccagttcttgcaaagcagcgcatttctgtgcaacagccgctaggccgcggtcaccaatcctgtttgctttccatccatcgacgtgcagcttgcgtaggcgtggcgatctggtggcgagcttacccaacccaacatctgtaacctctggcgccttggcgaggtagaggacctcgaggcccgacaaggcagagacaccgcggtcgctgacctgcagcttctcgagatggagctcggccagcatggcgtcctgagggaggtcctgaagcacgggatcccagtcgccggagcagcggatgatcttgagcgttttgaggttgggcgagttggtgatgagagaggagaagcactggccattgtagagctccttgaggcagagggaatggaggcagaggctggagacggcgacgggctcggattgggcgaggccgcggaggcgcttgatggagagctcctcgagatggaggcaggagcggaggacggcctcgatccccttggcgccaaaggtgcacgagccgacggagagcttgcgtaggttggtggcggcggcggcgagcgcggcgacgccgtcgtcggtgacgagacggatggagcggagcttgaggcggcggagggcggggccgaggcggtcggcgaggagggcgagcgtggggtcggcgacgctctcagcgcggcggtcgcacttgagggcgagcttggagacggcggggaagcgggcgaggatccccgggagggcggcgtggagcggcgcccgcgcgtcgagggcgaggcggaggcgcgaggcggcgtcgacggagagccagcggcggcagacgagggagcagcgcttgcggtcggcggagccgaggagg

SEQ ID NO: 22352 - DNA, 7060 bp, Oryza sativa
ggttgggtgaggggggaatgggggggcgccgcggacgtgaggacgagggcaacccaaacattaaatcggcttaactcctccctctctctctagactctctcagtttctctctcctttcggggggcgcacgcgttttttcttttatttttctcttctccatccctcctttcgatgctattcaacgcatgcccgctagttatcccaaccagtggactgaccaagacctgcatcttgttttaagggtacttcctccgttcaattcacaacatatgtcccgtaaagcttatcattttcgtttgggagggccatttcttatttggttaattggatcctgttgaagaaaaatctgcgtccgatcaatggtaccaagcctgcgttgatgcgaaccatatcgacgaacacacaaagttctaggagatctgcttaatttcagtgcaagtcctaaacttgataagatgcgagcgtgccaatcgatttgatcctactactgacaaagatatgtaaacaaccgatcggctgacaagccgatagagagacaacaaccaatgccgatggggttttgagcaaatgattgtatgtccaatgtagagtctgaaacatgaatgataatgtaaaataacaataatataatttagtagaaaccaattggccaataatgatatgatagaataagcgccgatccgcggttaaagtatacatcggctgaaggtccgatgtcgttaaatccaaacgattagataaacagtaaaatctttgttgcgatcggcttgcatataatccttataagtcgatgcaacatccagataactcatcagctgaaactctgatgaaacccttattggcaatcaaaaacaggctagagattatggatctaagcacgacttagtaggtcaaacccaattcatgcagtagtaagtatgaaaagaaacataatatctagaccctaagcctttgactgattttcagggtggtcgatgaaatgatttaactactatcaacaaaaccctagagaagatccggccgatacaggcaaactgaaacatcgactcaaattaattaagatatataataaataagtgtttaaatcgacaagattagagtgtcgataccttagccctaccgatggaaatagccataacaagtgttacccctcatcggatattgaagccgatgcagcccaactcgaaacaataactcatcgagaaagacgaaaataaaaagggtggtgatgtgtcgaagctgtattgatcgacagatagattatagtgaccctggatgtacatatttatactcatgggtatatagtagtccttatcggacacgacacatatttcctaaagatgaaaggaaagatacaagtcctgatcggacactaaataaacaattcctaaagataaaaggaaactaactgactatgcctaattaatagataaatttaagctgccattttgtggtcttcatgactccctctcgaactcggtctcttctgaataagttttccttaactgaatccactaaaaattaccaaattttggtgttaacacatacctcccaggtattttggagtatgggaactcatgcttcaaaaatctcttctgccttgccttgattacttcaaaattgatcctttgttgcttcttgtcttggctctcataaaccaatactgtctgcattagatgaaccagactgtcaaactcatggcgaaagaatttgtcattgataagtgctgacaatccttgaaatgcaagatctgctaactgctcatcacttagacttaaactacaacatcggctgcgaacattacaaaatctttgaatatattacatagtcgattctccctcttgctgctcaaccgatattaagtctaaggggatgtttggttcatggccacactttaccacaccacacttttggctgccattgtttgttaggcatgtgtttgattcactgccacagttatggctggccacacttttttcaatagcatgtctcacatgtcatatactcatttttttgccacatttgccacactttatggctaccaatttgtccaccacacttttgtgattgccacaacttgcctaacgttagttgtggcaaagtgtggccggcaaccaaacacaccctaaaagcttcatctcattgattctagcaaaaaaaaattcatggaattgcttttcaagatcggcccatcctctaaccgaatttgatggtaatgatgaaaaccatataaaagccgatccagtcagagacaatggaaaaaaaatctaactttcagaacctcttcagccgatgtttctccacattgtgctaagaatcggctgatatgttccaatttaggcatatcatcttgccatgaaaacttggagaaatctggaaccttgtcaaaccactcaggatatgacagccgatacacaaaaatttgctactttgacttaagtccaaactgctactatactaactttgcaattctattggccaaatcattgttatattaatactctttattaatgaaattcttctggccgatattgaaatgactcatcatgctgatattgattttcttgtccctcgtgctgattctgttgttgccgatgattatgaagatgctcatcgatttgcaccccaagttaaattctttgagaaattaattcatcaaatttttccttgatcaaattctacaatgtattcatcaaaactcttgattgatcagaaaatgcacgatgaactgcttcatcaattgtatcttgacgtgtttcaaccaacggcttgggaaactgaaccttcttggcattgacttcctcttcagacatgttggtacaaaatgtgtgtcccgttagacgtgccaaaagggtgttaacgaaaaatccatgtccggcagattgtaccaactctgcgttgacgcgaaccgtgtcaatgaacatacgaaggcctgggagatctgcttaactctagtgaaggttctaaaattaatgagatgtggcgtgccagtcagtttgatcctgcacctgacaagatatgtaagcaacagatcaaacaatcgatcagttgagaagccaatatagcgatactagtagatgtagcccaactcgaaacaagaactcatcgagaaagacgaaaataaaaagggtggcaatgcgccgaagttctattgattgagagatagattatagggaccccggatatacatatttatacccatgggtagatagtagtccatatcggacaccacatatttcccaaagataaaaggaaagatacaagtcctgatcggacactaaataaacacttcctaaagataaaaggaaactaactgactctgcctaatttatagataaattcaagctgccatgttgtggtcttcatgatttcctctcgaactcggtctcttctggataagctttctgttggctaattgtgctctttccttaaccgaacccactaaagaatcttaccaaattttggtgttaacacatatccccttattttggagtatgagaattcatgcttcaaaattctcttctgtcttgccttcattacttcaaaattgatcatccgttgcttcttgccatcagctctcacaagacgatactatctacattagatgaactagactatcaaactcaggaaggaagaatttgtccttggtaggtgctgacaatccttgaaatgaaagatccgctagaatggctttcgttctttcataacttgacattttttacattacatcaagatatgataatgaaattataatgttgtgaattcgtttttaaatatctagctagagaacaaataaggatataattctcatgtaaaagtctagatagtttcttttctggcgagaaaagtatcctcccttcctttcataacatctggcaattttgactaacacttgctctagtttgaccactaacatcatttaaaatcatttgattatgaagaatgagatttatatgttcatatttacagtgtatcaaacttcaattacatgatatatcttttaaaatacctatgagtttatttctaaaataggagcggtaaactaaaattaggcaaattttttgaaaggaaaaaataaggcaaattcaaaattgccaagtactatgtgtcgacgggggatacccacagactggataaatggggtactggggtacgttggtacacggatctacacgatacgacatctaaacagacaagagataaggattatactggttcaggcccctcgtaaggtaatacccttaatctagtttatatggaatagatatggaagaccatggaatacaaagggaaccaatgaatccgacaataccggcgagatccttgtcgagattggtcgacgagatctcccggcggcttcggcttgaatccttcggcttcgtaaactatggcgagtgtgttggtgctatgattcgatgatcctaaacccctccaggggtacgtcttttataccgtgagttgccttagtctcccagtgaaactcggagacaacgaaccctatacgatatagaatagtcccattcctctccgagtgggactctaataatctccagcccgtgaggatattttccatgttatctcgtatatttccttattgcatacgaaaacatatcgcaagatatgaggtatgccaatctggtatatttggaaaatcgtaggataggaggtatgccttatccgtaaccctgacactatgaaaatggccttgtcgccatggctgcaaagttttgaacatattatcggttgaattcgttgtatgacattgaacaataaacaatttgggcaacaccagctttgctttgtggctcacatgtaatggttgtggaatcctttcctgtatggatgctggccccccaaactataagggtcaattggatccttatcactgcaactttacccaattaaaaaaataccactactattcacgatatcggctgggtgccatcagtattttgtaaaaatttaaccatgccattatatacgtctcgaatgaagttggaaatggtttttgcattttcgtacagaccaaaatgcctccagctcttaaagtctcgtattttcgtacaaaccaaaatgcctccagctcttagagtctgacaagtgggacccaccttgtcatacacatcttttgaattcttaatttggttgttgcagcaagaagcggtgacagcaagcagcggcgatgggatggagcaagcggagcaatggcagtggagcaggcagcaatgtcagccatggagcgagcagtaagttgcgtcaatggcataggaagcgacaacagtggtggtggccagtggggaggcggcggatccggtgatgattcaagctagcgaatttggtggcgacaataggtctggccgtggactgaaggaagcacatccagtggcggcggcgaggcagtggagagctcgtgctgcagtggcaggtctagcaacaacacgagcagatccattgacggcggcgggtccggcagcagctcggcatggtgtggccactactggagaactggtctttatccagatggcaaaaatcacattagtcctagttcgaatagtaaccgggactaaaaaaatatttttaatcccggttcaaaagcccaacggtactttttgatctttagtcctggttggtaacaccattcgggactaaagatcatatatttagtcccggttggtatcatatattcgggactaaatatctctctcccgcgtcattggcatctctagctctctctctcttccttatctcggcatcggcagctgcgtcttatcccctcctcctcctcctcccctattcacgccttcttttccacctccactcctcctccccctcccctctcctccgatcccatcctccccttcccctctccttctccctctccctctcccatgtccatggcgcgcggcggcgataccctctcctctgctggatccggcgggaggggaggcgacaggcgcacggcaggtggaggcggcgcatgaggcggtgggcggctacctcccctccactagatctggtgggaggggaggcggcgggatgggaggccgggcggcggcccaacggaagcagcggcggtggcacccgggcggcatgctcctcctctccccgatctgtcggttatggctgatttgtttttagattttgttatagatttttttagatttgggaatgatttgtggattgtggttgattttgtggatggtggatgattttgtagatgggcatgtgatttgtggatgattttctgggtaggccagtgaattgtggatgatttttttgtggataatttgtggggatttgaggatctggcgttggtgatttcagctcggaatcaatagatgcaagtagcaaaaaaaaaacaatggaaaaaaagaaaaaacctttagtcccggttggtgttgggactaaagatggtagcgccagcacgtggtaccaaccgggactaaagatccatcttcagtcctagattcggggtcccggtttgcaacctgtgactaaagggggttgcaaatcaggactaaagattacttctctagcagtgggcaagagcaggcctgacggcggtgagccccatccccatccttatcgacaacgatgatagcagcgtatggccgcggcgagcttgttgatgcagtggcgggtttggcagcagtgcaagcagtcctagtggtggcggtcgcggtgagcaaatccaagggtgcggtgggtttggcaccgcttcgctgtgacgcggtgccaataggcccaatggcaacgttggcggtgaactccatcaccatcattctcaaagatgatgacaacaacacgaccaagactaataacaagtttaatagtatagccaaatattagctccaaatcatctattagctaatataatagctcattcatacaatagttaactataaaaatatactacaacattaatacccgatcccacatctcatacacacataacgtcttaaagtccgtgttgcagttggctacaaatatgtagcccactttcttctctctcttctcttttcttctcgatatgggattatagctgggggctgcaggaatt

SEQ ID NO: 22353 - DNA, 9416 bp, Oryza sativa
taggaagggttagagaagaagatgcgtatgacaaagtgggttccacttgtcagcctctaagggttgggagcatttttgtatagatgaaaatacagcacgtaaaaacctaatccaattgtgttcaagacgtatattgtcatggtttaaatttaacaaagtaccgatgacacccaacggatatcgcgaataatattggtattttttcaattgaggaaatttgcaatggcatagattcaattaaccattgtaatgttgcatttatgggtatcttccaaataattagtaattacccaatgaaagaggcacgatatatatatgaggtacacagcataatacactagcaaaattataaaaatagatgtcatgttcgtggtagacttggattactaagtcatagtagacttgaattatcaagtcggactgcatttatagctttcacttgcattattattaagtttgctgccaattagggccaaggttttgatgggcaggtcaccaaaattgaagttccaagaataaccgaataagcatatttcaaaagagaacattcttttcaatacccaacaaacaaaaaaaggtaaagcaaaagcatagaaaaagtagagcatacaccatccccatgatgagcaattcagcttcaaaaggtgggaatggtagagactagaggagagcagtggaggggctaaacgttgaccactagactgaagaagacaccgtcattaggtagccgctaattcactttcggtgtcagtgatgtaacgaattagtggccgaaatcagcatcacattatagacaacaacaaagttgatgccaaattttggaaactacgtccatatttgtaaataaaaataaataaagttgaatggataacatgcatcagatgcatatatggttagtgttggatggacaacatacatcggatacatatatggttggtcaaattgaaccaaattcttgttttgggttgcttgttttcttgtgacctggcccctacgtttatgatggattttcatatgtctaatgtatacgacaagaaatttgagatacgctctgttttggcattttatttgttcatattaattaactgatcatttgctaaactcttgatttcaacaagcaagattttggtgcgtggtttccttcaaaattctagcattcctatcttgatcggcagatcattgaatagacaatttatgcagatttatcctttttaattaggcttcagacacgaatgttatatgcatgttttactgattgagtcctacaaactaagaaatgtgccatacaggtaccagtaaaatttgtgaaatcaatgtcttgattattgtttttatatgaacaatagtcatatgatttgattatattggttttgatgatggtgatttattagatgatgtgattttgctctctataagagggtggccagatcatatagggagaatcattgttaaactgctggtatactagcggtcaggccggccggcccaacgaccaaactggcagactctgtgtcgaagttggttttaggttgattttttgatttacgatgattgcttcatgtttatgacctttagataatttttgtgctaatattgagtcaaggtgataaagaacttgtgcttagatatagttttttggtttgttcatgtgtaaggctgcgttcggtaggacatgttaccaactcctcctccttgttttcgcgcacacacttttcaagctactgaacagtgagtttttttacaaaaattttctataagaaagttgcttaaaaaatcatatcaatccattttttaaaaaatagcaaatacttaattaatcacatgctaatcgttgctccgttttttttgtgccggtgacgcagcctaagtggctcttgaggccttgagagagtattgatgatgacttgtgggaagttgatttccgaatgatcacgagatcatgcggggcatgtgtggtagctagagaacaatgcacgagattctaaaaatttcatatggatacaagagggattgtgtgagtatgaaaagtggattcaaatttaaatggagtccaaatttagtaagattagagtttaaattgtaataggataagatggatatttatatgggtgagtttcctaagggattaggactgcttatccacgttgggttcatagctttgtgcagccacctcaagatatagatagaggagaggtttagtttcttggtatcgattttgagagggaatagtttttgagaaaaattagggttcgatttgagttcaaaagttgagagagtagtgatttagttgcactttacaaacataattagactctataaagttgatctagttttaagtgcatctttaagttatgttttccgggatcttgacggcttgaccgatagtagtattatggtcagaccgttggtggccagacggttagaccggcgatgaaggctcggtcaaactggtggctaaggcaaccagtggcatatcaaaccggcggtagtagagaggcggttagaccagcgacataatgttgatcggactgatggcatttctgacagttagaccggcatagatactccggtcagacagaattttattaggtttgaaggttctttgtattctgaaaaaagatttcggtttttggtgttactatcattcacccccactggtagggtgtggtttttgtgttcgatctacaaaattttagttcataatttacatagattatgaactgaattagtttgttgtatggagagtatattttaaaaatattctgttgaggttgagccgatatatatgattttgcacatatatgccaataaaaggaaattaaggatggcgtctgcttggcttgacaaagacaagcattatgcaaaagcgtcacatatagagatgtatgcatgaacttttgttcaagttacacattaaatgtacagaaatccattttgtaggggtgaaaacggagcggacattatccgatccgatccgctccgaatccgtccgatgtgagaatatggtaagggttattatatccgggcggatgcggatgcagattttatcatgcggatgcgtatgtggatgtggtatgaacgatatctgacggatgcggattatgcgatattttaatcggattatccgatgtactgtttggcggataatccgcaaatctcaggccacacaacaactttcaagcccaactagctagcccaatagcccaacccggcctaacctaatcctctcctcctcccccagatccgctgctcggctgcaggctgctagcgtcgccgccagctgcaggctacaagcgccgccgccgccgctcttcctcgcagtgcaggctgcgtgtagcactactgcgtgctctactgctctatgcttgttgtatgcctatatggcttgcctcatgccgatgacttttatttttacattttaagcaacgcagtgaccagtgaactattaaacagaacacttatattatgtttttgatggatcatggatgtatcttggattattttgactagtgaactattgaactgaacacttatagttatactattactattgaattgaacgcagtgaactaatgatgttttgctattgtattgggcctaattgtattgccgccatcttattgtatggattgaatacaaacttgacatctgataactttttgtccgtttccgaaccgagtccgcaccgagtccgcaccgaatccgatgtccgaaataatccgctccgcatccgcatccgcacgtcatccgcacccgctccgcatccgcttaaaaaatatggtttaggatatggtatagttattatccgtccgaatccgctccgttttcacccctatcattttggtcttgggttggaataggtcttcggacttgggtacaggattcgcaaccgacacctgtcagactaagttcgtttgtgtgagatagagtgagaaagcacctcattttccgcgcgcacgcttcccaaactactaaacggtgcgttttttgtaaatattttctataggaaagttactttaaaaatcatattaatccatttttaaaaatttaaaatagttaatactcaattaatcatgcgctaatgggtcacctcgttttaagtatcttcctaatctcccccatcttcttctcctcaaacacaccctcagtccgcaatgataaaacgctttatatataggacataaagatgctggttgtgatcaagaattgacaggttgttacagagttgtttccgtccgtgtgtcatgtattatcaaacatgcaaaaaaaactattgtgagtccacttataaacataataaatttcatattttttttcttgatatatcattgaatattttcaatttccagaggttaattgttgcagactgtgagtctaaaactctgaagaatcagctgtcctgcaaccaaggcaactgaagacatgaagtaaagcgtagcaaaacaaaaacatcgtactctctccgtttctaaatatttgacgccgtttacttttttttaatatgtttgactgctcgtcttattaaaaaaattaagtaattattaattattttcctatcatttgatttattgttaaatataagtgtatacacactactagaaatcccaacattaacgaccagtagaaaattgtaatcctcgttatcctctgaatacgagtggtgaggagctgattttctaatctgacgaccactgaataactcgtcattaaaatttgctgctacacggtcgttaaaattgacgtgaaggaggcccatgactccacaaaaccaccaccatccatcccaagcaccagcagcccaacccactacacaagccgccgagggtttagggagacctccaatccgtgacggtagccgccgcctgccccaattgcgtcgctggctgcctacctcctgccgcgcctgcactgccggccgtcgcctccagttccacctgcgccatctagccgccaccaccacgtaagtgagcacaagtgaggctgggcgctgcaggggtgcacctcgccgtcgaggggatcagaggccggttggatcttttgatctgcccatgttgacccgatgaccccaacatcatctccacgtcaccatctattctcctcgctagtcgccgccctaattggtatgcttgaaaatctctactgatctgccctgattgatgattgatcaacatcccgaaccctgtatccaaaattagtaacttaatggatagtgtagatatatactgattgctttattttatctacagttactagattattgtctggtagcatcgtaattttttcggagacatcttgctgtactaaaggatttcaagagaatgttttttatgagaactcgagataattgaatagcaatggagaggcagcttgatctggcaagaactgacgggtgcagtactgcacaagacagtaacctcttttttatgcctttctccattcatcaaaattcatgttacatattggacgcaaataatgggagcatcattttgttctcaaattattctattggttatatattttgacagtttcagttcaaatctattttagtaggaaccaagatgaatacactccattggcctgactaaattatagtcaggtagtattccaagttttcattagttcctacaagatcagtcattgatgggcttgattttttgcccgcaaggccacaacaagttggatgcaacacaagagctatttccatatctgtaaagctattgctgacacactatctaaattggtacgagctactgtacattgtgggttaattactccttttatttatttgttagttttcttcaggttaattactccttttatatcattgcaaaatataaatgtagtaaagctctctaaatttacaggaatcatatgaaactagatggtgacaaagcattcctcattccttaaacaaaatttctggtaagttcagtttcttttcggaataagatattcatttatattactactacaaaacataagcaattatttgaacatcaccttttaggtttaaattttaccagtcttcatttatgcaaattattctattgcactttattttctccatggtcatgcaattattctatgaataatatcaaatgtgcacacaacatgtctgcaaatattggctcttctcaacattatatcaaattttttacactgaatggaatggaagtgatgtgtcattagaaagacatcataagagataaactcatgtgccttaatgaattttatgtatgaagtgccatagcttgttaaacagttaatatcatttttgtaagttgtataggatcaatggtgagacatatgagactggtgcatctgaagacaatacctgcgaatgttgatgggatcatcatcgtataacaaaggaatttgtccactgcacctccaagcacatacttatagatcgagtgtttaattttgatagacatcgagatgttggttctgtttgaatgacttaattatttagctggatgcggtgaacaaatttttattatgtattgcaatgaataaatgtggttgattgtctacgattggtcagaacataatgtaaatgttatatccatatggtgataaacatggatgttaattccaagagccggtgcagattgcaattatgtttctctactatcaacaatagtgtaccgtgttgtgtaccatgtggtgattaaaaattggatgttaacggaggtggttaaaaattaacaatggcgcaatactactgtcgtcaaataactaacgatgacacaatatcatggtcgttaattagaattaacgatggcaaaagaacacggtcgttaataagataacgatagcaaaaaaaaagcaccatcgttaatgaaataacgacgggtaaagatcgtttggtcgttaaaactattaacgacggagcctttaacaaccactgacgaccacaaacttagtggtcgttagtgacctttaacgaccacatttggacttttaacgaccaaatctcccatcgttaaaagtcgtttccctagtagtgacatatagttttatatatttaaaaaaattcgaataagacgaaccgtcaaacatgtgctaaaaatttaacggtgtaaaatattttaaaaacggagggagtatatatattcttccctaattcccatatgcagtagtcgtagcgcgtgggagggcctttctcaagtcaaaacttagatccaaagggatgaaaatcgatggatgctgctgcatccggggcggggttgaaagtctctggtagtggtagatatatatatcaaaagaagatgattaaaaagataataaataggtgatccaagtcgttggtcacagatctaccatgcatattcctaacgactgcttcagaccaagtcctaactacaactctgcttgtaatatttgctcagcactgactggactgactctggactagtcctgccactactctttttctgagctccaagtggacagtcagccggcttgatcagtggcatctgccaaatttccatgtatttccaattctacttacctagtagatgatataggatgatgatcgcgtatggtgatatgttgtagcttggtgcaaccactagtacagatccttccatctgtgatggcccataacaagactggaatttgcgggccgtcacaaggaagtaatctcaatcgggctgaagtttcgcccgattgagatatggtcgcacaggcatggtatatcggcataaaaataaagcccgtcacggatgacacttatctgtgacgggctatagttgaggcccgattgagatgagggttccatatctcaatcgggccctaaaaaaagcccgttacagatgagggtcatctgtgacgggctccaactagaggcccgattgagataagtttagtgcccgtcacagatgacacttttttttacggccttttattaaggcccgatagagattacttgtatgcccgtcacggttgattgttttagggccgttacagatatttgttgcacagtataaataccccccaccacctagtgtaattgtatcccactattcactattttggtgggaggctgtagggggcgattttttgtcctttttccaaggaaaacagaaattaaattcctgtaggtgatcaaaatggatcaatcaagtgagtaatattaatcattaattgagcaatttcatcacgtcttacttttgcaataatgatcttataatatgtgcctctaatttgtttttttttattttgtagcaattgatctaagttggatgtatgcgaaaaatttgaaacgtcattctacggagtacagaaagggcataataaattttatgaacgccgcggaggaggatcggataagaagaaacagtgattacatgtgttgtccttgtgcagattgcaagaatgagaatatgtttgatagcggagaatacgtacacggtcatctgatacaacgaggattcatggagggctatacatgttgggtgaagcatggagagcaagaatcaggaagtggagcagcagtagacagaagtggtgcgcataatcaggaaaatgaagatgagcatgacatgtttataccttctccattgggcggtgaaatggttgatgtggatcacgatctgctgcaagacatgttacgtgacattgaggacccagcccagaatgagagagatggaatgaagttcagcaggttggtaagtgattccgagacgcctctgtccgctggatgcaaagcaaaacacactaagttgtcagttaccttggacctaatgaagctgaaggcaagtagtggatggacagacaagagtttcacagatcttttaggaattttgaaggctatgcttcctgttgagaacacattgcccgagacgacatacgaagcaaagcaggttctgtgtccactggggttagaggtccgtaaaattcacgcttgtcccaacgactgcatattgtaccacaagcaatatgcggacttggatgcttgtcctgtctgcaaggtttctcgatacaagcgaaagaaaagtgctgacgaaggaaataagtcaaaagaggggtggtccggcaaaggttgtgtggtatctacttatcattgattgtttcaagagaatctttgccaacccgaacgaagcgaagttagtacgttggcacgccacggagagaaggaatgacggtatgcttagacacccagcggattcgattgaatggaggaatatcgatcgaaaacacaaagactttgctgccgaccctagaaacatgaggatatgtctgtgtacggatggcatgaatcctttcggtgacatgagtagtactcacagcacttcgccagttcttattgcgaactataacctcccaccatggttatgctttaaatggaaatatattatgttgtgcttgttaatctaaggtccaagcaacccggcaattatatggatgtattc

SEQ ID NO: 22354 - DNA, 2506 bp, Oryza sativa
ttaatgactaccctgcactcggtaatctttccggacaaactataaaaggaaagaaagcatgctccgattgcaaggaacatacacgaagccggtggctgaagaaatcacgaaagatggtatacatgggtcaccggaggtggctcccgctacgtcacgcatttagaagaaagaagaaaatttttaacggtaagagagaacttcagcctgctcccaaagatttgtccggagatgaggtgcacaatatggtaaaggacataagtaatgagtttgggaagaaaagaaaatgtagaaagacaaaggagaagggtatgtggaagaaaaaatccatattttggcggttaccttactggaaagatctagatgtctgtcattgcattgatctcatgcatgtagaaaagaatgtgtgtgagagtttggttagcctgatgctgaatattcccgggaagacaaaggacgggttgaacgcgcgccttgatctataggacatgaatattcgcagtgaactccagcccatacgagatgcagagacatgtaaagtgtacctccctccagcctaccacacactgtcgaaggatgagaagatcgcaatgttatcatgcttgaaggatattaaagatccattgggctattcagcgaggataagtaagtatgttaaattggacgatctaaaacttgttggaatgaagtctcacgattgccatgtgctaatcacacaaatcttgccagttgctatcagaggcattctaccaccgaaattgcgtcacacgatccaacgtctgtgcgccttcttcaatgcaattggacagaaggttatagatccagaagatctagatgggctgcagaccgatattgtgaataccctctatcacctggagatgtttttcccactgtctttctttgatataatggttcatctccctgttcatctgatgaagcaaacaaaactatgtggcccggcttttctaagggaaatgtggctgtttgaaaggtacatgggagttctgaagtcgtacgttcgtaacagagctaaacccgaggggagcatcattgaaggttacacgaccgaggaggctattgagttctgtgtcaattacatgtccgatgccgatcctatcggagttcccgcgtctcgtcacgagggaaggttgtcaggtgttggcacaatcggaaggaaaagaattaggcccgatcaagcgtcgtacgcgcaggctcattacgctgtgctccaacatatggcagaagttggcccatactttgaggagcacttagcgaaaatccgagatgagaacttggggcgatctgatgcatggattaacatagaacataattctcggttcaacaaatggttcaagaatcgtgtgacaatgtcctcggatgtcccaaatgagacagtacagttgttggggatgggaccgtcttggaccgtagacacatggcaaggatacgatataaatggatacacattttacaccgtcaaacaagatgacaaaagcacagtgcgaaacagcggcgtccgtatagatgcattccaggatcaagttgggtcaaacacatactacggccgcattgaggagatatgggagctaaactacgtcaagttcaaggttcctttgttccgctgccgttgggtgaatctacgcactggtgtcaaagccaacaaggaaggtttcactttagtagatctatctaaggtgggatacgccgatgaaccatttgtacttgcaaaataggtcgagcagatattctacataaaagacccttcaaacaagaagatgcacatcgtgagggatggaaagcgccgaattgtaggagttgacaacgtcgtcgatgaagaagaatacaaccataatcttcatgtaagacctcacattgaccttgacgatgatccccaagagcctgtggcatatgctcgttcagatcatacggaaggcataaccttgtgactgatgcatttgtacttatctattgaaatgaatgaagtattttgttttattgcaaagacttgatatgtgtagtcattaatatggctaattttgttttattacaaatgaccaaaataaaagttgtagatcctgatgagaggatcaactctattgttgaccatatttccatttgaaatcatttagtattgacaaaattaatttcaagctgttgggaaaaaaattatatagaaaatcatttagtataaaatgaattattacacaacagctatatattttgcactctcaacaaatgaaagatggaaaatgagtcatcgttgacgggccaacgtttacggccgatagagattaatctatcttaatcgggctttgccgtagagcccgtcacagatgactcatcggtgacgggctccatactaatgcccgattgagatgacattccagcccgtcacggatgactcatctgtgcgggcccaaagataatgcccgatagagatagattaatctctatcgggcttgaactaaggcccgtcaccgatgactatttttccatttttccagataag

SEQ ID NO: 22355 - DNA, 10353 bp, Oryza sativa
attgaaatcatttagtatttacaaatgctgtttagatttgtcatattgacaaaatcaatttcaagctgttggaaacaaagttatatagacaaatgaccaaataaaagttgtagatcctgatgagaggatcaactttgttgtttaccatatttccatttgaaatcatttactatccgaaaatatattatgactaataaaatgaattattatacagcagttatatattttgtactcacaaatataaagacttatctggaaaaatggaaaaatagtcatcggtgatgggccttagttcaagcccgatagagattaatctatctctatcgggcattatctttgggcccgtcacagatgagtcatccgtgacgggcctgaatgtcatctcaattgagcattagtatggagcccgtcaccgatgagtcatctgtgacgggccctacggcaaagcccgattgagatgactcatcactctactatatctagatcgaaaatttttctaagtcccgctacagtttcccgcctccttagaaccctagcgccgccgccaactcctacttcgccgtcgtcgccaccgagcccgccaccgccgccaccgagcccgccgcctccaccgagcccagtgccgcctcccccgaccggcgatgccctccaccgagccaggcgccgccgtcaccgagcccgccgccaccgccgtcgtcctccctcgagcctccacaccgaccggaccggtgtcggccttcctcgttgttgacgcccgtatcctcaccgacgcacgtcgccgacccccaccgagcccgacaccgcccgcccggcgccgacctaccaaaccggcatctccaccgactggcgccgccctctaccgagcccggcgctgccgccgcaaactcctccgttgccgagcccgccaccgccgccaccgagaccgctgcctccaccgagcccaacgccacctccaccgaccagcgacgccctccaccgagcccagcgccgccgccaccgagccctaccgaccgtcctcaggtgagtactccatcgcgctgccctatgctaactgtgaatgacatgtcattgaaatgtggatgtggatgatatgtgattgaactgtgagtgagacatgtcgatgttgggatgaaatgtggtgcatttatgaattttgtgatagatgattgtagtgattgatgaaatgtggttaattttattactgtgagatgtgcaatttcgtttatttatacatggtgcattaatgaattttgtaaatagatgaaatgtggttcgttttattactgtgagatgcgcaattcagtattctgcaatttcgtttatttatacatggtgcattaatgaatttagtaaatagatgaaatgtggttcgttttattactgtgagatgcgcaatttagtttatttatatgtttcatttatttttctaagtgacattaaattcattgtaatagattgtagcactcaattgtgtatttttgttattgagaaaaaaagtatacaatgtctcagcaaggcgaaccaatgtcgacgacaactaatgggtcctcaagggcacgtactcctaggacagggaacaaaatccctaaggaacggttccgcataacagcggtggacgccgtagggttgccgacatctccaaggaaaatattgagccgatttaggtctatctgcggggtcatagggaggcagaaattcagtattctgcaagatgacatcaagctcgtgccggccgcagagaaggacattgcttggctaacgttcaaggagagctttgattatcctgtggagcatgagtaccgtctcaggcgggctgctttcaaggttatgggcaatgcttagaagaacttcaagactaagctagtcggcgagttcgtctacaacccggcgaatccagatccaagagagaaatttccttggatcacggaataggtctgggaggaattccatgcgaaaaagtcgacccccgagtccagagctagaagcgaggcatatcgcttgctccagaccaggaaccagcatcggcaccggcttggcaccgccggatatgccgataaggaagaggaatggcagcgtgaggatgaagaagcggaggaatcgtgcacaccgctcgtgttcggcgatatcccacaccctcgggctagcaactgggctagggctaggtaccagaagaattatgatggcacaatcttcatgccaaatgcagaagatcaacgagtatacgaagctattgtaagtgtctagtcaaactagatgttcgcattgtttcccatcgtgcagtttatttaaacccactaaattgtaatgcagaaggagttggttgccgagcaacaagcctcgcaagaggcctgctctcaaagacgcgaggacgacctcctcacgaaagcgttgggcaacaaggaacatcgtggacggacacagggcgttgggtcttctgttccctggaagtatggatttccagactacgcgtggcagtacaagaagcggacttccaacaaggcggagaaagatgcacgccttgaagccaagatccgggcgtcgataagagctgagctgacatctgaattcgacaaaaagctcgagtcgatgagggccaagattaggcaagagatccgagaagagcaacagaacccccaggccgccgctgctgctgcgcacaaagagttaggaagtcctacccaaaaacgaagcagttgcgcatcaactgagttggcggaaaatccaacatcggtcgacagcgccgtcgaccacataacggtaaccgtgaacttactcaatacatgaaagacttaacgaatccatatgatatataatattctaaaagaattgattaatctatcgcaggaaccgacgagctgcaccctcatagttagggtgatgccgaccttcacggttctagcagccgagggacttgcgtacaagccgaccccagagacaagagtgcatggagcgcaactcagggccgattgtgcaaaagttcaagtcgattcggtgaagcccgaatacgagctgttccctctgaagtatccaccgaacgacgaggtcctctcactaggaaatgatcatggtaccttcatccaatggcccaaggacctcattgagatcagggttacagtgaggccaaccactacaccaggcggtcgtccaccaaagagacccgcctcttctctttcagcccctcctgctcaagatgtcatgcacaatcttatgatgtgcagttgcagtacgacacggatcttggggaggaccgaacggaggccgacagcaaggcgattcatgaacccccaccgatgaagaagagcaggaaggcacactcttccccttagagaattactctcgataaacccgaagcaaaggggagaggaaggggaggaaaggtgcaggcctcgcttctagctccaaggaagctagatctgggcaagggccaggaagagactaagagcaaagaggtcaagaagaaatacgtcactccacaggagttccaactaggcatgccattggttggagatgacatgcttgccgcaatgggcaccgcttgcaaggaccttcacttatactacatggagaaatctaacgccaggaagccaagtaaagctaccgatatccttggagagcacgatggaaagtcattccttggtccaacaaattatatcgtggtcgacttcaaggatcttttcgacctctacaggcttcgagcggtggacacaagcctccttaagtgctactccttgtaagtattgtcgcccaactcaatctgttaataacaatcggtttaacttgcttacaagatcgtttatcctgtgtgtaggttaagttagcaatggtgtcagaagcatgcaccggaagttgccttccttgatccacaagtggtcactgtcacaaatctccaaaatgaccgtcaaggaatggtcaactacatctacgacaccttgtggtcccgccgagacaaggagtacattatgtgcgcctataatcaatagtaagtgtgttaactagatatacacaacagcatgacacattacttgagtacttaattaactttcactatattaatgccacagtgcccattggatccttctggtcataacacctaagtggagtacatgtcactacctgaactccagaattgataagaacgcatatgattggaccccaattcaactagcgatagatgaagggtgggcccaatacgtgcaaagaggaggcctcaggaagacaggacatgacaccctcatccacaaaaaagacttcccggtgaagcaacaaataggtgaccagtgcggattccatgtgtgccacaacatgcgccttctgtatagagaaaaggtgaagactttggctgagtttgaggtcggtggtctcaattgtgatagactaactacattttagtacttatatatgatcgatcaactaatctggaattatgacaatgtagggcacaataaccaagtctctgcctaccagctttgaggaggttcgcgaggagatagccagcttcatcctccgcgaaataattaaccccaaaggaatgtttagacttaaactaaaatgatgaacaatgttgaacttttatgtttaggcaatgatgaacacttattatgcaactgtgatgatgtaactgtgatgtttatatttatgtatatatttcatatgtttatgttaagacttgataaataaatatttgatccaattaactcggttttgcaggtgaaacatgataaatatttgaatggatgttaaatatgtgaatggatgtgaaatatgagatggctgtgaatgtgtggttgtgtgaaatatgttgatgtctgtgtatgtgaatgcatatgtatatgaatgggtgatgctggggagctggggatatcggatatctgtgtttgtttctgtcatttttgcagcgggcatggctagcaaaggcctgaggctagccaaaaaaacaaattttttttgtgtattatagtcatctgtgatgggccataaataaatgcccaattgagatgagttcatctgtgatgggctctagtttaggcccgattgagatcagtagtcatatgtgacgggctctagtttaggcccgattgaggtcagtagtcatctgtgatgggctctagtttaggcccgattgaggtcagtagtcatctgtgacgggctctagtttacgcccgattgaggtcagtagtcatctgtgacgggctctagtttaggcccgataaaggttagtagtcatctgtgatgggcgctagttgtggcccgatagagataggtcatctgtgacgggctataatttgactggtcgtctgggtcaaagctatctgtgacgggctttacttagggcccgattgagctatattcattcgtgacggccgtttgcccgattgagataactcttcacatcagtgacttctagcctgtgacggacgctgtgcccgattgagatggggcttaccgcccgattgagatgagggtatccgttctagtgaactctttatttatcagtcaaaactgaagaaataaaactagaagaacagtggatggttgtcgcggttgtagcaatgtagctgtgtattcctccaatatacacttcccgaaaaataaaactcttaattaccaaaaagaaagggcagatttattctaaaatacactattttttttgaagcactgtacaaatacaagcacccacaacatgcgcacactcatctttatgaaggcacacgcacacctcatctctatgaatactttcgaaagactacgacggcacatgttgagattcacgaagttatcacgtgcgcctcgctgtcgacgggtacaccgaccactgaaaaaaaatagttgtaaatgtgagcactcgtgtttagtctaggacttgaattcggatgggctagttccaccaaaaaaatataaccaattgagttacacttacttttgacggtcgttaagtgtaaacttgaaccatcaactcttgctcctgcatcaaagaatataaaatatactgtcaaacttagtggtaggggttgattactaaccatgtccaatagtattgataaatattagtatgcaagtgacttctggatgaaaacacacccgtcatgtgacaaaatatacctcttaccaatcatatgcgagcataaggattgaagggaccacatgtcagtcaaaaccgattgaatttgagtacatccactgccaaccgccatagtgctcacctatcatccactaggcaaagttggtggccaaaggcagtggaggtggtttcagccgaacaagccttggcgccctcggttgcctccttgcacgtggcagctgcccattggttggtgatggcggttgtgggtgaatcgacctccacaactgtcattccaaccgtcttaatttgggggctataaaaggaggaccacactcacttccaaaatgcacaataaagtggggtatcactcacttttttaattccaagcatcactttagtatatgaaactatatagagagtgaggggaagctccgaaatgagtgccccaaatatcggagttctctccatggagatcctgaggagtgtcgggtttgacaacattcttccattggaacttcggagaagcgccagagttgtcggctttcttctctcacttgtaccttggcggatgcttcttttaaagtaagtattcgagacttctttatggtatataatttacctgcttaagtgagattcccattgttaggggtttgtgcttagtattattattaagtgctctagtactatgactctgggtaaagaaggaagtttctgcgctaggctagagtaataatcaataacttagatgtggtgtctaagttagtggttacctttgtttgttgtgtgctccacggaaagtgaggtaagtggcaggtggtgatatccctgtccgttctttgtatccctccacgttcaggtacatcataaagccgtaggctggactcagtttggtagatcagaggagagccaatgcctgaagcaatcaattgggtttacctttaacttaaatatattaaattaacctataggaatcctcgctagtcttagcctaccattctttttgaacgactcacaccaaacagtgcggagttctattgatagagcaggaaaaaaaatccaagattacaaccctgggaggtcgtaaccaggaaaacgaaaaaagtataccaccacccacacaccgacagcgccaacatatagacctaggagaagactagcatcggactggccgccactaagcgtgaccgaccgccgctaggccaacaatggaacacagccgagatcgcccaaaacccgacccttacaaccaacacaaaaccctactctatccaaatctttgggattgagggagagagggtgagagagaagaatggaaccgctttccccctaggccctccaacgtggccaacttgcagaagctaggccgccaccacaagaggatatgaatctagagtgagcttgtattaatttcttgggaggtttcggcaaggggatgcctagacgacgtctccaaggagagaagcgacgaaacatcgccgccgccatccatcaaggtcttcaagagaaccgagaccaagctttcacccgacagccacacttgagggggtgagacagcacgacaacgccctcaggaggggagtgacgctcgaacgccatcgttgccggtccggccaaggccgggttgggtttcacccgccgtcctccgtctgccgatctaccactgatgtaccattgccccaccgccatctaaccctccgccggcgcgtgggcaccactgcaccggcgcccctcgccgtccagtctccgcacactgccaacggtcgcgtcctcccgctgcaccagtgtcacgccctgaagtttcccctttcttctttctttaaaagttggttgaataaatcgtccgaagaaattatcttaattaacctagagctaaatccctaattaataaatgcaattgataattggaattagcattgtgggatttttcttgggttccacatgtcgcaattgattaacaggatttttagtggaatttttagagccctataagtaattttaaccaattaaaattcgcaaagtgcaatattttaaatcccagcaaaaactttttccttttgctccattcctttccctcctttttctttgtttgaccgttggcccatctctctcccgcacccctccctcttgctgggccggcccaagccgcctcctctcctctttgggacgctgacaggtagggcccatcggtcaggtcgtccccaacctccatccacccgcgcaccgcggcaaccaccgctcccacatcgccgtccgcatctcccgcgcccactccgcgtccacgcgctgcgcccacgtcgtcgtccgccgctcctccgcctttcccactcgcgcacgcgcccgcaaatgggcgggattcgatttgaatcccgtcccctctctctctctccactcccccacgtcgccggccaaatagggggccaccccggccatttctgtcctttcctcgcccataaaaacccttccccgagccccttcttgcatttcccccattcgccgcgccctcccgtgcttcctaccgcagccgcgccgtcgcaccgacctccgccgcctgccaccgtactccggccgcgcgccaccgctgctagagccgccgcagtcgcgctcctcggccgccgcttggttgccgctaatcagccccagaaccccatctccctcgcgagccggtgagctcctccatttccccgccttcggtcgacatcctcgctcgccatggactccttctccccctctaaactctatgttttactctccctcccgcgccggcgaaaccccggtgaggcctcccgccccctcttttcccctttcctctccttcctcccgctgccgtcgcgccgccgcccttcggcaatgcgcagccgcttccgcgccggtcgccgccgtctcccgcgccgccggtcaccgccggtgaccacgctcgccgccgccgctccccatggccggccggccggctttgtgccgagccgagccgtgcctagccgccgcctgcgccgtccgattggccacgggccaatctggaccatcggtcccgtggaccggcggtggaccactcgtgtgatcccggtccacggtggaccggccgcctcatgccgctgacatgcagggcccgcttgccggcgccgccccctctcgctgacatcagcccttggctttattgcgcaataaattgattaaggacttttctttattagtaaaaacacagattatcttctaaaattcataagtaattcttccgagctccgtttaagtccattcaagtctcagtaaatcaagaaaaatgcaaagaatccattaaaatggttttgtttcctgtttcagtagtcttatagcatgttttgcttgtgtgctttgtttgtcgcgtagattttggccgtttcgtcgatccgctgtttctcgaagacgttgctgtggtctcatcagtgagagagcaaggcaagtcatgcattacaattgatcatattgtacccaatttacaaatatcccgcatttctattaaatgttgcattcttttacaatgtcatgtgggatgggtcctattactcatccatatattgtttaccttatgccgttgattacttgggtatcaaaataactagatgttggtttaggaaatgcttagccatgcttagctcaactagtacacaaatggggataacattattacatagactttgactattagcatagctttggattgatgccaccgcaatggtgttagttaattaaaatacactgaatggtgggctgtgggtgtatggttttgctggtcgcacccatgacagttaaggaccggttcacgggaaaccctgggagacttaccgtgcttaccacaagagggagtgggtaactgcttgatctgaagtatagctcgaccctttcctaggcaccggtcagccggggtgtccgattgtccaactgtcgaattcaccgcagcgcaagagggggccgcccactgccttttgaggggtgggggtgaaaccttagcgtggtgtggatggttaggggagggttatgcggagggtcttgtcacgatttccccctttgcagtatcatagtgatacttcggggcatggcgatatgtgtggaatcgtgtcttgtgggtacagttgtacacctctggccagagtaaaactattcgaatagccgtgcccgtggttatgagcgatcaaccagattcaccgtgattagtctcacccctagtttagtttgatgaactggtgtagttcaggtggttggttgggccagttgcaacgtggtgtagcgttggacagtgattggttaatctggcttaatct

SEQ ID NO: 22356 - DNA, 6023 bp, Oryza sativa
aggcaagtcatgcattacaattgatcatattgtacccaatttacaaatatcccgcatttctattaaatgttgcattcttttacaatgtcatgtgggatgggtcctattactcatccatatattgtttacctatccatatattgtttaccttatgccattgataacttgggtatcaaaataactagatgttggtttaggaaatgcttagccatgcttagctcaactagtacacaaatggggatcacattattacatagactgactattagcatagctttggattggtgccaccgcaatggtgttagttaattaaaatacactgaatggtgggctgtgggtgcatggttttgttggtcgcacccatggtagttaaggaccggttcacgggaaaccctgggagacttatcgtgcttaccacaagagggagtgggtaactgcttgatctgaagtgtagctcgaccctttcctaggcaccggtggcgagggtgggcgtgatgtagttgggtcggccggggtgtccagttgtccagctgccggattcaccgcggcgcaaaaggggaccacccactgccttttgaggggtgggggtgaaaccttagcgtggtgtggatggttaggggagggttatgcggagggtcttgtcacgatttccccctttgcagtatcatggtgatacttcggggcatggcgacatgtgtggaatcgtgtcttgtgggtacagttgtatacctctggccagagtaaaactattcgaatagccgtgcccgcggttatgaccgatcaaccagattcaccgtgattagtctcacccctagtttagtttgatgaactggtgtagttcaggtggttggttgggccagttgcaacgtggtgtagcgttggacagtgattggttaatcttgcttaatctactacatatgtttttactgctttcaactactgtttttaaatgcctgctttattgcaaatgaaccctaagcctcctttggatatatcctgcatcatacctcctcttccggtatgacttgctgagtacagtgggtagtactcagtcttgctctcttttcccccacaccagagctgaagatcttcctagttggagctgtcttgtcgaagttggtttcgtcgctgccatcaaggattgcctgtggagtggagtcgccccgctgcagaagtcaagcttccaagtttagctcgcttttatcttttccgctgcatttgtaatcttttctatttttataagacgtggatctgtatgtcaacaattgtcgtttgtgtaccctggctggtcctagacagggatttaatgcacattcagcttagaaattctggttcgtgaatttctgggcgtgacaagttggtatcagagccaaccttgcccataagacaagccaactggaaacctaagagccctctcaaccccttttcatctgcatatgttctttgcactaggattagtttcgggaaaatttggggttttggctctttggtttgagggagaaatcttggtcgttcattcggatcggatctttaaagttagctcagtctagggttttagaaaaattttatttggagtttattcaacagtaagtcggggatttatcgggtgatatgcactaagtcgtgtctatgttcgatggggcaattttatgcgtatcattatgactatgcatctattttatgcattaatttattgtttagtcagttgcattagtgtctttatctgggttcatgaaaaatgttctatgcataataatcaccatgctcagttatttgtttgagtcatttgttgctttgttcaatttggatttgagcatgaattggttcctatcccttgtccatcttaggtgtcagacctgttcctcgatcgcaagtgtcggtccgagcttcagagtcgccgcccttagctgtatcatcttcttagttttgtttgcttgctagtttctgtgcttaggttagttgcttgtgggttagtcgacggtcgatatcatgtgtcagtggtatggctgccttcagtaggagttgtttgcttccttttcagtgtttttatcaagattaagataattgcacttaaatttataagaaagattagtttctaagcccctgtttttcttccttttctcatatttctacctatccccctccagatggtgaagacaaggaatggttcccgtgactccaacaacgccagcggcagcggagagcaaatcaatggaccacgtgccagcggtgcatctgacagcagttcatctccaccgcccgagaacccaacgattgctcaggtgttggacaatcagactcagatgatgacaatgatgatgcaacagatgcaacaacagtaccatcaggtgttgcagcaggtgcagcagcaagcacagcagcagcagcagaacatttagtttggtcttccacctccccagtctaagctgttagagtttctccgtgtcaagccaccgactttctcaggcaccaccaacccaatcgaggccaacgactggcttcatgctattgagaagaagctgaaccttttgcaatgcaacgaccaggagaaggttgcttttgctacacaccagctgcaaggtcccgcttctgtttggtgggacaactacatggtgacccgtccagctgggacagaggttacttgggcagagttttgtaagagtttcaataaagcacaggttcccgaggggattgtggcacaaaagaagagagagtttcgttctctgcaacaaggaaccagaacagttatagagtatttgcatgagttcaaccgccttgcgcgctacgctcctgaggacgtgcgcactgatgccgagaggcaggagaagtttttgtctggtcttgatgatgaattgaccaaccagttgatctctagagattatgaggactttgagaagcttgtggacaaggctatccgtcaagaggagcaatgcaacaaaatgaaccgtaagaggaaggcagctcagctcaggactccccaggggaagagtcagaagccttgcttcacgatgggacatcaaggtgaaccttccaccatgattatccggcagcaccgtccctaccacccgggtagcttcaacaagaactacaagagtggcagtcacagcaacagtgagcagcacagcctcaaccctactccaagtccactaatgattccagctcagtcagttcagtcagctctgccagctcagccagaacagcccaagaagtttggagaaaagcccaaactctgcttcaattgtaacgagcccggacacatggttggtacgtgcccgaagccaagacgtgccagactcaagttcgttcaggcccatgtcaatcatgcatctgcagaggaggcgcagtcagcaccagaggttatattgggcacatttcccgtcaactcgacaccggcagtaatattgtttgattctggtgcaactcattccttcatttccaagcgttttgctggtgcacatgggttatctttagtgaagcttaagatacctatgcgagttcatactcctggaggtggcatgaccacatctcactattgcccatccgtgacagttgaaattcaagggttgatttttccagccaacctcattcttctcgaatccaaggacctagatgtcatacttggaatggattggttgacaaggcacagaggagtgattgattgcgctagccgcaccatcaagttgaccaatgcgaaaggagaagtggtaaccttccagtctccagtgccgcagaagccagggatcagtttaaactaggctgctggtgaagaacaagaggtaacagtggagaaaaccactaagaagttggaggatattcccatagctagagattatccagaggttttcccggaggatctaacaacaatgccaccaaaatgggatatcgagttcaagattgacttggtacctggaactgcaccgatccacaagaggccttacagaatgggagccaacgagttggcggaagtcaagaagcaagttgatgaacagttacagaagggatacattcgcccgagcacgtcgccttggggtgctccggtaatttttgtggaaaagaaagacaaaaccaagaggatgtgcatcgactaccgcgcactcaatgaggtcactattaagaacaagtaccctttgtcaaggattgatgatctgttcgatcagttgaaaggagctattatgttctctaagatagacctgcgatcaggctatcaccagttgaggatccgtgaagaggatattccaaagacaacattcatcactcgttatgggttgttcgaatgcacagttatgtctttcggactcaccaacgcacctgccttcttcatgaatttgatgaacaaggtgtttatggaatttctggacaagtttgtcgtggtttcatcgatgacatactgatctactccaagtccgaggaagaacatgaacagcatcttcggttggtgcttgaaaagctaaaagagcaccaactatatgccaagttcagcaagtgtgacttctggctaaagaaagttcagtttcttggtcatgtcgtaagtgctcaaggagtggctatggatccaggaaatgtggagtcagttaccaagtggaccctaccaaggacggtcactcaggttcggagtttcttaggacttgcgggctattaccgtcggttcattgagaacttctctaaaattgccaagccaatgacacagcttctgaagaaggaagaaaagtttatctggtctgctgaatgcaatagagttttgaagaactcaaacgacggttggtgtctgcacctgttttgattctacctgatcagacgaaagatttccaagtgtattgtgatgcatccagccaagggctggggtgtgtgttgatgcaagatggcaatgtggttgcgtatgcttcacgacagttgcgtcctcatgaaggcaactacctgacccatgatctggagttagccgcagttgttcatgctttaaagatctggcggcactatcttatcggtaaccgttgtgaggtatatacaaatcacaaaagcctaaagtacatcttcacccaacctgatctgaatctctgacagcgaagatggttggagctaatcaaagattataatatgggaatacactaccatcccggcaaggctaatgtggtagcagatgccttgagcaggaagagctactgcaatgttgcatgggtagaaaaactatgttgtgaggttcaacgcgatttggaacacctgaaccttggtatagttgagcatggattcgtggctgccctagaggcacaacccacacaggtggagcaggttcgcatagctcaagcaagtgatcctgagatagcagaactcaaaaagaacatgagggttggaaaagcccgaggttttgttgaggatgaacaagggacaatctggatgggagaaagattatgtgtacctgaaaataaggagttaaaagacctgatactgacaaaagctcatcaaactcagtattccattcatcctggcagtaccaaaatgtaccaagacctcaaagaaaagttctggtgggtcagcatgagaagggaaatagctgaatttgtcgcactctgtgacgtctgttagcgagtaaaggcagaacacaaaaggccagcaagtctgctacagccccttcagattccagaatggaagtggaaagaaattggaatggactttatcaccggcttgcccaggacttcatcagggcacgattctatttgggtagtcgttgaccgactcaccaaagtggctcacttcattccggtgcatactacctactcagggaagaagctagcagaactttatctggcaagaatcatgtgtctacatggtgtacctaagaagatagtgtctgaccgaggaagccaattcacctcaaagttctggcagaaattgcaagaggaattgggaacccagttgaacttcagcacagcctaccatccgcagacttatggccaaactgagcgagttaatcaaatattggaggatatgttgagagcctgtgcacttgattttggtggatcatgggacaa

SEQ ID NO: 22357 - DNA, 971 bp, Oryza sativa
aggaacaagcaagttcagatcacatcgaaattcaggaagatctgacgtatgtggagaagccgactcgtatccttgaaaccagcgagagaaggaccagaaacaaagcaatcagattctgcaaagttcaatggagccaccactcagaagaagaggccacttaggaaagagaagatgagttgaaggccacccatccgcacctcttcgccagctcttccgaatctcggggtcgagattccggtaggtttgtcacgccctgaagtttcccctttcttctttctttaaaagttggttgaataaatcgtccgaagaaattatcttaattaacctagagctaaatccctaattaataaatgcaattgataattggaattggcattgtgagatttttcttgggttccacatgtcgcaattgattaacaggatttttagtggaattttaagagccctataagtaattttaaccaattaaaattcgcaaagtgcaatattttaaatcccaggaaaatctttttcctttttctccattcctctccctcctttttctttgttgggctggcccatctctctcccgcgcccctccctcttgctgggccggcccaagccgcctcctctcctctttgggacgctgacaggtggggcccacctgtcaggtcatccccaacctccagccacccgcgccccgcggcaaccgctgctcccacgtcgccgtccgcgtctcccacgcccactccgcgtccacgcgctgcgcccacgttgtcgtccgccgctcctccgcctttcccgctcgcgcgcgcgcccgcaaatgggcgggattcgatttgaatcccgtcccctctctctctctctctccactcccccacgtcgcctgccaaatagggggccaccccggccgtttccgtccttccctcgcccataaaaactcttccccgagcccctcttgcgtttcccccattcgccgcgccctcccgtgc

SEQ ID NO: 22358 - DNA, 16099 bp, Oryza sativa
gccgtttcgtcgatccgcggttcctcgaagacgttgctgtggtctcaccagtgcgagagcaaggcaagtcatgctttacatttgatcatattgtacccaatttacaaatatccctcatttctattaaatgttgcactcttttacaatgtcatgtgggatgggtcctactactcagccatagattgtttaccatatgccattgataacttgggtatcaatatgattagatgttggtttaggaaatgcttagccatgcctagttcaactagtacacaaatggggatcacattatcacatagactttgtctatcagcaaagttttggattgctgccaccgcaatggtgttagttaattaaaatacactgaatggtgggctacgggttcatggtttcgctgtcgcacccatggaagttaaggaccagttcacgggaaaccctgggagacttaccgtgcttatcacaagcgggagtgggtaactgcttgatctaaagtatagctcgaccctttcctaggcaccggtggcgagggtgggcgtgatagagttgggtcggccggggtgtccggttgtccagctgccggattcaccgcggcgcaagaagggaccgcccactgccttttgaggggtgggggtgaaaccttagcgtggtatggatggttaggggagggttatgcggagggtcttgtcacgatttccccctttgcagtatcatggtgatacttcggggcatggcgacatgtgtggaatcgtgtcttgtgggtacagttatacacctctggccagagtaaaactattcgaatagccgtgcctgcggttatgggcgatcaaccaaattcaccgtgattagtctcaccctagtttagcttaatgaactggtgtagttcaggtggttggttgggcctattgcaacgtggtgtagcgttggacagtgattagttaatattgattaattactacagctcttttactgctttcaactattgcttttaaatgctagcttgatgcaaaagaacccctagcctcctttggttatatcctgcatcatacctcctcttccggtatgacttgctgagtacagtgggtagtactcagtcttgctctcttttcccccacaccagagttgaagttcttctcagttggagccgtctcagagagattggtttcgtcgctgccgttaaggattgcttgtggaatggagtcgccccgcttctgaagtcaagcttccgagtttagttcgttttatcttttccgctacatttgtaaacttttatatttttgtaagacgtggatctgtatgtcaacaatggtcgtttgtgtaccctggctggtcctggacagggatttaatgcacattcagcttagaaattctgattcgtgaatatctgggcatgacaagttggtatcagagccgagcctgaccgtaggacaagccaactggaaacctaagagccctctgaaccccttttcatatgcatatgcctttttcacctggatttgtttcgggaaaattttgggttttgcctctttggtttgtgggaaaaatcttggtagttcatttggatcggatctttaaaattagctcagtctagggttttagtaaaattttatttggagtttattcgacagtcagtcgggaatctatcaggtgatatgcattaggtcgtgtctatgttcgatggggcaattttatgcgcattattttctatgcatctaatttatgcattaatttattgtttaatcagttgcattagtgtctttatctgggttcatgaaaaatgttctatgcataaaaatcagtcatgctaggttatttatttgagtcatttgttgctttgtttaatttggaatttagcatgaattggttcttatcccttgtctactttagatgttagtcctatccctcgattgcaagcgccgctccgagcttcagagtcgccgcccttagttttatcgtcttcttagttttgtttgcttgctagtttccgtgcttaagtttgttgcttgtgggttagttggcggtcgatatcatgtgtgagtggtatggctgacttaattaagagttgcgtgcctctttttcagtgttttaatcaagattaagataattgcacttaaatttataagaaagattagtttctgagccccctatttttcttccttttctcatatttctacctatcctccttcagatggtgaagacaaggaatggttcacgtgactccagcaacgtcagtggcagcgaagagcagattagtggagcacgtgccaacagtgcatctgacaacagtccatctccaccgcccgagaacccaacgatcactcaggtgttggacaatcagactcagatgatgtcaatgattatgcaacagatgcaacaacagtaccatcaggtgttgcagtaggtgcagcagcaagcacaacagcagcagtagaacctgcagtttggtcttccacctccttaatccaaactgttagaatttctccatgtcaagccgcccactttctcaagtaccaccaacccaatcgaggccaacgactggcttcgtgctattgagaagaagctgaaccttttgcaatgcaacgaccaagagaaggttgcttttgctatacaccagctgcaaggtcccgcttctgtttggtgggacaactacgtggtgacccgtccagctgggacaaaggttacctgggcagagttttgtcagagtttcaataaagcacaggttcccgagggaattatggcacaaaagaagagagagttccgttctctgcaacaaggaaccaaaacagttatagagtatttgcacgagttcaaccgcctcgcgcactacgctcctgaggacgtgcgcactgatgccgagaggcaggagaagtttttgtcgggtcatgatgatgaattgaccaactagttgatctcccgagattataaggactttcagaagttggtggacaaagctatccgtcaggaggagcagggtaacaaaatgaaccgaaaaaggaaggcatctcagttcagaacttcccaggggaacagttagaagcctcgcttcatgatgggacatcagggtggaccttccaccatgattatccggcagcatcgtccctaccacccgggtagcttcggcaggatctaccatagtggcagtcacggcaacagcgagaagcacagcctcaacctgactccaagtccactaatgtttctagctcagtcagttcagccagctctgcctgctcagtcaaaacagcccaaggagttcgaaggaaagcccgaactctgcttcaattgtaacaaaccgggacacacggttggaaagtgcccaaagccaagacatgctggacccaagtttgtgcaggcccatgtcaatcatgcgtctgcagaggaggcacagtcagcaccagaggtcatattgggcacatttcctgtcaactcgacaccggcagtaatattgtttgattctggtgcaactcattccttcatttccaagcgttttgctggtgcgcatgggttatctttagtgaagctcaagataccaatgcgagttcatactcctggaggtggcatgaccacaactcactactgcccatcagtgactgttgaaatccaagggttgatttttccagccaacctcattcttctcgaatccaaggacctagatgtcatacttagaatggattggttgacaaggcatagaggagtgattgattgcactagccacaccatcaagttgaccaatgcaaaaggagaagtggtaaccttccagtctccagtatcgtagaagcaagggatcagtctgaaccaggctgctggtgaagaacaagaagtagcagtggagaaaaccactaagaagttggaggatattcctatcgacagagagtatccagaggtttttccagatgacctgacaacaatgccacctaaaagggatatcgagttccggatcgacttggcacctggaactgcaccgatccacaagaggccttacagaatgggagccaacgagctggcggaagtcaagaagcaagttgatgaacagttacagaagggatacattcgcccgagcacgttgccttggggtgctccggtcatctttgtggaaaagaaagacaaaaccaagaggatgtgcgttgactaccgcgcactcaatgtggttactgttaagaacaagtaccctttgccaaggattgatgatctgttcgatcagctgaaaggagctactgtgttctctaagatagacctgcgatcaggctatcaccagttgaggatccgcgaagaggatattccaaagacagcattcatcactcggtacggttgttcgaatgcacagttatgtctttcggactcactaatgcacctgctttcttcatgaatttgatgaacaaggtgtttatggaatttctagacaagtttgtcgtggttttcatcgatgacatacttatctactccaagtccgaggaagaacataagcagcatctccggctagtacttgaaaagttaaaagagcaccagctatatgccaagttcagcaagtgtgacttctggcttaaggaagttcagtttctcggtcacatcgtgaatgctcaaggagtagctgtggatccagcaaatgtggagtcagttacgaaatggaccccaccaaggacagtcactcaggttcggagtttcttaagacttgcgggctattaccgccggttcattgagaacttctctaaaattgctaagccaatgacacagctattgaagaaggaagaaaagtttatctggtctgctgaatgcaataggagttttgaagaactcaaaggacggttggtgtctgcaccagtcttaatcctgcctaatcagacgaaagatttccaggtctattgtgatgcatctcgccaagggctaggatgtgtgttgatgtaggatggcaaagtggtttcttatgcttcacggcagttgcgtcctcatgaaggcagctacccgacgcatgatctggaattggccgcagttgttcatgctttaaagatttggcggcactatctcatcggtaaccgttgtgaggtatatacagatcacaaaagtctaaagtacatcttcactcaacctgatttgaatctccgatagcgaagatggttggagctgatcaaggattacgatatgggaatacactaccatcctggcaaggctaatgtggttgcagatgccctgagcaggaagagttactgcaacgtcacatgggtagagcaactatgctgtgaggttcaacgtgatttggaacatctgaaccttggtatagttgagcacggatttgtggttgccctagaggcacagcccacactagtggagcaggttcgcatagctcaagcaagtgatcctgaaatagcagagctcaaaaagaacatgagagttggaaaagcccgaggttttgttgaggatgaataaggaacaattggatgggagaaagattgtgtgtacccgaaaacaaggaattaaaagacttgatactgacagaagctcatcaaactcagtattctattcatcctggcagtaccaagacgtaccaagacctcaaataaaaattatggtgggtcagcatgagaatggaaatagctgaattcgtcgcactctgtgacgtttgccagcgagtaaaggcagaacaccaaaggccagcaggtttgctacagccacttcagattccagaatggaagtgggaagaaatcggaatggatttcattatgggtttgcccaggacgttatcggggcatgattctatttgggtagtcattgatagactcactaaagtggctcacttcattccggtgcatactatctactcagggaagaagttagcagagctttatttggcaagaatcatgtgtctacatggtgtacctaagaagatcgtgtctgatcgaggaagccaattcacctcaaagttctggcagaaattgcaagaagaattgggaacccgtctgaaattcagcacagcgtaccatccacaaactgatggccagactgagcgagtcaatcaaatactagaggatatgttaagagcttgtgcgcttgactttggtggagcatgggacaaaagcttgccgtatgctgagttctcctacaacaacagttaccaggctagtctgcagatggaaccatttgaagcactgtatggacggaagtgtcgtactctgctcttctgggatcagacagaggaacgccagttgtttggtacagaagttttaaatgaagcagaagagaaagttagagctgtcagggaaagtttgagaatcgcgcaatctcgacagaaaagctatgtagacaaccgccgaagagagctcgtttttgaaacaggggattatgtgtatctccgtgtcactccgctcagggagtacatcgcttccaaaccaaaggaaaattggaaccacgctttgtgggaccatacaggatcttggaacgtagaggtgaagttgcttaccagcttgagcttccctccaacatgcttggcatccacaatgtgttccacgtctctcagttgaagaaatgtttgagagttcctgaggaacaggcaagtccggatcaaatcgaaatccaagaagacttgacgtatgtggagaagccgactcgtatcctcgaaaccagcgagagaaggacctgaaacaaagtaatcagattctgcaaggttcagtggagtcatcactcagaagaagaggccacctgggaaagagaagatgagttaaaggccgcccatccgcacctcttcgccagctctttcgaatctcggggtcgagattccgtttaaggggggtaggtttgtcacaccctgaagtttccccccctttcttgctttaaaaattggttaaataaattgcccgaagaaattatcttaattaacctagagctaaatccctaattaataaatgtatttaataatcgaattcgccgtggtggaatttttcttgagttccccatgctccaatacattaacatgatttttgatggattttttagagccttggaaataattttaaccaattaaaattgagcaaatgcaatatttttaatcctaggaaaatgctttgtctctttttcttttcttttccctcctttttctttgttggaccgtcggcccgtccctctcccgcggcccctcctccttgtgggccggcccaagccgcccctccctcctctctcaggacgccgacaggtgggccccacctatcggtcgtctcctacctccggccgttggagccggagctccaaccgccgctgccgctgaaaccgccacgccgccgccgtttcccgccttctccgctccatgtcgtgcctccactccgcgcccacaccttgcgcccacgtcgccgctcctcccccgctcctcccgcccccacgcgcgcctgagagtgggcggggttcaatttgaatccccctctctctcttcctccccactcccccacgtcgccggccaaatcggccaccttcccggccacgtccgccccctcctgcacctataaatcactcccctgagctccctctctcgtctcccccatttgccgccctctctcgagcccctatcgccgccgcgcctagccgctgccgctgcctatctccggccgcgtgccgccgccgctagagccaccgccgcgccgcgcagtcgccgccgtcgcgctcaccgagcccgcccgcacctcggccgccgcttcgttgccgcgaatcaccgccggagctccgattccctcgcgccgccggtgagctcgccatagtttccatctccggccatttctcctcgccgtgccgcggctcctgtcttctccctaaccccttcaccgccttttcccaggtcgcgccactcccgtccgccgttttccgaagcgctgccgccgctcatcccctcccgctccggtcgccgcccctccgatgaggactccctccccctctattctccccttcccacgtgcgccgccgcctttggccgtgccgccgctccggccatccgccgccgcctttcgcgccgtccgccgccgcctccctccgccggtcgtcgccgtcggcagccgcgcgcgccgccgcctctcgccatggccggtcggtcggctttgtgccgagccgagccgtgcctagccgccgcccgtgccgtccgatcggcctcgggccaatccggaccgtcggtcccgtggaccggaggtgaaccacccgcgtggtcccggtcacggtagaccggccaccttgtgccgctgccagtggggcccacttgcccgagccccctctccctccccttgtgcgctgacaagcggggcccacctgtcggcgcagccgcccccccggatgacgtcagccctgggatttattatgcaataaattgattaagaactttttctttattagtaaaaacactgtttatcttctaaacttcataagtaattcatccaaacttcgtttaagtccattcaagtctcagtaaattcataaaaatgcaaactatccactaaaaatggttttgtttcctgtttcagtagtcttatagcatgttttgcttgtgtgctttgtttgtcgcgtagatttcggccgtttcatcgatcagcggtttctcgaagacgttgctgaggtctcatcagtgcgagaggaaggcaagtcatgctttacatttgatcatattgtacccaatttacaaacaccctgcatttctattaaatgttgcactcttttacaatgtcatgtgggatgggtcttattactcagccatatatcgtttaccatatgccattgataactggggtatcaaaatgattagatgttggtttaggaaatgcttagccatgcttagttcaactagtacacaaaaggggatcacattattacatagactctgactatgagcatagttctggattcgtgccaccgcaatggtgttagttaattaaaatacaccgaatggtgggttgtgggtgcatggttttgctggtcgcactcatggcaattaaggaccggttcacgggaaacccttggagacttaccgtgcttaccacaagcaggagtgggtaactgcttgatctgaagtatagctcgaccctttcctaggcaccggtggcgagggtgggcgtgatggagttgggtcggccggggtgtccggttgtccagatgccggattcaccgcggcgcaagaggggatcgcccactgccttttgaggggtgggggtgaaaccttagcgtggtgtggatggttaggggagggttatgtggagggtcttgtcacgatttccccctttgcagtatcatggtgatacttcggggcatggcgacatgtgtgaaaccgtgtcttgtgggtacagttgtacacctctggccagagtaaaagtattcgaatagccgtgcccgcggttatgggcgatcaaccagattcaccgtgattagtctcaccctagtttagcttaatgaactggtgtagttcaggtggttggttgggcctgttgcaacgtggtgtagcgttggacagtgattggttaatattgattaattactacagctgttttactgctttcaactactgcttttaaatgctagttttatgcaaaagaacccctagcctcctttggttatatcctgcatcatacctcctcttccggtatgacttgttgagtatagtgggtagtactcagtcttgctctcttttcccccacacgagagttgaagttcttctcagttcgagccgtcttagagaggttggtttcgtcgctgccgtcaaggattgcctgtggaatggagtcgccccgctgctgaagtcaagcttccgagtttagttcgttttatcttttccgctgcatttgtaaacttttatatttttgtaagacgtggatctgtatgtcaacaattatcgtttgtgtaccttggctggtcctggacagggatttaatgcacattcagcttagaaattctggttcgtgaatttctaggcgtgacagggagccagttgagatctggcaaacggtacggaacctctgaataggcgtaccgtaccttcccatcaaggaagaaaactagctgttggagtgcacactaatgctggtacatgcccacatcaagaagttttaagcaagaaaaagaagaagaaagcatatggaatatgcatctcctcgtatatccatggatactcgcataaagtctcatacaaccaatagaaattggcaatgagacctatcatgggcaatgtctcttttagacaacaaaactcattggcagtcaaccaggagttgaatggaattaatgaactagaagttgaaatgaagaactcaacctgaatgattgataagcattgaagatagaatcaatgaacgcatttcaggagtttggatcgggcacttgcataatagtacatgaagatgtactaggtcccgaaccaacataaaagaatagaataagccagaaaagaattgaaaaaaacaaacacattcgttttgaatttgagtttgatttgaaatatttggccggatccaaatcatgctgacgcttgcaactaaaggcatgcgacagatagaagtctagtacatcagtccaactgcacttagaaatgttcatgatgcatggctttggaatagtcaattatcgccaaaatgggacggaattcctaaacacgagtgtcatagcagcacatgaatacttggctaattgaactaaaccgaactaagcattattgaactgttcagagcctcggcatggttttgagagatggttacgcgcgacatcaatcgcgatttgaaaactatctcaacccccacaatttatgaaagtaaaacagcatatgtcgcacatatgcaatgagttatgtgagaagcaaactcactaagcatatgaacccccaagctcttctatgtacatgaattgcatagaagcgatgaactaagtcatgtggaagtcttgcagattcatctgctaactcattactgacatctttacttgaataggtgtgtccgagaaatcagaataatgagacttagagaaatgcaaaaatcagggggagaatttcgccgactcattttagaatcttgatatggaaaatcaagtacccaaaatcaatctagaaaggttgaacgaagaattgggtggattgtactctttttcccttggataagttttcccagcagtttcttatcaaggtttttaacgaggcaattcgtgcgatattgcaagcgtatgctatgtactctttctccaaatttttcccactgggtttttgtggagttttgacgaggcataggcatcatgcggtgagtgcccaagggggagtgttaagaaaccgatgggcttgggcccatgaaggcccagcccatatacactaattgggcccacaccgaaaccttccatatatggaggaaggctatataagaaggagaggggtgctcatattgtacacttgtgcttgaggatgatagaatgatgaatgagaagagagtctcacccctatatcttgtgtctccacttttgtagaattacgggacccttttggactacttcgtgtagcaagagggttgcgtaataatttcctccctcaaatccgcttgattcaaatggctaattccaaaattgattggggggaattaatcccctttccctcctctctctttcccccttaattcccccttgaatggcgccctccactgcccggaacggccgcgccttcctcggtcgctttccatggccgccggccaccattcccgcctccattccgctctctcccgtggccggctcccaacccgcgcctataaaatggaaccccctccttgtgttctctcatttttgcctcctcctgagtcttcccgaggtccctagccacctccccaccgtcgtcctctctctcccgtgccgccggccgcctgtgccgcctcgcctgtgcaccggccgacatcgccaccacctccctcggctctgcaatgccgcccccttcaccggcctcaccgtcccctcgcccgaattttgccggaacgccgtcgtccccgccgcccctccctcggtctcatcggcacccactccggtagccccttccgccgtgctagtgcgccggccgacgtcgccgtctccaccttcggcatcgcagcggcaaggtcatcctcggcctcgcctcccctccatccgaaccccgctggcgttcgccgtcgtcgtctttatcgttcgtccctgtcgacgtctcctccggttagccgttcctctccatcgtctcatcgtcctgcggcgccgcctctgtcgtcggcatcggagcggcgcatttcatgccgtcctcgccttcatgcagctgctgccggctgccctcgtcgcctcctcgctggccccgatcgttgtcgtcctctcgtcgttcctgctcgtggtgacgttcgtccctccgtcaagccgttcttgtccgtcgtctgtgttccgtcaagtgagccgctgcagccccgtcgtcgtcttcgtcctcggctccgcgtcgtcaagccctgtgccggccgcgtctcgccttcgttcaaggatcgccgccgaagtcgttccctcgccgtcatctccgtcattcccgttcgtctccgccgcccgttcgccgtcgtcgttcccacacctcgttgcgtggtggtaaggatctctccttcgctgctcccgtcctcgttctttcggtgtcgcccatgcccgttgtgcggttgtcgaccccggtacccgtgtaccggtgttggtagtcgttcgtgtgtgcgtgtggtaaccgtgtttgtgtgcctgctcggtagccgcgtggtttccacgtgtgcagcccgcatggtgtctagtggagtccgtttgtcggccactcatctcggttgacacacggggtccgcttccctcgacccgtggaccgtttctgtgtacctggtctgccgtggtcccttaggttgacatgtggggtccgcatgtcaacagcgcagccttcctatcttttccaggttagcacttccacatgttttatagttgcaaaacctaattataataatccgcaaatctccatataacagcattaaatttcggatgaccatgtcttggtcatacgaactccgaatcgatccgttcaagtctcgtaatgtttgttataacctaaagaaccatgtgctttctttttatgtattgttattgcttctttataggcttgtagctttgcttgtgtgcttcgcgtagcttctgtcgttccagaggttcccgaaacgtggttcgcggtcgtcgccaaaggttcggaaggccgttctctttgagcaatgcaagtcacatgatacttgagcatattgaatcccagtttataaaactattttggtttaaattattgcattatcgctttatttaaattcccgcgttatcactgttttatttagccatatctatttacctttgttatgaccttattattattgctattgttattattaccttgttcaccctaggataaacaaaaccccaactagtgggtactctattcatggttccactagtatgaatttagctagatgcttcgctgattaattaggcaacattaggtggttttataactttagactttgggaatgctcatatcatttggacattatggaatgattggcttatgtggaaatggacacaccccttctcctcaattcaaaacccccaaaatggttttaggctaggctcgaggtgcatggttttgatagtagcacctcggccactataaggaccggtcttcgggcctctgttgcaaagcactaccgtacttccacatgtctagtgggtaaggcttagtttgtggctcagtctggtcatgggcaaaagtacacggatagggatggacgaagtcggggctcgatggacttctctaggacaaatgaaggctacatgagctgcggcccggtagtcgagatgtcatggcacagggccggtgtcctgctgcttggggctcaaccttggttacctgtctggggattccggccgtagccagggttgggtcggtactcctgtttatggctaggatgggttgggaactatgtcacgtcttccgtccgtatgccgtggtggtatgttgtgcgtggttacacgtgaggaagacgtgtcttgtgggtaaagatgtacacctctgatcagagtataatctattcgaatagtcgcgccctcggttacgggcaagcctagcaatgtacctaagttagtggtttacttcttaaaacttgattaacaactaaaatgtggaagggttggcctgggttggcttgggacgagctaggacccaggtcgggttgctagttcggtctgaatcatcgtaggccttgggttaaggcaggttcgtgcgggttcacggccttgattaataatattgtgtcgccctaggatcgcctttataaaatagctttgagcaactaagtgacttttaaatgctgtttactgcaaaacttaacccctatattattactccttgtaccctattgcattaatcatacatctcccggtgtgacttgctgagtactgtggttgtactcattcttactctatcttcccctcccttcagtaagagaagctttggagaagaagtcttagttggagtcctggcttatacccagttgagcgcctgtgaagatggagccgtaggcccgctagtccgctgctgtttatttttgtttgttaggcctaaattgcctttgtaataatgtaaatattatcgatataataaagatgtgccttttgtatcatgtttgtgtggtgtaccccggcttttcctgggacggggattaatacactagcgttctggaaaaggtatttttttcgggtgcgacaaccgctgcgttattgctgtagtcgtacctcgaccatctgagtttgcggtgcgagagattactccgacaacaaccttttctcgagtagtccagccatggccggtgctatgaaatatgtcgtcggtcttcgttggcaggttgggcgcgacgactctgtatttttcgagatcgttctcgataatacggtatactcgaccacaacctactcgagtgctcaattgttcctgaaaaatattttctagaaggcaagacatatagcagataatattgagtacgtactcaaaaaactacatggatcttctagcattatcaggatataatgagcatttctaaatatcaggcattatgtaaaccgtaaacaagcatgatttatacggaaggaaatagagcgagcccccagcgttagaccgtagtcgatttaacatcggggacactcgcgtaacagatattgtataaaaaatatgctctaggtaaacataataaattatagatctgataatgctgtatgatctaaattggtacgataaattgcatataaaatattgagtaccttttagatacatgccggatatatctacgaaattagtagattaattagattaattaatctactaattaccttaattagccttggtggccgatctctgttggtgttttcgggtgattaaccaacgtatcatggctctgtacataccaacatatatttattcgcatacgtacaggtgctcgagacgtgtacgtgtactgtatatatatatgtgtatggtcacggtacaatatttactcatgccacgtgacgtcaggctttgtagtcctcgcggttgcccgatcatgtcgcgtgatgcgagattgatccgagctgacgagcagttgatttctccggagtccatcattgtccgctattgaaaatcggattcgatgtagtcatcggttgacctggccgaggcttcccggtgggaaacatcaaaccatcgttatccccggcgacgatatcttgtagctcggtcgatctcgccggatcgacaagttaacggcgctgattccgatcttgtcagggggcatactccggtcaggttagatctccccatagccgaagtcgtcgagtagcttgttgtcggagaatccatcttttaaactcatcttgtcgaaatcttgaagcaccaaaatccccctacctagcgcgccactgtcgacgtttgatgtcgcgattccggtatttgcatggtatggggatcgttggtactaggatatacacgagactgaggtaaaagagacggaggcaaggatttttatacaggttcgggcccctgaattgtcaggtaataaccctacatcctgttggccgaagccgg

SEQ ID NO: 22359 - DNA, 1393 bp, Oryza sativa
aacaccgacacatttcctttcagaaatttgataaatgtaattatgtaattatagtacaatcgtggtataattatattgtaagttaaatataactacaatgtaacttatatgtaactttcaaaaatccctccgtaacatgctatttttgtgaaatggaggtcgtgcaaacgaatcttctcacgtgtggttgttgatgaaaaatctacactcgggctatggtgcgagatctgtgttgatctagtgcagaactaagatgacgaacacaacggcctgggagatctgcttaactttagtgcagatccaaaatattgatgagatgcaggcgtgccagtcagtttgatcatgtaactgacgagctatataaagtgaaaatcaaagagccgatttgctgacaagccgatatagcaacgctagccgatgtcgatagggtattgaggaattggttttatatccattgtagattttgacacttgagtaaataatgatataaagacaatcgaccgatgataatgtaataaaacaataatataatccaatagaaaccaatcggctaataatgatatgatagaatgattgttgatccgatggttaaagcatacatcggctggtattccgatgcccaaacgattagataatcaattaaacatttgttgcaattggctaaaaccaatttgtacgtaatcattttaatctgatgcaacgtctagataacttatcggctgaaaccccgatgaaacccttattggcaatcaagaagcatgtcagagattatggttctaagcatgactatggctgatgcagtgcaaagtatggtaatgtaatgccccgattttcgttcgggattccaaatcatttaataatgcattttctagaaattaaataaaagttaaagcaatttaatcaagtgatataatgggacaatttgaaattttcctttaaaaatcattggccgggaatattttttaatattctttgtgccctaatatactctccggaattttccgtgaattttcggagctcaagaaataattttaatagcacatagatcatttaatcaattagttataaagaaaaccaaataaatctccccatcctccctttcgggctcggcccagttcccccctccttcccaggccggcctcccctccctcggcccgctcggctctccctctccctcaagtatgctttacctcccttgcccgttttcccctccctctctccccgacaggtgggccccgaggccccacctgtcatcttcttcccgaacctcccgtcgccccaactaccgctatggctgccggtttcgccccacgacgccgcgcctcccgcgctccaccccgccccacgagcgcgtgaaatcggttccctacctcgtcctcccccacttcccccg

SEQ ID NO: 22360 - DNA, 15652 bp, Oryza sativa
ccactgtcgacccgagctttaccaccgcctaccgcctgcggccgcctctagtcgccatccccaactacctcaagccgcgccaccgcctctgttagatccaccaccgcgagggtaagcccggccgcccatccctttttcccctccaccaccagaacaacctccccaccacgccaccctaccggccacctttttccgcctccggtcgccgttcgccatcaccccggctgccgccgcgacgcgccggccgcatcgcctctctcgccgcgtcacgctcttccccggccgccgctcgtccgacaccttccaccgccgggagcccctccgtgttgttgacccaaggagcgccgccgcctccctccgccggccgctccctccgtcgccgcgcctctcggtgagaaccgcctcccctccccttctctctttcttcccttcgccggccgccttccgtgcttgcgcgcgtcgcgctgccgccgccggtggctgcccggcccgtgtgccgccgccgctttggtcccggtcgccgccgccgccggtctagtgtgcgcgatggccaggccgcgccgcccggctgtccccagccgtccgatcggccttggctgatcttggccgtcggggggcgtgcctgcgtggccggtcgccgccgtggactcggtccacggtgggccggtacccaccttgtgtcgctgacgtgtggggcccgcccctttgtggatgtggtccgcgcctttcccccttgctgacgtcagcagtccccttttcctttgtaaaaataaataataattacgcaataaattggtattaattccagaaattcatttaaaatggctcaaaacttctaaaattcatatctaattcattcaaactccgaattgagccattcaacttgcaaaattcatctaaaattaagctctacatgtttgtttactttttatgtactgtttccttagtttttattagagtttttcctcgttttgcgtgccagcgtgtagaatctgtcgtttcggaagatcgcggtcgcgaggataagagttcagaagatccaagtgaagaagcaaggcaagtcacacattccccttgagcatgtttatcccaatttataaatgttttaccatttgcaaataaatatgcatgttttgctaattacatgggatccgggtattacctatatgtttgcttgtgccatgtttacttgatatatgtcctttgtcaacattgggtaataaatcgactagctcatgttacttatgtgacctagctagaactatatgcttagccgtgcttaattaccactagctcagttgatgggataattacagtattagacctttttagtatcagaatgagctgcgtgctcgagacatctggccatgcttcatggtcgtaattatccaactgaaatgcgactacatggtgggctgtgggtgcatggttttgctagttgcacccatggcaattaaggaccggttcgcgggaaaccctggaagaatttatcgtgcttaccacaagccagcgtgggcaacggctgggcttgtagtgtagctttcctctagctgatgcatccaggcaagggtgggcgtgatggagtttggatgggccctgcgacggcctatgcggcttccgaattcacctaggcatgagaggggactgcccgctgccttgcgaggagtgggggtgaaacctaaggtgtggtgtgcttggttagagggagttatgcgaagggtcctgtcacggcctctttccagtatgtcgtggtggcatgtcggcgcacggaaacgtgtcgtggggctatgtcttatgggtacagttgtagacctctgatcagagtaaaactatttgaatagccatgcccgcggttatgggcggtcgaccagattcactgtgattagtcccaccttaataaatcgactcaatgcactgtagttcaggtgggttggttgggcctgttagacatggtgtagcgttgatcagtggagatttaatgttactttaattactcaacatttttactgttttgttcaataaaatgttttacaaccgcctttaagcaaataaccacaaaccgtccttgtgttccccttgcatgtctgcatcgttggtgtggcttgctgagtatggtggttgtactcagccttgctattattcccccttttcagaagtgtagtgcttctgagttgaagacgaagttagaagaccaaggctcagaccccagttgagttttgcctgtggagtggactgaagccccgctaggatcgcctttttccgctgctgtcgttctctttcagtgtgaggactaagtgcctcttctgtaagtattttatgctttatttacatttggaactgtatattacttgtcattttgtgtaccctggctggtcctggacagggatttaatacacaaaatagtctagaaatttgggctaaatttctgggcgtgacaggtaagaaacacaatatctagacaatcaagcccttaactgattttcaaggtggtagatatcttaactaatctagattgacagagcaatttagccaatacaggtaaaaccgtagaaaagatctaatcgatacaaataaattgaataattgacttagactaactaacatatatgataaataggtagcaaatatatcaaccgaaccagagtattatcgtgaaatggcggtcgtgggaacgaatcttctcacatgttcatgcgtcgtgactatttttttccttcctcaccggcatgaattttgaaacaaatctaaagattcaagattatacgaaagttacattcaagttagaatataattgtattacgataatcacatatgtcaatttttaagagagaatttattgacaaatatatagcataattgttcaatgttactgcaacaagcttggaaaactcttgcagttgcagatgggctgggctccgcggctgcgactagctcaacaatgaagctgggccctcatccggccttcatctcgatcacgcaaatggatcggaaatttgaccgtcgggtacacgtgcggactccgactcggatccgcactcgtgtctatttatcgagggactgtttacacccaaatttggcacctaagattaaaataggaaagattgcaaaatttggaagtctaccggtttcctccgagtgggccggtctgaccgccgtgtgttgggcggttagaccgccggttcagggccggtcagaccggcggtgtgtggccggtctgaccggtaggtccaagtccgactgtgtttcgtcgggtttcgaggtttccttgctcgggaaggcatgtttcaggtttcctttagtttctaccccgagttggacatggaggaaggcctgtagagggcaagaccaacccctatataagggacatggccggttcattgtaaaaatctaatctacaatcaatcaatcgaatcgtttttcatactgcttttagttttctcttagtttgtccatctttgtcggtttgcgccgtaaaccgtccgccgccgctgcgagagtgcgacatgtcgcgaccgagaaaattgccttttcccgaacgctagtgtattaatccccgtctcaggaaaagccggggtacaccatacaaacatgatataaaagacacatctttattatatcgataatatttacattattacaaaggcacttaaggcctgacaatcaaaaataaacagcagcggactagcgggcctacggctccatcttcacaggcgctcaactggggtataagccaggactccacctaagacttcttctccaaagcttctcttactgaagggggaaaagattgagcaagaatgagtacaaccacagtactcagcaagccacaccggagatgcataattaatgcaagggagtacaaggggataataatataggggttaagttttgcagtaaacagcatttaaaagtcacttagttgcccaaagccattttataaagacgatcctagagctacacagtattattaatcaaggtcgtgaaccctcacgaacctgccttaacccaaggcctacgatgattcagaccgaactggcaacccgaccctgggtcccaactcgtcccaagccaacccaggccaacaattccacattttagttgttgagcaaattttaataattaaaacactaacttgggtacattgctcggcttgcccataaccgagggcgcggctattcgaatagattatactctgatcagaggtgtacatctttacccacaagacacatcttcctcacgtgtaaccacgtgccacataccaccacggtatacggacggaagacgtgacatagttcccaacccatcctagccataaacaagagtaccgacccaaccccacctacggccggaacccccgggacaggcaggcaggattgagccccctagcagcaggacaccagccctgtgccatgacatctcgactaccgggccgcagctcgtgtagccttcatttgtcctagagatgtccatcgacccccgacttcgtccatctccatccgtgtacttttgtttacaaccagactgagccacaaactaagccttacccactagacatgtggaagtacggtagtgctttgcaacagaggcccgagcttaatccttatagtggccggggtgctacttcccacaactggcatgcacccaaaccccaccgaaaaacaggttttaggggctttgaaagaggaagagaggggtatgtccaattccaccataagccaaccattccatagtgtccaaatgatatgagaattcccaaagtctaaagttataaaaaccacctaatgttgtcctatttaatcagcgaagcatctacctaaattcatactagtggaaccatgaatagagtacccactagttggggttttgttttcctagggtgaacaaggtaataataacaatagcaataataataaggtcataacaaaggtaaataggcatggctaaataaaacagtgataacgcaggaatttaaataaagcgataatgcattaatttaaatcaaaataattttataaactgggattcaatatgctcaaggatgatgtgacttgccttgctcggagagaacggccttccgaaccttcggcgacgaccacgaaccacgcttcgggaacctccggaacgacgaaagctacgcgaagcacacaagcaaagctacaagcctataaagaagcaataacaacacataaaaagaaagcacagggttctttaggttatatcaaacattaagagacttgaacgggtcgattcggagctcgcatgaccaagatatgatcatccgaagtttaatgctgttatatggagatttgcggattattataattaagctttgcaactataaaacatgtgtaagcgctagcctggaaaagacaggaaggctgcgccgttgacatgcggaccccacatatcaacctaaaggaccgcggtagaccgggtacacagagacggtccacgggtcgacggaagcggaccgcgtgtgtcaaccgaggcgagtggccgacaaacggagtccactagacaccacacgggctgcacacgtggaaaccacgcggctaccgagcgggcacactaacacggtcaccacacgcacaagcgaacgactaccgacaccggtacacgggtaccggggtcgataaccgcacaacgagcacgggcgacaacgaaaggacgaggacggagcagcaagaggggagaccttaccaccacgcgacgaggcgtgggaacgacaacgacgaacaggcgcggcggagacagacggcgagggaacgacttcggcggcgatccttggacgacggcgagacgcggccggcacgaggcttgacgacgcggaggcgaggacgaagacgatgacgggggctgcagcgaccttgacgaaacaccgaggacggacgagaacagctcgacggagggacgaacgccccgacgaccgggaacgacgagaggacgacgacgacgacgaccggggccggcgaggagacgacgagggcagccggcagcggctacacgaagacgaggacggcgtggaccacgccgctgcgatgccgacgacggaggcggcgccgcgagacgacgagccgggcgaccgatgggacgtcgacgacgagaacgatcggagacgacgatgatggaccgcggaggggtttggatggaggggaagcgaggccaagggcgaccttgccgctgcgatgccggaggtggtggtgccgcggctgaccggtaaacaagcgaggaggaacgggcggccggaggactccggcgaggcgggtggaggggttggtggcgacacggcggcttccggtcgaaaccgaggggtggacgaggtggagggctacgtcaccgtgccgagggaggggacggcagcgccggctgacgcacgggcatggcgaaaggggcagccggaggagatgccgccgaggaggaaggagaagccggcgcgggcgacggtgttctggcgaaattcgggcgaggaggaggtgatgccggggatgagggcggcgtcgcggagccgagggaggtggtggcgacgtcgaccggcgcttaggcagggagatagaggcggctggaggcggccgacgcggaggaaagggaagggcgacggcgggaacgcagctccgggggtctccgcgggaaacggagggcaagccggggaaggggaggcagctgcgatgctggaggaggcgacggcgcgaccggacgacgctccggcgaggagggagaggcggctggaggcggccggcggcacgggagagagaggaggacggcggggagagggctagggaccacgggagatcgcgggagggggctaaaacgatagaacggagcgagggggttgcattttatagcggagggaagcgagccgagcacgggagagggcggaacggcgacgggaatggcggccggcggcaaaggaaggcggccggacttggcgcgtccgttcccggcgattgggggcgccattcaatggggaattaagggggaaagagagaggagggaaaggggattaattccccctaatcaatttgggaatcccatgcttgaatcgcgcggatttgagggaggaatggcgctagggttcacgggagagggagagaggacggccgggcgggaggaggacgatgacccgcctgacgcgtgggccccacgcggccggacgcgcggtcagcgcacgcgcggcgcgcgtgtgcatggccggctcggctcggcctggcttgggcgcggcttgggccgggcggccggcccaggaggagaggagggggaggcggcctgggagaaagagggaggaggagggagtggaccgggaggggaagaggggcccaagaggaggagggagagaaggagagggaggagagggagacttcggccgcgggccgaggggagagagggaggactttgggccagacttggaccaaaggggggagagagattatttttaggttttttttttctttttaataaactctaatatttgtttttgttgcttaataattattttcggtgctctgaaaattccactaaaatttgagggctctttttagaccaaggagaatttaacaaaaattctccgggccacatttgaatttttcttgtacgtattttaatgtttgccaatttcttttcgaattttaattaattctattattccttttagggaatgatttttatttcgggatgaatttatcaggacgtgacacgacatctctttgtaggtttgtcctaaaaacttccgttttgcccacgagacgggtagttatctagaaatcggctccgctagccggtttagttatcaaaacccatctaggtttagctctttgctagatcgaggtggttggcgactctaggatcaccgcaaggcttaaggtgctgcgatcgtgcttgtcaacttgtcaaaaaagatgccaacacgatttttggcgattccactgggaaagagatccgttcatcgtcaactcaacttcgacttcgccatgacgaagccgccatccaagacggaggtggagccatccaatgtgataccggtcacattggaggatttcgaaggagaggaccacaaagttatggaggagtacatcaacgaactcacacgagaggcgttgatgagggcaagcactaggactcgtcaaggggtgatcatcaagcccgggctacttcctaagctcgtccccgatttggtaagcaatgatgaggtaacacaatctatacaacagcaagtagcatctacaatagattcatctatgattgcttttaaagataagttagatgcaacttttgagggtaaatttgatgagtttttaagggttaaattcggtcctcttatggccgattacatgtcaaaggataaagcctctaccactgctaaccaacctcctatagatcaaacgggtagtaaaaccgatggagcggcgcacacggccggtctgaccgggcctgacggccggtcagaccccgacttagccgtcggtccgaccggccaaacggccccggcggtcagaccggtactcaggccggtccgaccgcgcctctggatgccggtcagactgggccctgggccggtcagaccgacgcgattataccgatacagggaatcgatccgatgactaatgctagttatttgtatcatcttaaaacatttgatcctcctgtatctactgctgcaaataatccccagttcccccacatgttcctaatgcttataatgatgttgctagggggtatcctcccgatactagacaaggctaatataatcatattacgccacaaacacaacctattaggccaccaaatccaccgccaaatcaacatgggcctaataatatggaggatataattagtgagattattaggaatagattcgggattgaaactaggaatcgtgctagggtttacaaaaattcgtatcctgattattatgataatgtgccgtttccccgtaattatagagttcccgaatttaccaagtttagtggtgaggatggtaagaccacatgggagcatgtaggtcaatttttggcgcaatgtggtgaggctaatagtgatacttttaaattgggcttgttttctttatctttgtccgataatgcttttacatggtttacttctttatcggcaaattctattcatacttgggctcaattagatgaaaaatttcatgattatttctatactggagaaactgagcttaggttatgtgatttaacatcggttaagcaaaagtataatgagcctgtcattgattatattaagagatttagggatgttagaaaccgatgttatagcttgaatataactgatagagatttggctggtcttgcttttaatggtttaattgctcctcttagagaaagactagatgaccaacaatttcttgatgttagtcaacttatgcaaagagctctggctcaagaaagccgggttaaggataataaaaaacttgttagatcatatgacaaaaagcctaatgtgattgattaccctgaggctagtgatagtgaggaggagggtgatcatgatatatatgttgctgaatggtcatggactaacaaagacaagccttttgtttgctccaacctaatgccgactcctcgcaaagatcggcaaagtgatgttaaatatagttttgatgtggccaagtgtgataagatttttgattatcttttacaagaaagacaaattagattacctaaaggccatgtcataccatctcaagaagagttgaaacgtcgagcatattgtaaatggcatgattctcattctcattctactaatgattgcaatgtgtttcgacgacaggttcaatcggccatagatgaaggacgattgaagttcaccgatggctccaagatgaagcttgatcatgatccttttccggtgaatacaattaatttcaataataaaaaggtgttgattcggccggagcaagccgaatctactaaaggaaaaggagtaatcattggtgaaccaagaccaaagatgatagtgccaaataagccggaggttggtgtttggaaggaaaataagagtgaagcttcaacttctaaagcccctaggaagaccaaagtgacttttgatatgcttttggagaaatatgagaagcaaggtggtgagagaattcgcaacaaaggaaaaagaccaagatcacctcctaggaagcgatttggtcattcaccaagacggtcgcattcacctccatatcatcatccacaagacatgtcatggggttcttatccaatgccgccgccgggttatccttatccttattacatgccatggggggcgacgctgccaatgttcaatcatatgcctccaatgcaattcaaccaagggtggggaggaccgaggaggccaattcatgagcgtttgtcttcaccaaacaatagccggttttatggtaagaatcgggctaatgaagaaaagagggaaggaaagcgcgtcaaggtggaggcaaggacttcagaagtaattaccatcaaagtggggtctcatgatgtgccaataccttttggagatggagttggagtatcctcaaacaaaaaatccgaagccgaaaccagctcctcgcagtcggccggtctgaccaggccttctggccggtctaaccgcaaccatgcgaccggtctgaccgggccatcaggccggtctgaccgccgacccgacagcagtccgaccgacgcctcaggccggtctaaccgtgcgccaagtgtcggtctgaccggcgcgtctggccggtctgaccggtggtctacgtccggtctgaccgggctccagcgccgttttgacaggggaattgcaaagggctatgtgagggcttcatcgtcttcaaacaagattaataggggacattatttacctcctggaacagagtcgaatcctaggtggatgcctaaggatttgacggctactcaaaagagaaggttgcaacgtcttcgggcttaagagataagagagataaagggttcaatgagttgcgaccgccatcggtatggaggcgtaaatccatagagaaggaaaagccggttgttgtagaggagaaggaggagcaatcggttgataaaggtgaatcatatccaaaagaagacatggatatcaacatggtatgtatgttacctatggagttttgtgctatggatgaagccgaggttgctcaattctcattaggtcctaaagacgcggtttttgagaagcccaatgagtcaaaccgtcacatgaagcctctttatctcaaaggcaatgttgatgggaagccggtctctaggatgctagtggatggaggtgccgccgtgaacttgatgccgaactcattattcaagaagttggggcgtgaggatgatgagttgaaaaagaccaacatgattctcaatggcttcaatggtgaaccaacggaggcaaagggtatcttttcggcggagctcaccgtgggaaacaagacgctaccaaccgctttcttcatcgtcgatgtgcaaggtaactacaatgttattttgggtcgttgttggattcatgccaatttttgtgtgccttctaccttgcatcaatgtttaattcaatgggacagcgatgatgttgaaattgttcaaacggatacattagccgaggttgcaatggccgatgctacttttgagtggcgtcatgggaatatccaatgcttatcagttagggatctttctagctatgattttattagtatctccgatggcaaatttgtacctatctctgtaaagcctgctagtgtagcacggctaagccatataaatttgtataatgagtaaggaggctaatttagaatggttacaaaagagggtgcaagaatatcggtctgcaaagaacgatattggtgaaaccgttgaagattttgatgaagtggagaagcttggataagggtttgcatcggccgatccattggaggaagtggacataggtgtggaaccaaaccaaggctgacttttgtaaacaaaaatatgagagccgattataaggttaagataatcgagctacttaaagaatatgttgattgctttgcatgggaatatcatgagatgccgggtcttagccgcgagcttgttgagcatcggcttccaattaaaccaggttttaggccttataagcaaccacctcatcgttttaatcctttgctatatgaccgggtcaaagaggagattgatcggttcttgaaggcggggtttattaggccatgttgttatgcggagtgggtttctaacatagtcccggtggagaagaaggggagtggtaagattagagtttgcatagattttagagatttaaataaagccactcccaaagatgagtatcctatgcctatagccgacatgatgattaatgatgcctcgggtcataaggtgattagctttctagatggtaataccggctacaatcaaatctttatggcggaagaggatatgtacaagacggcttttaggtgcccgggatttgttggtttatttgagtgggttgtcatgacttttgggttgaagaacgccggtgcaacgtatcaaaaggcaatgaatttgatctttcatgatttgctaggtattatcttagagatctatattgatgatattgttgtcaaattggatggtatggaaggacacatagccgatttgagattagcttttgagaggatgcgccggtatggtttgaagatgaacccacttaaatgtgcttttgatgtgtcggcggggaaattcttaggattcatggtgcatgagagaggagttgagattgatcctaagaagatagaaaagatttgtgatttcaaagcgccgacatgcaagaaggaagttcagaagttgctaggtaaggtaaattatttgagaaggtttatttctaacctagcgggtaaaatcgatgcttttgttcctatacttcgcttgaaaaaagaagccgattttacttgggaggcaaaacaacaagaggcgtttgaagagttgaagaggtatttgtctactccacccgttgtgggagcgcctaaagccgaaaagccttttcggttatatattgcctctgaagacaaagtcattggtgccgttttgacgcaagaggaagatggcaaggaatatatcattacatatttgagccgccgtcttttggatgccgaaacgaggtatgtttttatagagagactttgtttatgcttatactatgcttgtaccaaattgaggcattacttgttatctagtacatgcatagttgcttgtcaagccgatgttattaaacacatgttgcaaatgccaattctaagtgggaggattggcaagtgggcatatgctttgatagaatatgatttggcttatgaaccattgaaatctatgaaaggccaaattatatgtgattttatagtggaccatcatgtagatattgcttatgaggaaaaggtttgcttagttgaagttataccttggaaaatttattttgatggttcttcttgcaaagaaggtcaaggcataggggtagttttgttttcacctaatggcatgtgttatgaagcatcggttcgtttagagtattattgtacaaataatcaagctgaatacaatgctttattattcggcttacaagttatggagatggttggagctaagtacgtggaggcttttggtgattcggaattggtggtgcaacaagtcgccggagtctacaaatgcttggacggatcactaaataggtacctcgattcatgtttggatattattgccaattttgttaattttgctattagacatattgctaggcgtgataattccggagcaaatgacttggcacaacaagcatctagctataatgtgaagaagggattatttctgatattagaagaaccggtgcttgtttttaaatctttgtgtgaaattggcaaaactggagatcaggggcggtctgaccggcattgcgtggccggtctgaccggtgaccaagggcggtctgaccggccacatgccgccggtctgactggcgaccccgagcggtatgaccggccctgtgtggtcggtctgactggttctgggcagagcgctggggggcacgtttcaatcaatttagaggccgaatcaattgtgaattcggacatttgtgcccaggaagcagaagaaaattggagaattcctttgattcgatatttgaaagatcccacgcttaaggttgatcggaaaattcggcagcaagcgttcaaatacacattgcttgatgaggatttatatcgccgaaatatagatggtgtcttgttgaaatgcttagatgaagatcaatctaaagtggctatgggagaggtacatgaagggatttgtggaactcatcaatcggcccacaagatgaattggttgcttaggagagcggggttctattggccgaagatgattgatgattgcttcaaatattatagaggatgcgaggcttgtcaatggttcggcaatgtacaattggcgcccgccgccgtgttgaaccctataatcaaaccatgccgttccgaggatgggctttggatttcattggtcaaatttatccttcgtcatcaaggggacataggttcatgctagttgctacggattacttcaccaagcgggccgaagccgtgccgttgaagaatatgactcatacggaggtaattgactttattttgaagcatattatccatagattcggtattccataaacattaactacggatcaaggtgcttcttttatgtctaaggaagtgaaggttttgccgaatcttatggtattaaattgttgagttcttctccttactacgctcaggctaatggacaagccgagtcgagtaataaaatgttgttgaagtaagtgaaaaagaagattgaggaatacccaaagaggtggcatgaggtgctttctgaagcattgtgggcacataggatatctaaacatggtgctactaaagtcactccttttgagttggtttatggtcaagaagccgttttaccggtggaggtaaatcttggttctcttcgttatatcaagcaagatgatttgtcaagtgaagattacaagacattgatgggagacaaccttgatgaagtcatcgacaagcgcttgaaggcattggaagaaatagagaaagagaagaagagggtggccaaggcgtccaacaaaagggtgaaaggaaagttgtttcaagttggagatttggtttggaagacaattttgcctttgggtactcgatccaaggagttcggtaagtggtttcctagttgggagggcccttatcgaatatgcggcattgttcgaggaaatgcatattttttagagacacttcaaggggagcgttttcagcgagcaatcaacgggaaatacttgaagaaatacttcccgagcgtttggcaagacgcttaggaggtactatggctggtaattggattatcgtcctaagaccaaaacatgttctatgcttttagattcacgttgttcatcaaaaagacagggcggcatgtatttacacccaaatttggcacctaagattaaaataggaaagattgccaaaatttggaagtctactggtttcctccgagtgggccggtctaaccgccgtgtgttgggcggttagaccgccggttcagggccggtcagaccggcgttgtgtggccggtctgaccagcaggtccgagtccgactgtgtttcgtcgggtttcga

SEQ ID NO: 22361 - DNA, 14243 bp, Oryza sativa
agcctccctcgccggagcaggtgggatgggcggaaggcgcagtgatctccgcccagtcggcggcggataacatggcgtcctatgtgctggatctcaggaggggcctggccgtgttcgccgggaccgggcgccccgaggaggcggtgctcaggaagaacgtcgcgtgggccgacgcgcgccgcgcggcgcttgctggagaaggagctcaggtgcatggcggcgagagaccaccccgtcattccggagcttgcggcgctgatcaccgccatgcgcgagtccaccaaatcactggtcctgcaggactccggcgatgatgccgtccgtagccgtaaggccgggttgttggacagcgcgatcaagttcgaggacgccgtggtggggaagatgaccgcgttgaaggagaagctcacgcgtggcgccgccgccttcgtgggggaggaggagatcgtgcaggcgctgaacaagcacgccgcgacggccgaggcggagattgcagaatcacaagcgttctctgcggtcctgttagccgatgccaaccgagcagcaattctcgtcgttgtcgtgcacaagaggccggcgccggagacggagacggagacggaggaggaggaggagccgccacgacagaggcgaggcacaggagatgccggagacagtgccgcacaagactagctatagctagattagcaaactctgtgtttcctgtctcgtgccgatcgatcagctgttgatctacatcttgtaaatctaattagtccatgatcgatctgattttgttaatctacatgtaatatcagaccaatatacaggttgtgtcgtatgcatatactagttagtcatactccgtttttccctatactagtgcagggatgtatcgcactggtataggtagaatccttgagaagagtaacgcggacgaacaaagacgatcgatcgaacagagcaaaaattcaggcacccctgtaaaaagctactaccactagtcagatttgaaaaaaatatcgggggccgggcctgggccgtgccgcccatttggccatctatatacctacatatttgtcgacatatttgtaaggaaaaattatttgatatttcatttcatagatgaatggtagtaattcatctaagttgtctctcaacgatgagaattagaatctaaatatttctcgaatatttgacttagaatactactattactttgtggatatagaaaccggagaaggagaagaagctagctcaggtgcttggcggctagagaccaccctgtcaatccggaggttgcggagctgatcatgcgcaaggtcaccatcaatcctgtcggatttggtgagaaatccgtgtgttcttgagtgtttgagtgagataaaagttaggttgctaataatttggtatcagatccttgttggaactttttattctctccatcgctctcttgatctgcggtaaaactcatggaagaggtaggaattgttgcttcggtgatggattccacagaagcttcggctccctcgactaggttcatgagattcaaagcacgatttcaaccacaacatactaagccccgatacgtgaccaagcagggggccaagatcatggaccaggacagcaagatggaggcgtccgataagaagcaggaagagagcgagaagtggagggagcaatcagaagagagagtagggcagagttcctgactctccaggtgaaagtagaatcaaggatttgtgaggtgtagaagcatgatgatctcatgcaggatttggtggaagaattgcaagagaaagtgggaagttgctaaccatggttcagaattcatctcatgagactcttcctgcgcatgcacgagtcctacaacaaaattactacaataaaaaagtgctacttatacaattttagtagttagaaaataaatattattcttttgatttatatttaaaactaaattttgttgtaaacaatatcttgtataacaaactcataaatataatagtctcataattattattcaataatcaatcagaattttcgttttagatttattttgttggtctcgtgtcgatcaactgtttgatctagatatggtagatcaatcgagctaattattcgattcgattattaatgggaccacctatacatttgtcgacacatttccttttagaaatttgataaatgtaattatgtaattatagtacaatcgtgatataattacattgtaagttaaatataactacaatgtaactttgtaacttatatgtaactttcaaaaatccctccgtaacatgctatttttgtgaaatagaggtcgtgcaaacgaatcttctcacgtgtggttgttgatgaaaaatctacgctcgggctatggtgcgagatctgtgttgatctagtgcagaactaagacgacgaacgcaacggcctagcagatctgcttagctctagtgcagatccaaaatattgatgagatgcgggcgtgccagtcagtttgatcatgtaactaacaagctatataaagtgaaaatcaaaaagtcgattggcttacaagccgatatagctgtttgacgtattttgtcaattttcaccaagcaaataagattactattcagcttctaagctagcttgattgttggatttttatgagatgcatgcatgcatgggccatgcagtactgtgcacgtgttaactggtgcatacgtatatatatactcgtatctagccaaccatatggctcatatgcatgaatgaattggccaacaggagagatgagctgctctgtgactcatgggctcgcgcgctcgtggccgtatactcggcgtatacgtatacgtataccggacggttttccataggcttaaaaagcagcgagctgggacgtattaatagttgggctgcatatgggctggcggagctgcactacatgctcgtcgtgaacatgcggctagatatctaacgcgtacgcggcaggcgaaatttctctccaacggcagcgagatacggatgtggaactgacaacgtcggataactcaagtcttatctgatgatttcggataaggagttatccgcggcaactgtacccggaaatatcggagcgatcacgcgtggtcgcggcatgcgcgcctgctcgttaggttttcctccgcgcctatataaagccaccaagagacggcgccaggggatggacaatcattcaactcccatcgatccatccatcggcggcggccgcgtagaacacataggcgaccacgtactcaggcatcgctatagcacaagccttgttgacgtgacttcgccggagcagaagcggtgcacgccgcccgcgctcggcagcggcgtctggcaggaggacgtgcatctgaccatcagccatcacgggaagaaagccgaggtcgatggctgtccgaggtaagagcgctaattagattgtttcttcttatattttgcagcacatgcatgcacgggcagatggagaaccacaacggagaagaagcagatccatctacacacatgaagaacacacacaagagaaaacatgtacagggcctcggcggaagggcacgccaacgtgtgcgccgccggccggcggcagcatggcgcaccaaaagtgtggcccgccgggcgtcgttcgatgctgaaaatcaatcgatcaacacacatccatctatcgactcccatccggcgccgtcaacacatccatccaacaattctcatcggtgatccatccagcgccgacacgcaccggcggcagcgagcgacttcggccggagctccggcgtctggcaggagagggcacgcgcggtgacccgatcatcggcaagcacaggagggagtacttcgacgaggaagaaggaacttgatggctaccaaggtagaagctagcaagatcgtttcgtttttctttcatctacagcatgcacacatccatctacacatatggtcgccgccggtgaaagttgcggtggccgattcatctacacgcgatagaagcctcatcgatgccggcgcccatccgagtcgacaagatgtctggacccgacgccgccaatttaagccgctggtggtgcatctactagaagccgcgacgtcgccaaggtgccagacgtcctcgctttgctgcaagtttcaccgtgccggagcagactgactatgtcgaagtcatcgtgacgccgcgccctgctggagcacgtcgaagatcgccggagaaggtcgtcgtgaagttattccgtcggagcacgccgaagatcgccggagctaccgccgactgccatgacttctccccgcttttatgccggaggtcaagcatcacgtacgtagggcgtcgaaaccagcagatgacaacgaaggcaagtgtggctgcagcacaggagggaggatgacgagctgaaactagcagatgcatgctaattaagctaattattgtggtaacgtggccgaccaaccggagggtggcacatcatcaccatgctacagttgcacaagaagtcgtcaacgcgacggctaaagtaaacaaatcctgttgatttcaagctttctcaattagatgccgagctgtgattaaatccggctgccgtctacatcgtccacctcgttgccgatgctctaacgctcgccatccctgctcaagctaccggtgatgctgtctaccggataccgccatgtcgtcgagatgcgccgatgcccccatctcgccaactgcggcttctcttctgtaatgcgcgccgtaccctcgccggcgatcgcaggagcagccacgagtgtcgcccgagctgtttctgatccaggagacggtggcagtcgctgggatgttgctcaaggagccgtcgacatgccaccctgctgtgacgcactgaaggtccccggagcagtcgcggataccgtcgaggtgcccgtacgccgttcgtcaagtctggctgtgattctttcacttcatcacgccggagttgccatgtcaaccgatctgttggcgctgatcgcaagcgtctgtcaagctcgatgccactcgtcctcaggactgatgccatctgttcgagctgccggtgatgattctactcgttgcgatctcgccgagatattaaacgtcgtcgccttttgccgaccgctgcctcgcaacaccgtcaatatctacccaccctcgccgccgttgcaatcttggtgcccacacgctgtcgtcaagcccggccatgattctttctcgtcatcaggctgaggtcgtcgtgccgtctatccacgacgctttcacttcatcacgctggagtcgttcgtgatgtcacaagacaatcacgccggagcaccactgctcggtgcccgtaaaccatcgtcaagccggagccgttgtattgtccgtctgtgatgcctttacctcgtcaagtcggagttgccgtgttgtctatccatgacatctccttctcttcacaccacatgataagatgtcatctgtctacgatgctttcacttcatcacgccaagatgagagctgtccgtccgtgatgctctccccttttcgtcaagattgatgcctcttgtccgtatattggagcgtcgctcgtctacatcgacataatgcaagaatggtgccgtctgtgatgccaaggaactattcatgctgaatctacaccaacaataccctcggttgttccgccgatgagatattcacttcttccaaggtcgtcgtcgctaccgacgctctcatggagccccttttatgggctcgtcatcatatcaactgaatcaatagtagatccattatccgaaggaggtgccagagccccgttcatccggctgttgtctgcaccaacttcttcatcaacctcttcgttacatgtccttgttgtataaggagcttgacgagccaggaggtgcccaaccatgtgtaatccggctgccgtctacaccaactgtatacgtcattttattttcatctagccaggaagtacccagccatggatatgcatgcggctgtcgtctacaccaactgtcttcgtcaattcttcgttcgtttgatctcgacgagccaggaggtgtccagccacgtatattcggctgttgtgtacactgacttcaccaacttctcttccctttaacaccatcccgacaccactattgtgacgtctcaaccgtccaagctatggagatccatgcatgctgaagattaaccatctacaccaccacgttgctcaagactgatgaggcggagtgaaagggcgggcggagtctatatgaaggctacgtcaccaacaccggcgcacggaccgacgaggccgtggataagttgccggctatcacgccctgaagtttcccccttcttctttcttaaaaatttgttgaataaatcgttcgaagaaaatggtttaatttaacctagagttgaatcctaaattaataaatgcaattaataattggaattggcatgatgggatttttcttgagttccacatgtcacaatatattaacaggatttttaatggaattttcagagccttagaaataattttaaccaattaaaaatgagcaagtgcaatattttaaatcccaggaaaatccttttcctttgtctcttttcttttcctttctttttctcttgatgggccatcggcccagtccacctaacctcaccccgcgctcgggctccccttgttgggccggcccatttccccttccctctccctccgggacgctgacaggtgggccccacctgtcggggtcgtccccttcctccaaccgccgccgccgaaaccgccgcgcccacctcctccactcctcccgcgcccactccgcgtccacgtacgcccgcacccacgtcgtcgcccacgccccgctttcccgaccgcgcgcgctcgcacggggcgggattcaaatttgaatcccccccctctatctccccactcccccacatcgccggccaaatcaaccaccctcccggccacgtccgcccctcccgtgcctataaaattgctccccgcgtccccctctctcgtttttcgctctcgccgcgctcccccgtgcctcctaccgtcgctgcgccgcgctcgccaagcttcgccgccgccgaagctctccggccgcgtgccgtcgctactacagccgccgccacatcgcgtaaccgccgccgttagcttcaccgccgcgagagctacatcggccaccgctcacttgccgtgccccatcaccgtaccgctctccccacacgccgccgccgctagagccgtcgccgcgcctccgctcgccagtcgtcgctgccgccttcttccttcgcgccggccgccgtgctcgccggtgaggaatcccctctcctcctttctttcctctctcccatgagcgccgccgccctttgcgcatgcgtcgtcatctttggccgcgccgccgctccggccgtccgccgccgcctttcgcaccgtccgccgccgcttccctccgccggtcgccgtcgctccccatggccggccggccggctttgtgccaagccgagccgtgcctagccgccacccgcgccgtccgatcggcctcgggccgattcggaccgtcggtcccgtggaccggcggtggaccacccgcgtggtcccggtccatggtagaccggcctccctttgtgccgctgacatgagggccctgcttgccggcgccaccccccgccttcgctgacgtcagccctgggcaatattgcgcaataaataattaaggactttttccttgttagtaaaaacacatattatcttctaaaattcatacctaattcatcttagctccatttaagtccattcaagtctcagtaaattcataaaaatccctagaatccattcaaaatggttttgttctctgtttcagcagtcttatagcatgttttgcttgtgtgctttgtttgtcgcgtagatttcggccgtttcgtcgatccgcggttcctcgaagacgttgctgtggtctcaccagtgcgagagcaaggcaagtcatgctttacatttgatcatattgtacccaatttacaaatatccctcatttctattaaatgttgcactcttttacaatgtcatgtgggatgggtcctactactcagccatagattgtttaccatatgccattgataacttgggtatcaaaatgattagatgttgatttagaaaatgcttagccatgcctagttcaactagtacacaagtggggattacattattacatagactttgtctatcagcatagttttggattggtgccaccgcaatggtgttagttaattaaaatacactgaatggtgggttgtgggtgcatggtttcgctggtcgcacccatggcaggtaaggaccggttcacgggaaaccctaggagactaaccgtgcttaccataaataggagtgggtaactgcttgatctgaagtatagctcgaccctttcctaggcaccggtggcgagggagggcgtgatggagttgggtcggccggggtgtccggttgtccagctgccggattcaccacggcgcaataggggaccgcccattgccttttgaggggtgggggtgaaaccttagcgtggtgtggatggttaggggagggttatgcggagggtcttgtcacgatttccccctttgcagtatcatggtgatacttcggggcatggcgacatgtgtaggatcgtgtcttgtgggtacagttgtacacctctggccagagtaaaactattcgaatagtcgtgcccgcggttatgggcgatcaaccagattcatcgtgattagtctcacccctagtttagcttaatgaactggtgtagttcaggtggttggttgggcctgttgcaacgtggtgtagcgttggacagtgattggttaatattgattaattactacagctcttttactgctttcaactactgcttttaaatgctagcttgatgcaaaagaacccctagcctcctttggttatatcctgcatcatacctcctcttccggtatgacttgctgagtacagtgggtagtactcagtcttgctctcttttcccccacaccagagctgaagatcctcctagttggagctgtcttgttgaggttggtttcgtcgctgccgtcaagggatgcctgtggagtggagtcgccccgctgctgaagtcaagctccccagttagcttgttttatcttttccgctgcatttgtaatcttttatatttttgtaagacgtggatctgtatgtcaacaattgttgtttgtgtaccctggctggtcctggaccgggatttaatgcacattcagcttagaaattctggttcgtgaatttctgggtgtgacaagttggtattagagccgaccttgaccgtaggacaagccaactggaaacctaagagccctttgatccccttttcatctgcatatgctctttgcacttggatttgtttcggaaaaaatttggtgttttgcctctttggtttgtgggaaaaatcttggtcgttcattcggatcggatctttaaaattagcttagtctagggttttagtaaaattttatttggagtttattcgtcagtcagtcgggaaactattgggtgatatgcatttggtcgtgtctatgttcgatagggcaattttatgcgcatcattatagctatgcatctattttatgcattaatttattgtttagtcagttgcattagtgtctttatctaggttcatgaaaaatgttctatgcataaaaaaatcatcaggctcggttatttatttgagtcatttgttgctttgtctaatttggacttgagcattaattggttcttatcccttgtctactttagatgtcagtcttatccctcgattgcaagcgccgctccgagcttcagagtcgctgtccttagctttatcgtcttcttagttttgtttgcttgctagtttccgtgtttaggtttcttgcttgtgggttagtcggcggtcgatatcatgtgtcagtggtatggttgtcttaattaggagttgtttcctttcttttcggtgttttaatcaagattaagataattgcacttaagtttataagaaagattagtttctaagccatctgtttttctccctttctcttatttctacatatcccccttcagatggtgaagacaaggaatggttctcaatccaacaaggtcagtggcagtgaagagcagatcaatggaccacgtgccagcggtgcatctgatagcagttcatctccaccactcgagaaccctacgattgctcaggtgttggacaatcagactcagatgataacaatgatgatgcaacagatgcaacaacagtaccatcaggtgttgcagcaggtgcagcagcaagcacagcagcagcagcagaacctgtagtttggtcctccacctccttagtccaaactgttagaatttctccgtgtcaagccgcccactttctcaagtaccaccaacccaatcgaggccaatgactggcttcgtgctattgagaagaagctgaaccttttgcaatgcaacgaccaagagaaggttgcttttgctacacaccagctgcaactgcaaggtcccgcttctgtttggtgggacaactacatggtgacccgtccagctgggacagaggttacttggatagagttttgtcagagttttaataaggcacaggttcccgagggaattgtggcacaaaagaagagagagttccgttctttgcagcaaggaaccagaacagttatagagtatctacacgagttcaaccgtctcacgcgctatgcccctgaggacgtgcgcactgatgccgagaggcaggagaagtttttgtcgggtcttgatgatgaattgaccaaccagttgatctcccaacattatgaggactttcagaagttggtggacaaagccatccgtcaggaagagcagtgcaacaaaatgaaccgtaaaaggaaggcagttcagttcaggacttcccaggggattagtcagaagcctcgcctcacgatgggacatcagggtggaccttccaccatgattatccagcagcaccgtccctaccacccgggtagcttcgacaagaactaccatagtggcagtcacaacaacagtgagcagcacagcctcaatccgactccaagttcactaatgaatgtagctcagtcagctctaccagctcagccagaacagcccaagaagtttggagaaaagcctgacctctgcttcaattgtaacgagcccggacacatggttggtaagtgcccgaagccaagacgtgccggactcaagttcgttcaggcccatgtcaatcatgcatctgcagaggaggcacagtcagcaccagaggttatattgggcacatttcccgtcaactcgacaccggcagtaatattgtttgattctggtgcaactcattccttcatttccaagcgttttgctggtgcgcatgggttatctttagtgaagcttaagatacctatgcgagttcatactcctggaggtggcatgaccacaactcactattgcccatcagtaacagttgaaattcaagggttgatttttccagccaacctcattcttctcgaatccaaggatctagatgttattcttggaatggattggttgacaaggcacagagtgattgattgcactagccacaccatcaagttgaccaatgcgaaaggagaagtggtaaccttccagtctccagtattgcagaagccagggatcagtttaaaccaggctgctggtgaggaacaagaggtagcagtggagaaaaccactaagaagttggaagatattcccatagtcagagagtatccagaggtttttccggataatctgacaacaatgccaccaaaaagggatatcgagttccggatcgacttggcacctggaactgcaccgatccacaagaggccttacagaatgggagccaacgagttggcggaagtcaagaagcaagttgatgaacagttacagaagggatacattcgcccgagcacgttgccttggggtgctccggtaatctttgtggaaaagaaagacaaaaccaagaggatgtgcgttaactagtacgcactcaatgaggtcactattaagaacaagtaccctttgtcaaggattgatgatctgtttgatcagttgaaaggagctacagtgttccctaagatggacctgcgatcaggctatcaccagttgaggatccgtgaagaggatattccaaagactgcattcatcacttgttatgggttgttcgaatgtacagttatgtctttcggactcaccaacgaacctgccttcttcatgaatttgatgaacaaggtgtttatggaatttctagacaagtttgtcgtggttttcatcgatgacatactgatttactccaagtccgaggaagaacatgagcagcatcttcggttggtacttgaaaagttaaaagagcaccagctatatgccaagttcagcaagtgtgacttctggcttaaggaagttcagtttctcggtcacatcgtgaatgctcaaggagtagctgtggatccagcaaatgtggagtcagttaccaagtggaccccaccgaggacagtcactcaggttcggagtttctttggacttgcgggctattaccgccagttcattgagaagttctctaaaattgcaaagccaatgacacagctattgaagaagaaagaaaagtttatctggtctgctgaatgcaataggagttttgaagaactcaaacgacggttggtgtctgcaccagttttaattctgcctgatcagacgaaagatttccaggtttattgtgatgtatctcgctaggggttagggtgtgtgtttatgcaagatggcaaagtggttgcttatgcatcacgtcagttgcgtcctcatgaaggcaactacccgacccacgatctggaattggccgcagttgttcatgctttaaagatctggcggcactatttcatcggtaaccgttgtgaggtatatacagatcacaaaagtctaaagtacatcttcactcaacctgatttgaatctccgacagcgaagatggttggagctaatcaaggattatgatatgggaatacactatcatgccggcaaggctaatgtggtagcagacgccttaagcaggaagagttactgcaatgttgcatgggtagagaaactgtgttgtgaggttaaacgtgatttggaacatctgaaccttagtatagttgagcacggattcgtggctgccctagaggcacagcccacattggtggagcaggttcgcatagctcatgcaagtgatcctgaaatagcagagctcaaaaagaacatgagagttggaaaagcccgaggttttgatgaggacgaacaaggaacaatctggatgggagaaagattgtgtgtacctggatgggagaaagattgtgtgtacctgaaaacaaggagttaaaagacctgatactgacagaagctcatcaaactcagtattcaattcatcccgacagtactaaaatgtaccaagacctcaaggaaaaactctagtgggtaagcatgagaagggaaatagctgaattcgtcgcactctgtgacgtctgccagcgagtaaatgcagagcaccaaaggccagcaggtttgctacagccacttcagattccaaaatggaaatgggaagaaattggaatggatttcattaccggtttgcctaggacatcatcggggcacgattctatttgggtagtcgttgaccgactctccaaagtggctcacttcattccgatgcacactacctactcagggaagaaattagcagaactttatctggcaagaatcatgtatctacatggtgtacctaagaagatcgtgtctgatcgaggaagccaattcacttcaaagctctggcagaaattgcaagaagaattgggaacccgtttgaacttcagcacagcctaccatccgcagactgatggtcagaccgagcaagtcaaccaaatattggaagatatgttaagagcttgtgcgcttgattttgatggagcatgagacaaaagcttgccgtatgccgagttctcctacaacaacagttaccatgctagtctgcaaatggcaccatttgaagcactgtatgaacggaggtgccgcactccgctcttctgggatcagacaggggaacgccagttgtttggtacataagttttaaatgaggcagaagagaaagtcagagctgtcagcgaaagattgagaatcgcgcaatctcgacagaaaagctatgcagacaatcgtcgaagggagctcgctttcgaagcaggggactatgtgtatcttcgtgtcactccgctcagaggag

SEQ ID NO: 22362 - DNA, 10706 bp, Oryza sativa
aaggggggtaggtttgtcaccccatgaagtttcccccttcttctttcttaaaaatttgttgaataaatcgtccgaagaaaatggtttaatttacccaagagttgaatcctaaattaataaatgcaattaataattggaattggcatggtgggatttttcttgagatccacatgtcacaatatattaacaggatttttagtggaatttttagagtcttggaaataattttaatcaattaaaaatgagcaagtgcaatattttaaatcccaggaaaatccttttccttttttctcttttcttttcctttctttttctcttgatgggccgttggaccagtccacctcgcctcaccctgcgctcgggctcccctcgttgggccggcccgtttccccttccctctcccttcgggacgccgacaggtgggccccacctgtcggggtcgtccccttcctccaaccgccgccgccgaaaccgccgcgcccacctcctccgctcctcccacgcccactccgcgtccacatgcgcccgtgcccacgtcgtcgcccacgccccgctttcccgcccgcgcgcgcgctcgcaagggacgggattcgaatttgaatcccccctctctctctccccactcccccacgtcgcgggccaaatcgaccaccctcccgaccacgtccgcccgtcccgtgcctataaaattgctcctcgcgtccccctctctcgtttttcgctctcgccgcgctccccagtgcctcctaccgtcgccgcgccgcgcttgccaagctccgccgccgccgaagctctctggccgcgtgccgtcactgctacagtcgccgccacatcgcgtaaccgccgctgttagcttcgccgccgtgagagctacatcggccaccgctcacttgccgtacgccatcgttgtaccaccctccccacgcgccgccgccgctagagccatcccgcgcctccgctcgccggtgaggaatcccctctcctcctttgtttcctctctcccatgagcgccgccgccttcgcacgtgcgtcgtcgtcttcggccgcaccgccgctccggccgtccgccgccgcctccctccgccggtcgccgccgtcagcagccgcgcgcaccgccgccgctccccatggccggccggccggctttgtgccaagctgagctgtgcctagccgccaccaacgccgtccgatcggcctcgggccgatccggaccgtcggtcttgtggatcggcggtggaccacccgtgtggtcccggtccacggtagaccggcctccctttgtaccgctgacatgcgggccccacttgtcggcggccgcccccctccccttcgctgacgtcagccctgggcaatattgcgcaataaataattaaggactttttcgttattagtaaaaacacagattatcttgtaatattcatatataagtcatccgagctccgtttaagtccattcaagtctcagtaaattcataaaaatccctagaatccattaaaaatggttttgttctctgtttcagtagtcttatagcatgttttgcgtgtgtgctttgtttgtcgtgtagattttggccgttttgtcgatccgcggttcctcgaatacgttggtttggtctcaccagtgcgagagcaaggcaagtcatgctttacatttgatcatattgtacccgatttacgtatatcccgcatttctattaaatgttgcactcttttcaatgtcatgtgggatgggtattactactcagccatagattgtttaccatatgccattgataccttgggtatcaaaatgattagatgttgatttagaaaatggttagccatgcctagttcaactagtacacaagtggggattacattattacatagactttgattatcagcatagttttggattggtgccaccgcaatggtgttagttaattaaaatacaccgaatggtgggttgtgggtgcatggttttgctggtcgcactcatggcaattaaggaccgcttcacgggaaaccctgggagacttaccgtgcttaccacaagcgggagtgggtaactgcttgatctgaagtatagctcgaccctttcttaggcacgggtggcgagggtgggcgtgatggagttgggttggccggtttgtccggttgtccagctaccggattcactgcggcgcaagaggggaccgcccactgttttttgaggagtgggggtgaaaccttagcgtggtgtggatggttaggggagggttatgtggagggtcttgtcacgatttccccctttgcagtatcatggtgatacttcggggcatggcgacatgtgtggaatcgtgtcttgtgggtacagttgtacacctctggccagagtaaaactattcgaatagccgtgcccgcggttatgggcgatcaaccagattcaccgtgattagtctcaccctagtttagcttaataaactggtgtagttcaggtggttggttgggcctgttgcaacgtggtgtagcgttggacagtgattggttaatattgattaattactacaattgttttactactttcaactactgcttttaaatgcctgccttatgcaaatgaacctttagcctcctttgcttatatcctgcatcatacctcctcttccagtatgacttgctgagtacagtgggtagtactcagtcttgctctctttttccccacaccagagttgaagttcttcccagttggagctgtctcagaaagtttggttttgtcgctgccgtgaaggattgcctgtggagtagagtcgccccgctgctgaagtcaagcttccaagtttagctcgcttttatcttttccgctgcatttgtaatcttttatatttttgtaagacgtggatctgtatgtcaacaattgtcgtttgtgtaccctggctggtcctggacaggggtttaatactcattcagcttagaaattgtcacgcccggaatttctatccaaaattccaaacgcttacatgtgtgtgaaccctcgtccaggaatcaaccgaggcacacaataacaaattgataatagagtacaattattactctaattaataagcgaataaaatgtcattacagaggtagatagttcctctcaaccaataaagatctaagcagcggaaaaataagataaacggcgcagacgactccactccataggcagcttgaccagggctacacctaatcctgcacaccatcagcatcactgtagaactcctcctctgatgaatgattgcaaggtgagtatatgacatactcagcaagccacgcagcaaatatgcaagtgcacaggataacaaaggatggcatagtatggtttcatttgcataaatagcatttaataaacatttcagaatttaataaaacagttaagtaataattgaacaatattaatccaacgctatacaacataccctgttgcataggcccaaccattctgaacaaccatcccggctgcacagttctatctccaaaccaggaatgtaccattccaaacaaggagctaatcaaattattaccagttatagcatcttttattatgatgagaagtgtgaaactaatcacgaaagacattgttagacccgcccataaccgcgggcacagctattcgaatagttttactctggccagaggtgtaccactgtacccacaagacacagccccacaacatgtcaccatgtgcctcaataccaccacggtacctcggaaaggagctgtgacagtacccctcgcacaacacaatccaccacagcgcaccgttcctggatcataatcacccccttataaacaaggcatggactccccagcgacccccgtgggcttatctccaccacttctcagtctggtgccccgcaatgaaccatgttatacaaaaggtaaagccgttgcccatgctagcttgtgattggcacggttaatgtttcacaaccgaaactcgtgaaccggttcttaattgtcatgagcacgaccatcaaaaccatatgctcacaacccaccattatcaagttttagttggcaaattaattaattaaccaatcacgatcaaccatcgtgagcttccattaagccatcattaaataatagtgagtcacaaattatcccaatagtgtgctaatgtttctaagcatggctaagcaatcatatttaatatctagttgaaccaatatataaagctcaactagtcaagttataataacccaaggtatcaaggaataaagtaatcaagaacaaaagggctataacaaacaataggttaattccacccaatgacattcgaaaataaatgcaatagttgaatagaaacaatagctttaaacgggatcaacatgctcaaagggttgtttgggatctgtgtgacttgccttgctggccttggaactcttcaaaatcttctcctgcaaactcagactctccggaaacgtcggaatctaaacagaaaagagcaaaaacaccaaaacagcacataaacaagcatgaacagtacatgtggatatttttaacatgtagatctcaattttagaaaaatttagagacttgaaccaactaaatccgagctaagatgaattagttatgaattttcaaagattaaatcggattaaaacacttatatggattttaattgaattatgacgcaataatgaattatttttgaaaaggaaaagggaattattgcgtcagcggctagggttcgcggtggactgggtgcacggcggcggttcacgagattgggcggccgagatcgatccatccaaaacggacggccaagatccatcggtccaccgcggctcacggatggacgatgacgatgacgccagcgacgacgtcaccaccggcggcggctcgggcgcgcatgctcgccggcgaaccacggcgcgatgacgcgaacggaggacaccaacacgtagcgggcgacgcggcgaactcaccggtgaccaaagcgacggcggacgatgaccggacgacgtcggcgacgaggaaaaggcggcggcactcttcggcttgacgacggcgacggtgttccggcggtcgacagcgacggctgaggggcggacaaggacggcgacgtgacggcgaccacgatgacgacctccccgagcgacggcgacgactggagcgacggcggcgcacggctggagcggcggcgacgacggcggcgcgaggtctcacggggctagggcgctacaaacgacgagagacgaaggcaagggtggcgacgggtagcggcgggcttggaggtccttttataggggttggaaggcggcggcgaaggtccacggtggccggcgacgagaaggaaagattagggttcggggagagagatgaatccaattcgagatcgaatccacagatttccaaacgaaattagccgacgattccataagagaaaagatagaggggatcccggggatcatttcccctctattaatttcaccggaaacggaaaggggcggctggatttggaaggagacgacggcggcgcggcgctagggttcgggcggcggccggccggaggtagacgacaggcctgacaggcgggccccattgtcagcggcagcgagcgcgtgcgcgggcggctcggcttgacttgggccgacttgggccgaagaggagagagagagggaaggttttgggccgacgccaaaagagaacttttaaaaccttttccaatttaaattattcatgaaatgcaattccatttattaaaaatacttccttagctcaaataaatcccagaaaaatctaggaattatagaattaagcaaagtatttaatgaaattttatctggccctattttacattggaatttattaattaaaactagatcttctcttctaggcttttaaaataaattctaataattccaataataattccaatttagacaacaatttatatatttgggatttttagggtgtgacagaaattctggtttgtgaatttctgggcgtgacacacactgacagggtgggggtacacagtcgccgtcccatcggtcattcaaccggtcacagaccggtcagatgcgcagcacgccgtattaaatgcggcatggcgcggttgcatagaccgctttaaatgcagttaggtgggcgttaggcacgcccacctaaccctgtacattgggctaatacgtggagggggtcggagcagctcgaccccacgcgagggcggcctcctccctctagctgggatggggcagtcgccgcgccaccccgggctcgacccccctcggggggagccacgtgggtttgggggcggcccgaccccaagctgggagggggcagccgccgcaacaccctgggctcgacccccctcgaggagagccacgtgggtttgagggcggcctccaacctctagctgggagggggtagctgccgcgccaccccgggctcaaccccactcggggggagccacgtgagtttgggggcagcctcctccctctagacgtgatatccctgggcccatatcgccgacagtagcccccagtgttagccctgaccaaaaccttcccctagtggccagggttgacgccactctcctagtctaacaatgtgggcccggtctcttctccattctttgctagcattagggcccatgcgcctttttcgccccaacttgagggcgactcgccggcccgtaccttaggttgtgaacttattttctgtatatattcaacaaacattgttagattctctcgggcccatgacttcatgcggcgcacctcgcctgcccctgccttttgttaacctctgttcatgttctacttcatctattcaaacgatgttttcgcatgagtgtgaggactgaactttccatagccagcaatccccacccgcgatcaagccaagctgggtgccatagccagccggcggggccaaagccagctgctacgggagagccagcacagggggccccgggcgtcgacggcgtccagagctcgacgcagggctaggatagagctaggaatcgtagcccccacacttttagcaaagaatcatttgaatgggtgaagtgaatacatactttttgttaccaaggggggcaaacgacgtgcgacacgtgggtatcatgggaccatgaggaggagatgggtgagagataaatataagccataataactttgctgataagcatgaacaaagaagatacaaacttaaaggaagtattacaaatgttatgctcaataagagctcccggccaacgctgagctttcccagagaggtctactttggtccggatattgtaatacctcctttgttacctttgtttatccttgcttgcacatcgtgacctttcaaacctttggctcaaagaaggcttcccaccgtgagctctgtaccctttaggggcccacggccacttagcaaacgaggtcaggttcccacgagcctgcgcccccacgctacacattatgttcgctctttcctttcggtggccttgttctaatctcttttccttctacatggacgattactttcgcacgagtgtgagagccgaaaaactctagagccagcactccccgtccacagttgagctgggccgggcaccgtagccagccgacgggaccaaagccagccgctacggaagagccagcacaggggggtcccgggcttcgacggcacccgaggctcaacttaagtctaggataaggctagaaaacttagcccccacacttagcgaagaaccgttcatgtagatgggagagaggttgggctcttaccaccgagggaggaaacaaatgtgcaacacgcgagcgtcgcagagccatgagaatagaatggggggaaattaaatataaggtttcaagctgatgaattgaaaatttgaaaatgcttaaaacctgaaatgatgattaatgcttgaaagacggatgcctttatgcatggattgtggtggcgacagggtctcctgtttggcaaccagcctacaaaatctgagcgcagaacgccagcaactaagaaaggacctctccgaggggacttgtcaattacacagtcatgccggagcacggtgtaagcctaacttcccatcttagcgagcgtgcgacttgtggttggcgctaggtgaccctgtacaccatgcgcttttggcaggtttttaaacgcttgatacctgcctgcaagagtcctctcaggagtggaccgaggcgggcaacaggttcatgagccaatcccgtgcttggcccctgagggccatggggaagaagctcgccatgacctggtcatcaccccccgccgcctctatgatcgttgtgtagatctggagggactcggaggggttgacgcaaccgtcgtacttttcggtgaggccgggccgaaactttgggggccatcaaacattccgaagactcgccacaaaggcctggcagccagccttacccggtgaggatgtggggggcctagccccctgcctagggtggcgtgacactcttgaggaggttgttgtgagtgatatgccctagaggcaatcatagagatgattgtgtcacatactatgtttacatatttatccgacattgttccttgaaatagataactccttattggttaatgaatatgcgattctttcatgagactctttatgttgtttgttactatttctaaaggatccctgattaaatattatatgtggaacaaatatgtttatatgatcagcacatgtattaattgatgatcatgtctcatggatcatggtacagagataccaaattaataatgtggacacatgttgttggatagacccaacatgagacactgcaagagccatatgtgttgtgtcatcagtgatctcattgagtgttggtgttgaatccttagacctgagattatcatggttctcaacatgtgtagtagcttacttaaggactgctaaacgcttctccgtaattgggtagttataaaagtagttttcgggtatgctatgaaacatgtagtgggatatgaataatcaagatgggatttgcccctcctatggagagatatctctgggcccctcgatgttgtagattatggaagtgcatggccacgccaaaaggtgattgaggagtcaatcacaagttatataatctatcaacaggttcgagtaaatgattgagctattagaggatagcacatacttagccttgagcttaatcgatatcgtgaggcaaaaggttcatacaagtatacactagagcttcagccgatatgatctttatgtatgcccggtgggtcaatacgttctgctaggggccgctgttgacgcgtggaccgaaaaggagttttcgggttacagccgagtatatatgaacctacagggtcgcacgcttaatgggccagaataaggggattggatagaaatccaatatgagcttaattcggatagggatccgaataggagtcctacgtgccttggaggcccgagtgatggatcctatatattcgtgtggggtgtgaccggcggaggcattgcatcacgttagaaaccctagccgtcacttccctccccgagcaaaaccctagccgtgcgcgggtggtagcatatctgcgcgtggcgttccgtccctgtacgtgtggataccagtagaggcgccgctggtttgcggtgctgatcggcgtgggagtacggcgaggagaacgcacgaggaggagaaggtcgagccggtgcgatcgactacttcctctatatcgacgcgcgctacttcacgagagttccttcgacttctcagcgtcttcttccgctgcgcagcgcgtcgagtggtaacgatctatgatctaacacttgcatggttcctggtttacacgatagaaaattttgatttatgctatcgtagcctacgcatatcccaacagttgcgccttcccccatactggcggcgtggcactcaccacgccggcgctcgaaagaacctcaaaaatcacgaacgcgccccctacctggcgcgccagatgtcggagggttaactcctccaccagggaactgtgaggcccccttttttggttcggccgggggcagcgggtgaaatttgaggcttcgagagcaaaactaagtcatcttgaggggatcagcccccccctcaagacgatgagacaaaaggggtttatacaggttcgggcctctatgaagcgtaataccctactcctgtgtgtatggttcttctgtacttagaaagtccctgaatccccgatatgcaagctagggttagacaagctttggcttagggattctaagtccgatcccccctcctcgctaggcatggtcctccttttgtactctaaggggatactacatgtgctgcgaatgctatctagggagaaggaaaaatattctctatattaattacatgtcttgtgccttagcccagaagctatctgcacgtcggttgctgcgcggggcccctcaaatcatgcaaggcgcctttgtcattcgccatttaatggatgagaactttcgggttctcgttcacactagaaaacgggaacccgggtcagttcagagtggttgtactagctctgaccgaggtaagaggctgtgaagcccctcatcattatgatgggacgggatggagcacgccgctcgccgcctgacacacagatagggtggggggtacacagtcgccgtcccatccgtcattcaaccggtcacagaccggtcagatgcgtagcacgccgcattaaatgcggcatggcgcggttgcatagaccgctttaaatgcagttagg

SEQ ID NO: 22363 - DNA, 8144 bp, Oryza sativa
cctcctcgctctagctgggagggggtaaccaccgcgccaccccgggctcgaccccactcggggggagccacgtgggtttggggccggcccgaccccaagctgggagggggcagccgccgcaacaccccgggctcgtcccccctcggggggagccatgtgggtttgagggcggcctcctccctctagctgagagggggtagctgccgtgccaccctgggctcgacccccctcggggggagccacgtgggtttgagggcggcccgaccccaagctgagagggggcagccgccgcaacaccccgggctcgacccccctcggggcgagccacgtgggtttgagggcggcctcctccctctaactgggaggggtagcgacgtgataccctcgggcccatatcaccaacagatagtgagaaaaaagttccaacaaggctctgataccagattattagcaacctaacttgtatctcactcaaacactcaagaacacacgaatttctcaccaaatctgacaggattgacgatgacctcgcgcatgatcagcttcacaacctccggattgatggggtggtctctagccgccaagcacctaagcttcttctcctcctcggtttatatatccacaaattaatagtagtattctaagtcaaatattacagaaatatttagattctaagtctcataattaagaaacaactttgatgaattactaccattcatctacgaaacgaaatatcgactaatttttccttacaaaatgtcaacatattgtaggtactccctatagtattgaccctcctaatcccctccctctcaggctgtgtttagttccacgccagaattggaagtttgaagaaattggaacgatgtgatggaaaagttgaaagtttgtatgtgtaggaaagtttgatgtgacgaaaaagttagaagtatgaagaaaaagttgggaactaaataaggcctcacttatatgtgggtccaacctgattttaaatcttaaactatgctgtgttcaattgtcaatttctccaactttttcacgcgaacgtttatcaaactactgtaaataaataataatttttttataaaataattatatataaatgttgttttaaaaaaatatgttaatccattttaaggttttcttaagctaatagttaattaattagtatgtgctaatgagctactcgttttccatgtagtgggattgagttcgcaaagcatatgtttcactgtttagatccgaaacaaatctctcgtgcatatggaacgaagagacttattagcacatgatatattaatatgctttttagaacaacttttctatatttttttttgtcaaaacacatcgtttaattaggagtttaagaagcgtgtacgcgaaaaacgagtgaggagagttggaaagttgactatcgaacatagctagcctccggctccacacccaagattttgctgaaattttgaaaatcgtttacaaatatttgaattgaatgtacgtttcaccggaaacttaattcctagacgctagaaatcagtgttggctagctgtaatagatgaacttgctggtaattccatctcggccattacatgtagcacaaaatcatcacatcgattatggactaactagcccgccgtaattccattgcgcgtacaagatctagattaacagctgacaaaaaaaaagagcacatggtaatctacctactaactaataatgacaaattaagtggcgatcgacatgagctcgctagtcttgtgcggcactgtctcctgtgcggcgcctctgtcgtggcggctcctgatcctgctccttctccgtctccggtgtcggcctcttatgcacgacgacgacgggacttgctgctcggttggcatcggctaacaagaccgcagagaacgcttgtgattccgcaatctccgcctcggccgtcgcggcgtgcttctgcagcgcctgcacgatctcctcctcccccgcgaaggcggcggcgccacgcgtgagcttctccttcaacacggtcatcttctccaccacggcgtcctcgaacttgatcgcgctggccaacaacccggccttgcggctacggacggcatcaccgccggagtcctgcaggaccagtgatttggtggacacgcgcatggcggtgatcagcgccgcaagctccggaatgacggggtggtctctcgccgccatgcacctgagctccttctccagcaagcgccgcgcggcggaggcgatctccaccgcctccgcgcggcgcgcgtcggcccacgcgacgtgcttcctgagcaccgcctcctcgggcctccctgtcccggcgaacacggccaggcccctcctgagatccagcacataggacgccatgttatccgccgccgactgggcggagatcactgcaccttccgcccagtccacctgctccggcgagggagggtcggggtcctcaaggtactcggtggcttcagacagcgctgtggccgtgatctcctcacactctcggtcgtcggcctcttcctccgggccggcctccatgagctcggcgatgagctcctggaggtcatcgtcgacggcgggcggcatgtcgtccgccatgatcgatcgatggatgcacgcactacctaccgtccgtgttaccgccaaaaattgcaaagcccaaaaccttggagatatgggacggaatcgatggatggatgtccctcgataaatagacacgactgccgatccgagtcggagtacgtgtacccgacggaccgatttcctttccgatccaatcgcgtgatcgagatggaggccgaacgagggcccaacttcactgttgggctgctcgcagccgcggagcccagcccatctgcaactgcaagagttttcgcagtaacattgaacaattatgccatatactccatttgtcgataaattctctctcaaaaattgacagatatagcgaaagagcctgtaacctagtggttacaagagtctcagtagcacctaaggtcctaggttcgactatttatgggagcgaatttttcaggatttaacagcgttgtgctttcagtggtaggtggcgtacccgttgacagcgaggtgcctgtagtgacggcgcacgaacatgtgagaagattcgttcccacgactgccatttcacgaaaatactctggttcggttgatatatttgtgtacctatttatacatatatgttagttaatctaagtcgattatttaatttatttgtatcggtcagatcttttgtgtacctatttatcatatatgttagttaatctaagttgattatttaatttatttgtatcggtcagatgttttgtagggttttaccggtattggctaaattgctttgtcgatctagattagttaatgtatctaccacattgaaaatcagtcaagaagattgtctagatattatgttcctttaatactttgtgctgcatcagtcctagtcatgcttagaaccataatctctaacatgttttttgattgctaatagggtttcatcggggtttcaaccgatgagttatctggacgttgcatcggattataaggattacatacaagttggttttaacagattgcaacaaatgtttcattgattatctaatcgtttggacatcggaacaccagccgatgtatgctttaaccatcgaatcagcactcattctatcatatcattattagttgattggtttctattattgttttattatattaccatcagtcgattgtatttatatcattatttactcaagtgtcaaaatctacactaggcatatagccggttgctcaaaaccctatcgacatcggctagcgttgctatatcggcttgtcaaccgattggctctttaatttttactttatacatcttgtcggttacataatcaaactgagtggcacatccgcatctcatcaatattttggatctgcattggagctaagcagatctcccagaccgttgtgttcgtcgactttgttcgcaccaacacatatctcgcaccattgctcgagcgtagatttttcgtcaacaaccatatgtaaccatatgtgagaagattccttcgcatgaccagacgacctccatttaacaaaatcagcatgttacggaggaatttttaaaagttatatatatacattaaaattacaatatagttacaccacaattatactataattatatttgtcaaaattctgaaataaaatgtgtcgataaattatgcaggtgcaggtgggttaaagaggtggggccgaggacttgtttctccttcttctctccttgtctcgtcttcttccgagcggcgaggcgagggcggcgttggcgacgggcggtggtcgtctgggcttggaggagaggccaccgtggcggcagcgagcggtggccggaggagcagcgctcgggcggggacgaatcgacccggcgtggcgggcgtcgttcgggagcgtggaggcggcggggcttcggcaacgtcccgaggttgccggcagcgaggtggatcggggcgtacggtggggaggaagagggaagcggtggtggtcggtggaggccggcatgttgggcggcgcggctaggcgagggggagaggaggctagtggctagctcgctcagtgcgactctgaccgcggcacgcggcacgcgggcttttacagccgccatgaccgcgaggagggcgaggacggcgtgggacgggagcaggtggctgtagcggcgtgcgaccgcatgcactggcggcggcgggaggcaacggggcgaggagtaggggcatgggctcgatgcgacgcggcgaggccgtcttggtccgcgggtatggcgtggacttctggcgacgaggcgttgcggtgacggcggctacagtggcgcgccggctttgaggagaggcgcggtggctcgctgctcggaccgcagcggtgcggcattttgtcgagcaggtggcgtgcgagggcggctgtctcggggcaaggccgtgggctggctgagagatgtggcttaggttgaataatatgccttaggattgagaattggagggaattcattaggtgttaagtttggattttgattttgaatggtttctaattttagaggggagtgtgaggatgtatgaattgagatcctaactgaaatttatcttgggagaacctcttgttgattaaaaaacagacaatatttgtcttttgcaggcagtttcataagatggttttactccagaaaagaagttctctaagctgccatcaggaggattaagggagctcattggtgcatacttaacacttctccagaatttctttttgaagttgtgcataagtattgttagtgagatggttcacttttgtaggtcaagatggcataggcaggagcaacatcatggaagcagaaggtattttgaaagatctgattgatgataaggtgaacaatgttgatgccgagttgcatgtcttacaagaagagcatgaaaaagacctgctcgagcatgacagtaagttaagttttatctctattccttccccacccacacacatgttgcactattttacttatccttaagtaaaaaaacactgtgttacatagtattattatacgcaaataaggatgatcatcttgcatttcacaaacataagctgattatcaaccctcaaataataatcctctctgttcttttcttgaaaggaacggcccaaaagaagaggaggcccaggaaatgggaagcccaaagcccagatcagattggcaaacagcaataaagcggggcgaataccccagtttccctctctcccccgccgagccttcgtcgtcagctggtgttaccccagcttgaattctctgcaagacagcaagttcttccctactccctctccaccctgcgcaattccctcgcattctcatcctactccaagagcagaggaggaaggagatggagaggcaggacggcgacgctgagggatcgggacggggagagcataggagcagaggctgccgttccccggcagagaccaagactgaccgaagccccggcattcccaggtcaggaggaccagcgaatccattctcttctcgttcgtcttcgcgttcttgcatttcttttcgaccgtttcaatcgcagttccaccgccattcttccttgctgtctttcttggtcggtgttcttgaagttctcgtttggtttgctgcaagaagcatatctgatcgattgattgcagagttctggaggtggggttcgccaccgtgcgagaacaccacgggaccaagagcaccacgggaccccaaaagagcaacaacctccagaacaagaagataaaatcaagagaagatggcagagaaccggaggccgcagagttgagacggggcgagaggagaaggtcaggacctgcgaatctttctttcccttcttgttctttgtttcttgctgcgttcttgctttgttttcgatcgtctcaatccctgcagctttcttgcgttggttttcttgccaagttgtgtttggcttcacacgtgtctgatcgatgtgcagagaccacgaggtggtatttgccgctgctgcgcgagatccacctacactgcagcgccccgacttcgactgcgtgcgtcagaacaaacatcccaatggtaatcagtctctctcctgtcctgctctgtgtccggtttaattcttttcctttactctgggaacgaacatgcatgtataaaagcctatgtactagttgttgatccatgtccatgaatctggattgaaatgttaacagatattggcaatatctgtaaattcttgttggaaccatgcggaaacttaatctagttaagttcactgatgctttgacaccttggtttctgaaactggatccttgtttcttgcactcctgcctttatttcaaaagagaaaaaaagtaacttcagaatttccaacaagaaactgatcttttttttttcttcctgcaaaatgcaaatgcaagttcactgattcatagagagttgtttaagttactccaatctgattttctttcactacaagaactagtcctggtgttcagttttgacaaacttctatgatataaaaactccctgatatgagaagctgacatgtgtatgtgtggccatgcacccagccaatactgagaatgagatgacgggcggtgatctcgagaaagcaagtggaagcttactagaccagagcaagcaaccgctgaacataaagagggatcgtcgcaggctagaagaagtcaggttagtgacttctctgctcccttcttatgcgcaaatatgtattgttggttgctctgtttgatctgataataactgttagaattgagattatgttgttggtgaatctgacaaattgttgaaccctagtgataaaatgtggaaggatgaagcgaaggagattggaagcaggtcgccagcactaacaaaggggagcacgaaagagtctcagatgcttcagtctctcggtaaatatatttgaatttgggcttgctcttttgaactgtggagtggagttgattgggcctgtttttacttttggtgtgtgtggatgcactatcaggtgcacaaactgctaagagctccagtggttgtcagggaaaaaaatgctagtgtccaactcaatggcttcagggcagccacggcatcttttttcttacaccctatacacccagtgtagtttgatatctatatcaggtcatgtccagagtaacgagtggatatttcaattaatcaggatggaaattccaactaggttaattgcttgctcttggtttcacaacttgtaaattctcgtctcatgcatggaaaccgtacagaaacctctaatctagttaagcatgtcaattcatactgtaacaacatgcatgatttctgacaagaaacagaattcattgtttatgttttgctgttacttgacaaaacaacaagctgatcctccctaatttcttgtaaaatggtatcttgttgttttgtatcatgttaagtaataattatgtaactacaaaaggattattggaaagtgattattttgccaatttggaaagggaacgttcacactctcagtgtgcaattttgtagatgaaattgactcaacatcagtacctgaaaattgactttgaaactgtggtaacccttggaacacttcaattttacctccaaaatgtgtcc

SEQ ID NO: 22364 - DNA, 1855 bp, Oryza sativa
agttgtcagtctgctttggttggaaaacctgtatctccaattctcctcaccatcaccaaggaacttgttgtgttcctaggcgttttgttatctttcatgttatatctcaaaagtaacttatgtccctctgttattgtagcatattccaaaaataaatggcgatattccttctgccattgaagcctttgcagatcaccaaagactgcttgacaggtaaatagccctgtagtatatttttaactgtatttccaaatctacgaccgatagaatgtgaacctcatggcagcttttgtatgttcagtgttagtaatgtgagtcaccataggtgtttcacttaatgttgcttctaaaatttgactcatggcacgatgtgatttcttatttaggttggtgctgtatgatctggctgaagtcaaggttaaaggagacaggaattgccaggtatacttaaaatatctagccatttcccttttccttaattttactacatgttgtacttatctcttttagcatgtgtcttttactcagttccgagcattgtcagatcaaatgtaccacaccaccgaacaccacaggtttgttcgtcagcaagtagtgaaacaggttagtgttggtgcagtcatcatgttttcttgttagaactctacttgtccatgctcatgtttcccttttgaactgttccacagcttgagtcttatcctgaaatttatgcgggttatgtccctatggattatagggaatatctgaagaagatgacagagtaagtaattgctctttttgtaacaagaaaatctttgttatagtgtaacattatgcatttaaaatttgttgccacaaaatcgaccagggatggagagtggggtgaccatgttacgcttcaggctgctgccgacttggtaaacaagatgtttcctcacttcctgagttgttaaataaaaattgctgtcttgtacattggccatattatgaagtatacagatcaatagttctttgtattggacagtatggttgtagattcattaattgacaaataatcaaaagaaataatgctattttctgtggtttttattttggtaaccagcatgtctcaacagctatattgcaatcttgtgcatcttaggattatgtgaatgatctagggatgttgtatgtcgatccttgttataaatgtgaaactcaagtatccgcattggtttttgcagtatggtgtaaagataaccctgctgacatcatgcagagataccttttacattgaagttcttcctgctgaccagaaaccaaaaggaggtagcctttttttttggcaattgaatttttactgcaattaatatactaactgcactgttcttagttgatttgcctagtaggtcatacttacttgagtagatgtgtatctgatgtatttctgtttatttttgttttctcccaaaacccagagatatgcattagtttttgggctgaggtgcactacgattcggtatatgcagaaaaaggtacagtttgtcgttttgatacagtgttcttctaggagtactagtatctctttggcaggttgatgctgtagctcatgtgtgcaagttgtggtgcagccagttgatccagttccgttacaacctagtcgtcggcgaggaactgcgacgcccggcgagcaggaagaacttttattctagagaattgagagaaaagcagaaggggagagagagagagagagagagagagagagattgttttcttacattttcaacttgtatatatacgctacagcagctggagatttatatagtcagcactcgtttgccctctgggccccacacagtagactcacacaactaatacgctttctttacttgaagat

SEQ ID NO: 22365 - DNA, 2631 bp, Oryza sativa
  unsure (1)..(2631): unsure at all n locations
atcactctctgtgctccctcatctgggtctttgtcaaaaattccttcgttgggtgtgtgttcatatcggttcaatgttctaatttgtccctctgcatacatcattccagttcggatgcattgtatctatcgctccctgcacagcctcacaaccttcatacatctacagttctttttgttcttgtgtttagcctttaaaggtttaaagcatctcgatttcgaggcaagatttgtctcctcgaacggaatgtccactatcccccttgttaaaaagatggaattttcttcattacaggatgtcgggtcgagggaagaagaagaatggagtgtccttcaatattccttttacactgccgattttcacccgattgacttaggtcttgttcgtttctccaactagacggtgatgaaattttgaatactcatgacacgctttttaaactactaaacggtatgtttcgtgcgaaaactttctatatgaaagttgttttaaaatgtcagattagtatatttttcaagtttataataattaaaactcaattaattacacgttattaccatttcgttttatgtgaaacacttaatctttatcttcatcttcagtagattcaaacaacacctcattattttgtacatgaagagtgaacaaagaaagatacttcgtgtaagaatggtactagaaacaaggtttctgaactttgtgtggatgccagcattaatgcttatgctttaggttcaaatttaatgtttcccatgatttattcattgattagattgctgccaattgtttgcgccccatttttgacgtgattttctggggaaatcctaacagtatgatactatgctaacactttgatttggtatgatgttctgccatgttcatagttcaggaaaaacaaatttgttcagtcgaaaacagtattatgcatatgatggcccacagataaataagaggcacagagtggaatgtcgtgtggcggtgtgggccacgcaagtccatctacgaatcggatccacggaagtacacggactccgaatcggatcctctccatctctctatttattggggcccgccttcaagggagatttgcttcccatcctgtccaacagatcactaattttgcataccgccatagttttgccgtgcatagatcgatcgatcatggcggacgacatgccgcccgccgtcgacgatgacctccaggagctcatcgacgagctgatggaggacgatgccgaggaccgagagcacgaggaaatctcggnacagcgctgtctgaagccaccgagtaccttgtggaccccgaccctccctcgccggagcaggtgggatgggcggaaggtgcagtgatctccgcccagtcggcggcggataacatggcgtcctatgtgctcgatctcaggagggctctggccgtgttcgccgggacagggaggcccgaggaggcggtgctcaggaagcacgtcgcgtgggccgacgcgcgccgcgcggaggcggtggagatcgcctccgccgcgcggcgcttgctggagaaggagctcaggtgcatggcggcgagagaccaccccgtcattccggagcttgcggcgctgatcaccgccatgcgcgtgtccaccaaatcactggtcctgcaggactccggcggtgatgccgtccgtagccgcaaggccgggttgttggccagcgcgatcaagttcgaggacgccgtggtggagaagatgaccgtgttgaaggagaagctcacgcgtggcgccgccgccttcgcgggggagggggagatcgtgcaggcgctgcagaagcacgccgcgacggccgaggcggagattgcggaatcacaagcgttctctgcggtcttgttagccgatgccaaccgagcagcaagtcccgtcgtcgtcgtgcataagaggccgacgccggagacggagaaggagcaggatcaggagccgccacgacagaggcgccgcacaggagacagtgccgcacaagactagcgagctcatgtcgatcgccacttaatttgtcattattagttagtaggtagattaccatgtgcttttttttttgtcagctgttaatctagatcttgtacgcgcaatggaattacggcgggctagtaaactgatcagggctactaaagaaatttgctgaatcttgccgaacgtgtacagtaaactgacgaacaaatgcagagaacgaaaaactatcgagagtttgtgctccgaactatcgacagccttttctgatttctcttcttctccttttattagattagatctattgggagtttgttacatgcataacaatcaacgactttacctgatccaatctcagctcggtcggctaaccgaaaacaaacgatgcggctactctagcccgatggtgatctgaacccggtcagccacttattattacatgcatgactaagtaaaaacagatagaaaaaagaacaagctagactagaatgtgcaagagtatacgacaaatccatcagagataacccctcacatactccctcgcctcgcttatgcgattctcccccaatggattagcagggctgtctgctggtcttaagttttctccaaccaaaaagagacacaatgtgccagtgccactactaagcattcagcgccc

SEQ ID NO: 22366 - DNA, 5918 bp, Oryza sativa
tagagccatggaggatcatcggggacgtccaagtcaaggtggaggcccaaaccaagtcgacgtcgggtgcaattcggagtccaggaccagtctgcactaaaacgggcgcccaggtcgcatacgtgctcggattggggcgttctttatatggatggaaagctaagaagataaaatttccaatggttttggtcccacgtccaaattcttttcgagtcaatgggaattgaccgaacaagttgacatccagaatctgtcccggtgctgcgtcaccgtatttgggcctttggcccgtgtatcgtgttggaacccattagggttgcgtcgagaggggtttgcacgaccctaaactctatatatcagtacccaccgccatctttaggtttttgggttttgcttagattaatctgtcgagaatagtttcgccgctagatcggtttataagaccccaactcgtgagcttaatcattcatctgcaattttggttgttttctatcttgttcttgtttgtgttcttcgattggcaaatagggattagccttcttggcgaggtcatccgcgtttcggcacgggtgataaccataggagacgtggtgctgcgattgcggggctcaagagcgtacgcgttcaagaagccggatcgatttgtgtcgcgactccgctcaaatcgttgtttatcggaacctttcggaagattgggaaccctagtgcacatcaagtggtatcagagctctaggttcaccgtcaggttcgctcagtttctttgccctagattagtttttgtttttcgcaattatcctagagtctacagaaaagccaaaaaaaattttagttgttagttaccttaacctagaccgtgtttagcctttgcatgattctttttcaaagtccgtagtgttgagtttgagtcctagtttaagttcctgttgctggtctagtgcgtgttttagtctagtcgtgtgtttgtcctttgtaaccctagccgctacctttcaccgtgtgttagggttcatcctttgagagccgtttctgccatcataaacacccatccagatcaccacgcatcaccagaacaccctacaactccgctgccaccatatcccaattccaccgcataatagactaggttatatcccctctggaaaacctagccggaagccgaaacttcaaacagccataacttttgcatacggactcggaatcaggcaaaatttaacttttcggataagagaaaaaaattttacatctgtttctcccccctttagcgggtttggcgaatccaaaattccaaaatttggcttgcaaaattgtctgttcgagctcacaagttcctgcaccttgtttatagtggtttcagaaaaatccataggccacatatctactccgattgagctgtaacttggaggtgtgcctattttcgtgttctgaaaaaagaaaaaaaatatcaaaaaaaataaaagaaaaaaaaagaaaagttgatttccactagtgctttgagctcacgacgcgctccattgagcttatctgctagttcggttttgtagtttttgctgaaactcgccgaagcttgcctgcaagtccttctttgctgcttactggtgtcatttttcttgagccataattgttaccactactgtctaggacacgagtagaccagcaactaagggcaagtgacttgggatttttattcagcattactatatgtcattggattgtgtaccactcatatacatatatttggccttcctagctccacatattacttctggacagtacgtacaggttcttgatccctacaatcgctgactacgccttctaggtatcctttgctttgctggtaagaaccttataagagcttggttaggaactccatattgctgagaatcgttgagaggcaccactacacctgcgtagtagattattagggataaccttcaccgttttgtttctgttttggtgtttcaatgtcaggtaacaaaggtgagaagagtccccaggattttgctgattgtgtcagccaagagcaactacgaacactccaacaaaatactcaaaaggacatcacggaggccgttgcaaagtctgtccaagataccttcactaaaatcggcttcctgaaccacatggagaggttggacaagcggatatccacgctaactgatcgggtcgccgcgttggagacaccttccaatgaggaagtggtgagtggtgacaacgatgctcatcctgaagacacggtgtatgattccaatggctatattgacgcaccggctacaaggcaagcacggctatgacgtcgcctacgcacaaaccacacaggtatgggtggcactcgccaccaacaaggtaataataataatcgtgtgcccgatgatccttatgctaaggttaagtttaaaataccatctttttcgggatattatgatgctgagaaataccttgattgggagatgacagtagaacaaaagtttaatgcccaccttgtacccgagcaatatagagttagacaagccagtagtgagttcaaggattttgctattatgtggtgggctaggttatctgatgagggggtactacctactacttgggaagaacttaaggtagctatgcacgataggtttgttcctccatcttatcatagagatttacgcaagaaactgatgcgtttggaacaaggggataaatctgtacaggattactatgtgagctacaaaagggtgtgagacgctgtggcatagtggagggggtcgaggattctatttgtcgtttttattctggtttgagggagaaaattcagaacattgttgattataaggaatttaactctgtcaaccagttgtttcggtttgctatgcttgcagagaaggaattacaggggcgtgagcatcaaggcaagagcaaggcgagcacatacactccgcacacgatgccatctgcgggactgcccaaggccgtctcttttcgggcgtcctcccagccagtgggcaagcaaccagctgcatccggagcttctgcggcaccaaaaccatctccaccaccacgaccagcagagtcaggtaaaggttcctcgtaggtacccgccaagagtgcctcatctgtcgcctcgacgggacgcattcagtgctaccattgccaagggtttgggcatgtgtagaaagattgccctagtcaacgggcctatgttgctacagaagatggctacatcaccacctccgacgtggaagaggaagagggggaagaagaagaagttgaggatgaggatggcgaagtttttggtcgtgatgacacaacggactacaggaccatcattgtgcagcgggtgctcagcgcgcaggtacagcagcatgacaggttgcaatgccataatttgtttgagattttcttcgtcatcaacaaccgtcgtgcacgtgtgatcattgatggaggaagctgcaacaacttggtgagttctgatttggtcaagaagcttggcttgactacacgtacgcatccacacccttaccatattcagtggttaaacgattccggaagagcaaaggtaacacaggtttgtagggtttcgttttccattggctcatatgcagattctgttgattgcgatgtggtttctatgcaagcttgttcacttttactgggccgtctttgggaacatgataatgatgctacacaccatggtaggagtaataaatacacttttgtgcataatgggaagaaaattactttgctacctttgacccctgctgaaattgtagaagctgataaagagcgagctgctagtttgaaacttgatgaatctgaaaatcaacaagtggctaaatctgtttttccacctaaaaaggataagctttcacctagttctaaggctgagggaattaagttgaagggtggtgttatgcttgcaacgaaatgtgacattgctgaaatttcagatgatgatatgtgctatttcttgatatgcaaacaagccttggtttctttagatgatattgctagttcgatacctttcggaagatcgggaaccctagtacacatcatatagttatgaatatcttttaatgtgtaaaaatatatacacatatacaaagtttatatacgatgtatacaaagcttatataggacatatatgaactttgtatatgatgtatatgaactttgtatctcatatacatacgtatttaaaaaataaaaaaaaagaaattgcatcacatatacaaagtttgcatacgcatatacaaactttgcatatgtacgaatacaaactttgtattcatatatctaaaaaaacccaaaaaaacagaagagaaaccaaaaaaaaaggaaaaccaatcttaacagaaacaaaaaaaaaggaaaaaaaacagccaaccgaacagaaacagaaaacacggaaaagcaaaataaaaaaaaagaagggaaaagtctgtctcccgcgcggcgcgtccgccgccccctctccgcgccatagtataaaaactcggaccggagcttgacccggcggacctttcggttcaccggtccgccggtctgaccgatgaaccggcggttcaaccgcgattttttacgtataggtatagtgcatgtttgctagtagtcacaagtgatatacaacctcaacccccagacctgaggtcgattcccaagtatgcacccatttttgccaaaaagttcgaggtaccaatatgatatggaccatactgggcctctcattggcccattacaaaccttcactggtccaaccgtaggcggtttaatctccggttcaacacaaaaccgcccggttcagccggttcacagcggttcgaatgcatgtcggttccggttttttggttcaaccgccggaccggtccggttttttccactatgctccgcgcgcgacacgtgtccagtcgtgcggggaggaacgtgcgctgatcacccaatagccttctcgcagcaatggatcggaggctcggagcggcggaggcaacggcgtcggttgggttgggtgttcgcagatcccgactagcagtaaaattcagcgttccatggtgtatagcgcgtttcacaggggttccccttgggaacttccactgccgctcgatcaggcctttacggcccagatctcgcactcacacatggtaatccgcttccgcaggttcggagttcacggttcacgatgatcattgggaaatgggaagtttatgagcgctcacaatcctgcttagtttatactactatgactctcgcaggcttctatttgggctatcttctgatcttgattttctcctaacttgaaagagaaacaatgtgtagtaaactaaccagtgattgctagtatatggatcatgcggcttatggaaatccgagtgttttttactccatttctctgtttcctccgaaagatattcagttagtcctacacacgcggatcggattgtgtaaagaaaagaaaaaaaaaagaaagaaataaagaactagagctaatccgagtcagatacgctgtgcaagtatacaacatgtatatgcaactgaatacttaaatgatggtgatgtggaggggagaagagaagagagagaagcagtcatcacacctcatacaagactacaagaggcaacatccacacaaactctaagaaataaaaaaaaagaaaagaagaggggttgattggtggcaagtgtattagaccctgtttagatgggactaaaacttttaagtccctatcacatcggatgtttggacactaattataaatattaaatgtagactattaataaaacccatccataatcttggactaattcgcgagacgaatccattgagcctaattaatccataattagcctatgtgatgctacagtaaacattctctaattatgaattaattaggcttaaaaattttgtctcgtaaattagccaatgtgatactacagtatattaaatg

SEQ ID NO: 22367 - DNA, 742 bp, Oryza sativa
agccagggatcagtttaaaccaggctgctggtgaggaacaagaggtagcagtggagaaaaccactaagaagttggaagatattcccatagtcagagagtatccagaggtttttccggacaatctgacaacaatgccaccaaaaagggatatcgagttccggattgacttggcacctggaactgcaccgatccacaagaggccttacagaatgggagccaatgagctggcggaagtcaagaagcaagttgatgaatagctacagaagggatacatccgcccgagcacgtcgccttggggtgctccggtcatctttgtggaaaagaaagacaaaaccaagaggatgtgtgttgactaccgcgcactcaatgtggttactgttaagaacaagtaccctttgccaaggattgatgatctgttcgatcagctgaaaggagctactgtgttctctaagatagacctgcgatcaggctatcaccagttgaggatccgcgaagaggatattccaaagacagcattcatcactcggtacgggttgttcgaatgcacagttatgtctttcggactcactaatgcacctgctttcttcatgaatttgatgaacaaggtgtttatggaatttctagacaagtttgtcgtggttttcatcgatgacatacttatctactccaagtccgaggaagaacataagcagcatctccggctagtacttgaaaagttaaaagagcaccagctatatgccaa

SEQ ID NO: 22368 - DNA, 2512 bp, Oryza sativa
tcagctgtctgaaggcccgatcaagtcaaatatcgatcggcttgaagctcgtaagattgatcttggcacaacttcaagaatgcaacgctgagttggatatggagcacaaaaagctagccgatctcccgcaagctattgaagaacagaaggcaaagctaaaatcggccatcaagaatgtcgctgatatgaccaagtccttgaaagttatctctggaactgacgctcaagatgcccaagccatagaagatgtagaacagattaggcagaaggctatatcggctatccagcaatacttgtctcaataactttgtgtaatagaacttaaaaatttttttgtaatcggctaagacattctagtactttattatcttgacaatcttttcaccgattagcacaaaaaatttgcctccaaaaatttgcattgcatttggtatatatgtgcccccctaattttataatatcaaaagcattgataaaattataaaacaactaagggcgatataaccatatcggccattgtacatcggcaaatcacaaccgattacattatgaaaaacaactaagggtaatataaccatatcggccatctcaaggcgatgtaaacacatcggctgtcatgcatcggcaatacgagccgatcatgcgttaacccaaacacttgggtaatatttcttcaaatatttgccattgagcgctcgcccatagacttcgccatcaagcccttgcaacatatatgctcccttagacacaaccttataaatttggaacggtccttcccaattcggcgaccacttgccgaatttactatcacgagtaccaatcggcaaaatcaatttccatacaagttctccttctgaaaaatctttaggcaccactttcttattataatgccgagcaatacgttccttatacttagtaacctttgcaagggctcgcaatcgtgattgaaccagatcctccctctcattggccataaggttgtaatactcatcagctgttaaatcgttttgtaattccgttcgtcgagagccgattctaacctcccacggcaaaacagcctcatgcccataaacaagtttgtaaggagggacttgaatcgatccatgacaagccatcctataagaccacaacgcttcggccaactgagtatgccattgccaaggataatcaaaaattttccgcttaatcaatttgatcaaacttttattagacgcctcggcttgcccattaacttgtgcataataaggtgaagaattcaacaatttgatacccatgctatcggtaaactgaacaaactcatcggacacgaagattgaaccctgatcggtagtaatagtttgaggaagaccaaatcggtagattatatgctcttgaacgaattgaatggcatccctagaatcaactttcttcaaaggaatttcctctacccacttggtgaaataatcagttgccaccaatataaatttatgccctttactcgatggtgggtttatcatactgattatatcaattccccaacctctgaacggccatggcttaataataggattcatagctgacgccggcgctcgctgaattgctccaaacttctgacaatcctgacaccccttataatatctgaaacaatcctctagcattgtcggccaaaagtaccctgcatgccgaagcaaccacttcatcttatgagccgattgatgagtaccacagactccttcatgaacttcaccgattgcaaccttagcctgatcggcactcaagcacttaagtaataccacatcaatcgtccgataataaagctcatcatccagcagtgtatactttaatgccttatatcttaatttcctaggagccgattgagatggattattcaaatattgatgcacatcgtgcctccaatcatcggctgtcattgctgcaatttcaactttaacatctttgatcatcggcttataccccgatgccccttgggctaaatcattagctttaatattttgttcttaagagacatgctttaatgtaaccagccgaaactctttcattagttcctggcacttctcattataaaccatcaatgtatcgttcttgcattcatactcttctgccaattgactgattactagcaaagaatcccccatgatttcaatggtatcggcttcaacttccttgagtaattgcacccccttgagcactgcctcatactcagcttgattattagtcgcatatggtgtaatagtataagcaaactcgaaacatgccccactaggggaaattataactaggccgataccacaaccatgagtacataccgattcatcgaagaataaagtccatggcactatttcaaccaagccgattgaatcatcacgatgttctacaataaaatcggctatagcttgtcccttaatcgccttcggcgattcataccgaagatcaaactcggttaaggagaatatccactttcaaattcttctttttaatattggagccgatagcatgtacttgactacgtcgg

SEQ ID NO: 22369 - DNA, 9174 bp, Oryza sativa
acgacccactcaaataagccgattgcaccagggcatctaaaagctgtcttatggatatcttcttcagccataaagatctgattatatcctgcgttcccatccatgaaactcaaaattttattccctgatgcagcatcaaccagctgatcggctactggcattgggtattcgtcctttggtgtagctttattcagatctcgaaaatcaatgcacaccctgaccttgccattctttttaataactggaactatactagaaacccattcagcatatcggcaaggacggataaaaccagcatcatacaatcgtttaatttcagctttgacaggttcaagcatgtcggctttacatctcctcagaggttgctggcgtggtctaacccctggtttgataggtagccgatgttcaacaatcgattggctgagtccaagcatctcataatactctcaagcaaagcaatctctaaactcttttaagagctctatcagcttggttctaaactctggagataagttcttgctaataaaggtcggccttggccgatcgcttggacctatgtatatttcttccaaaacatcggccgacatgaaaccttgaccttgcttgtcatcgagatcatctactgtatccttggtgtagacatttgaaccctccacgacgcccttaaaataatagcttgggttctccatcttcaattggctgtatatcagaaccggacacttttagaaaatctccatcccagacttttccagataaagaatcaaggccatccatctcccaaagggctaaatcggcactggcaacattaactgacctgtcgactgacacgatctctatcttgtcgccttgccattgaatcaaacattgatgcatagttgaaggaatgcaacaattggcgtgaatccaatctcttccaagcaacaagctgtaagaacccttcccatcgatgacaaaaaacgtagtaggaatagtcttactgccgactgtcagctccacatttagaacacctttggtttccgatggattaccaccaaagtctttgagcaccatatttgtcttgatgagatcctcggcatttctacccaacttcctgaacgtggcataaggcatcaaatttaccgcggccctaccatcgaccatcatcttagacatcggcttcccattgacgtagccgtttatatacaatggtttaagatgccgattctctgtcccctcgggtttctcgaacactgcctgttctggtgacagaaccaacttagccaattcctcttccacctcgtcggcatcggcttgatcgatcccgaattcggctagcaaggtaaagaccatgttaattggtgccactacgacactcttcccttttgccaacctctttgcctcatcggctgcaacatcatcggctacaggaacctgattcttaacacgccactcctgtcttggctttgctttcctcagccgatggttaatttcttgttcaacctcctggaggcgctccctgttcttcaatctttgaacccttctcttctgattcttcatgaaaataccagaaggacaccattgattcttcctgattacctcgtcctcttggccacgatcttgattcaccggacccaatctttgtttaacagaaactcttgcctgcctcagccgattacccctattatatgactggcttgagctctcgacgatatcactgcacccagggcagttttcgatagatggcaacctcatcccttcattccagtagaatctaaagaactcacatccccaatgaggatcaaaaccatcatcgtattcttcataatgcttctcctgctgcttgtcatacttcctctgatatttgttgataatcttagccgaattcacctgaaaaccctttgcacggaccctatcggttgtttggccagctgtatgcaccatattaacatgaaaaggattaccatcgaccttcatcggctttttggaatcatcgaacataatcttgcccccctcaatggccacctgaatctgctgtctaaaaaccttgcaatcgttagtagaatgagatccagaattatgccatttgcaatatctcttccaggactttttacccattggcatggtatgacctttttactcctcacccattcggctgcagctatttcagaatcgtcctcctcatcatccgacccatacatgtatggacaaacatgattaaccttcttagagcttttcctgacttccgctgacctatgctcatgcaaggttaccttctgtatcagatgtgacaagctatcaaagttttcagacgagaatttctccctgattggagcaatcataccctgaaaggccaatcggctaactgggcatcagttaaactcaagctgaagcatttgttcctcatctctctgaacctctgaatatactcgtgcacgggttcatcatgccgctgcttaatcgctatcaagtaagataatttcatctcatgaaccccactgtagaaatagctgtggaattgcttctccaaatcggcccaactattgatcgacccatatggcaaagaggaaaaccaagtaaaagccgatccagataaagataacttgaataacctaaccttcagagcgtctacagccgatgcttcaccatactgagccaagaatcggctaatatgctcataagttgacacaccatcttgtcccgaaaacttggagaagtccggaactttgaaccgattgggaagaggaactctctcaaaccactcagggtaaggctgccgatacaagcttccagtctcttttggtttaagcccaaactgttccctcattacgtcagcaattacatcggcccaccgtcgctgctgagctgccccttgtgactgttgctgcatgggctcgaactgaccgtagtgagatgtgaactgaggttgagccaatccccctggctgatattgggcttgcggggaaggaggctgatattgataactcaagttacccccttggtaattatgaaggtttggctggatattgcgcaccaagtgctcaggaacaacctaaggcattactgtgccgtccggctgtacgtggtgaaccaaatgttctgggatgacttggtttacaaattgttgtataggctgacctctaggcgctgcgaacccggccgatgcgcttacagacccctgttgctgaatcggctgaatgatttgctgccttaacgtagtctgttggatcggttgcagaggctgctgccttggtgatgtttgctgaactggttacacgacctgttgctggattggttgcataacctgctgaattgggggtgtctgctgaatcggctgctgcggtactggatcaaccgcatgttgaggcggcaaaaacatggcagcaacctgatcttgggttggccgattcgcaacctgcccactatgctgtggatgctccctcgttaacaaccgagggttcatcggctggcctggcgccatagctgatgtagcaggtaggggagttgatgttggcgccgtcggctgagttgtgggtgcaacggagggaactgcatgaatagatggctgaacatcggtgagcccacatcgataatttgggaagacacctccttgcaaataaactgggcctgcagcctgatgctcagctattgaaccatcggctattgtcttcatcatgtttgataaggtaatgactaatacgccggactgattgatcaaagcatgatgcacggcgtaatcaacccgatcttggaagttattgaaaaaatcctgtgccacatcattattctgattaagacttcctccctgcggcccctgagcaccatcatcttgaactccatgcaccccgtcaccttgtactccatggactccttgagaattgtcaccttgatttcctagagagccgtcagtagcacctttgatacactacaccataacctagtattcatggcacttaactgccggcagtaaaataaagttagtgacgaactatttgccgagaatatatcaagtgccggaaataatcttgaacgtcatcttatctgccgggaattaaaaaaataggacagcaaattaagtgccggcaatgaacaaatataaataggtcaattgatctgccatagataatttaagagaacacattatctgccgggaattctgttaccgggaaaccaattttacagtgaactgtttgaggaaattttggcgggctaaaaatattggcaggccgagcaaagctccaaggcgtggaaattttcgtgggcccaacatcccgtcgcacatgattcctcatcgcatcgcactcccactctcgtcgcaccgcacccgattcctcatccacgatgtctccacacgcaccgccacacgctgcacgccgccgtcgactccaccggccggccaccactgttgttgcctcctccccacctccgacttgacccacacgccactgtcgactccgcccgccggcttccgctgtcggcatatcgctgcccaacgcctccctattgccgccgcagccgcactctctccctgacgagctccattcctctatgcggccactgattcctcctcctatgcccgacgcctccgcaccaaaccctcgactccacacatttagacaggggcgtagccaagaggtagtcccggtgggctcggaactacccagaattcggcccagagacctcacctcccaaaaaaattaggcccaaaagcctgtttagcccaaaagcctgtttagcccaaacagcccagaaatattagggttggaaggattccagtccaccaccaccaggcgcgcctccaccctccacttctccacgccgccactgtccagggccgcgcgtcgagcctccccgtcgtccgcgccggcgctgcgccatcccagccgtccactctgtccccgctttcctcgccggcgccgctccgtcccagcggtccgcgccgtcgtccgcgctggagccatcgacgcccatgggcggtgggtccgtcttccgcgtcggcgccgctccaagccgccaagcgggggccggcgacgaagcgacgctgcgacggcaactcctcctgtcctccatactccagtcctcctcgcctcctcgggtcaccgcttcgccggactctggccgccggttgcgggttgccggcttggtggcttggcgcggcttgccgcagcgccgccgctcgcctcctgcttaattggctgctccacgtctccactgatccggcgctccaccatttagctcaggtaacgaacagatcaacaaaacactagaacagctgcctaaatcaatttgtaattagagatcagtgaatatgtgaataagaataactgaatatgcaatttataaattcttactaatgtgtgctattatttgtaggattggtaaaacatgaagaggaacggagatcaaggaatcggctcggatatccacttgttcaggtaaaaaatctcccggttataccagatccatgatttgtttcttctgaaatgagtgaatgtatgcatgtatgtatggattgtttcatgtgttaaattataagtgaatgaatggacaaaataaacaaggagaaaatagagaaacgagaaattatctacctgcttggctgtgactgttagttcatatgccttgtcagtctgtcactcttcttcctagtagtaccatgatacacatgatacacttattattatcgtcctgctcacaaaaattgcagagttcatcatcaaggatagacaattagaggccttggatagcattgcaatgtcaatgttgcatatgcagcagcactgtgcaaaccaactttttttttatgtggaggaatcttgccactgagcctgtttggtcagttatattgttgacatgtgtgagaaacagctatattgttgagcctgtttgatcaaatatttattttaagtgacattataatctatttccaagtttgaactatttggctttatggtgcagtttagtcgtccactaccgattttgctgcaatcaacctagatatcatccaaggtgtacgttgctttgctgagcatctaccgaacagaggtcccgaacaacaaatgtacaacagttagtttcctcccgcttgccatgagtactatgctaaaatgctgaaatgttatatcctcatgttatatttgtcttgcgcaatgtttttttatcttttccccatgggtacactggtgagtacttgtacttcacgcatagaaaacaccactcaaacacaaactaatttaagtggcctctaaaatttgattgtcaataccagctatggataggtgatggatgtaccttcctaggcacaatttaaccggacaatgaaattgaacatgtagaccaatgtcctgatttaggtggtggcacagacattactattgatccagcatatgtttctcctgctagatcaggtatagatggaatagtagttgttaatgcaaatgaaaagatagccatttcaccctcttctcagacgcaatcttttatttttctgttttttttttacagaattgctaggtttttgttagaactgctattagaaaaattgagtcacttggtgaggaagtggaaaagttgactgaattacttgctaattctcgagatggacgacaatgtcaatccctaagtcatgtcaaattctgcaacaacttaaatgaggcaaataatgcgatgtatacagttctattctaaatgatcagtgcttgtttccgtttcattacttttggccaacaatttgtattggttgaacaggagagtgcaaatggctagctttttgttagagctactgatgctatcctggacatgaagagttgcatgttgaaggtggtcgcttgttggttgaattatttaatgtacagaagtacagatcggtggaccatcgtcatacaagagtcttggaaacttttgctaattaaatagacttcttttgtatgaatgcaaagacaatgtactcgtatatatgtacactgatgcaagtgtttgcccactctgctgtgctggatataactacttttgatcttgtggaatcttaaagtcagtatgtttttttcatgcaacttaaagtcattatgttaaacctgagttgttgaatgcagtggcgaagccaccgtaggggccaggagggccaacacccccctaacccctatgtgacctcccctcccctctcttctcccatggataattagcccttataatctagccattaattacatcattagttgcagatgagactagctatatagaataactgcctagctatatatatataggacttatgaaatgacttagttaactgatttatcattttaaaaatgattgcaagactccaattaaaataatggaacaaactgtttaaattggcaaattatgatctatgggttctcattctctcttctagctaatcgctataacatgtatgatgtcgagttaacgatcatacatcaacgctacaatatcactgttcattaaaccttaagtgagttaccacatctcgtagatggcaccccccatctctaaatcctggcttcgccactggttgaatgcacgttgaaagtctatggagtcttgaattgctggatgtgtgttgaatgtctatggagtttgtactgattctgtgggctgatttggtaccgatctgaatttgtgtacattggacccgttgtactgatttggtccgaaacaaccaagtgccggtaaaactactaactgtcagactatatgccagggatgctctaagcatcaagggcagttaattgccacggatacaactatatgccgggaatactctagtgattctagggcagttaattgccaggaaaaaaaatatctgccgggaattctcttttgctacaggactttatagggcggtttttaagtgccgggaatagttttcccggcagatgaattgccattcaatgcacttatctagggcagttgcaatgaagggaatactaggtcatggtgtagtgatactaggttgcgccgagccgtctggagcttgtttcctatctccatccttaaaagagctgatccaaggatcatcagcaatcacctttattttgtatttctgaacaagtgttcccttgcgggtctacatgaatgagttcaagaactgatcccgtgcttgttgcaacattgtttcaaactctttcttctgctcgggcgtgaatttttccggatcgatcggcacgatgttttcttcattgacgtcagtcaatcctaacttcagcatcttttacttaacagagcctgggctagatggtggtggtggttgtttttcggctatgaggaagaactgtcggctgacttcttactggtcccaccgggcgtgccaaaagcgtgttaacagaaaacacgaggcctgagagatctgcttaactccagtgcaggtccaaagctcgcctttgggtgtactagcgtgacagttgatttgatcctgtaatcaacaagaaatagaagcaaagaaactgcggttaaatctataaatgatagccgatcggctagatgccgatgacatatcatttatccctgagccgatgtcatatatgaatcgatcggcaattgtaaatagataataaagaactaaatctattcaatcggctgtagatatttccaatatacagttcttatatcgatatatatttaaatcaagtgattgagatagatcggtcaccatgccgagacagtataaatcacttaggtcgaaatatatattaataacaggtctatatatgttatagcatagctgatcagatagacctagcatgtatcggataatactccgatactactctatatcaggatattaaaataggtataatatatcaaacaaaggcctaatatatttaaatatagcaatatcttgacgtaaaggacagatttaatatgtcaattaagcatataaagcaaatatagttaaatcagataagatcggctgaaactccgatgctaccctaatcggcaaccagaagacaggttagagattgatcttctaagcacgacttaataaatcaaactcaactgatgcagcattaagtatgaagagaagaacaatatctagacaatcaagccgctggaagtttcatagagtggtaaatatcttatataatctgaatcaacgtcagaatctaacctaatcggctaccttcctcgatagatgttagccgattgtaggttagacagcgatattgccagagattatgt

SEQ ID NO: 22370 - DNA, 5507 bp, Oryza sativa
tgataactcgacgaatcatataaacaagattagagtatcatgaggatggaagcactaatctcaagaacgcaagccgtcataacaagttttacctcttgttgaagatcgaaaccgatgcagctcaacccgaaagcaagaactcgtcgaaacaaaactaaatcaaaagggtggtgatgtgccgaaattgtattgaacgtgtgttaaaagttacataggactcgggtctatttatacccgagaattacaagatacgtccataacggacacgactactatctctaacaaactctaagataccataagtctttgcggcagacttttgcccaaacgtatctctaaggaaattatataaaacatcctaattaatagatacaattgcctcctcagaactctatccatgtacggcaaccaccttgaagcacctcaatcgaacccgacatcacacattaagttgtattgtcgggatcggctacgtctgcttacctagcccgactcagactcagccgatcttatcgtagccgatctggactccagccgattcctgccttgttttcgaactcaatctccgcctccgactttgcttcgatctaatcttctttcccaatgccgatgttaccaaatttggttgttaacaagctcacaccgaaaccttccatatatagaggaaggctatataaaaaggagagggtgctcatattgtacacttgtgcttgacttgtgcttgaggatgatagaatgatgaatgagaagagagtctcacccctatatcttgtgtctccacttttatagaattatgggacccttttggattatttcgtgtagcaggagggttgcgtaatacgttatcagcacgacgttctaccggagaccaagcaagaagaagggtgagaactcgcacatccatttagcatctcgccgattcaatcacgaaaacgaattcctctcctcgttcgcattccgttcttgtttttctggagaaatctgctaccgccgacttggagtcgccggcgaaagccgattagcaatatcccggaaaagctagctggctgagcgcgtccctccgcgccatgccgcacacggataccccggcgacaggccgcgtcgtcctggacgcacgccggccaccgcgcccccatagctgcactcgcgccatcactggcagccgttcgcgctcgccatcaatggccatcgcctcactgcaacgagggcacgcagcaagcccatgccggacgcgtgcgccatggcaactaacagcaaaataggagaggagaacaaaggaaacaagacaaagaagaagaacaagaaaaagacgccaatggagacgtcggccactgcatgggccacgccactacaccgaactccacggcgtcacgaccggtcgtcgctcagccgcgcctgcacagaggccgccgctagcagcacccacgccgacgtccgccgccgctcggccgcacctcgcgccaacccggccgcgcccaccgccggccgaaccgccgcctggccgcgccatacacggccgcgtcaccgccgcacggccccgcgccgcgccgccttgcacggccgcgcgccaccgccgccgccgtacagccgaaccccgcgggcgaccgcaccgccgtgcgccgagccgccccgccgggcgaccccggcgcgccaccctgcagcgcccggtcaccgcgctacgctgccacctcgcctggctgcgtcgtcgacatccgccgccgctcggccgcacctcgcgccaacccggccgcgcccgccgctggccgaaccgccgcctggccgcgccgctgacgtccgccgccgctcggccgcacctcgcgccaacctagccgcgccagccgccggccgaaccgccgcctggctgccgtgcacccgtgctaccgcgcctggtgccgccgccgctcttcctcagcccggccgcgtgctcgcgccaccactctcccgggcgccgcgtcgcgccgccccgatgtcggccgccgtgctgttggacgtcgccccacctccaaacggccggccgtcgccgggccaccggctctgcgccgccgccgccgcgtcgtcatgtatggcaggcgacgcaatcgggggagtcaacgggaaaggataaggaaagtgggagaaaagaaggaaagagaagaagaaaaggaaagaaaaaaaagaaaaaaaaaaaaggaaagaatcctatgattttgcaaaaatgcccttgtttttttggaaattaagtgcatgttcctctgtattggaatctttgcattttaaaccctgaattttccagaaaacacataaataaccctctgcatttgggatatttgtttgaatagcattcggaatttgcaaatatcaccaaaatcatattctcgcataaaagagccacgggacattgaatttcgacccgactttgtatttcaggtacctttattgctgatgtttatgattatgaaatttaattatcgcatttacgattattgattatttgtgatgcttttattacttttaattaatatcattgcgataaaatgtatagaattgcatagtatatactagaattatttgcgggaattttgtgtaccattatattgcaacacttgtgcattttaccagcatttaatttgcgcatatttttttttgaataacgaaagatgactggtatcgcggattagaaaattcgctgaatctagaatatctctgacatatttgttttccaatgtcgaaattacagtagagcaagaagccctatggtaccgttaatccaatcgcgctataggcattgacttgatgagtttgatctagcatttcaaactctcgccagtgcctcgaagccactctcatgaatgagtaggctagaagaataagcgcgttagcatttagaagattatggtacataccctacctctcgtagagcaagaactatgagcaagaatgggtatttttcgactatgattcactgagcagatgacacaaagagtacggtaatacggtgcaccgaatactgcgaaaactcttgatgttctacccgaacatgacaaaagtcgcacgcaagcatcactggtgcacatacaagaagtatgcctaactagttgataaatggaattgcgtaatgttcatgacagtactcactagaagagcattgtcttccaaaaccaactagcacagttgataacgaattcaacacgagcagctagcccagtacacttacctcaacgaaagaagaggaaaggggggagtagaacataggtggtcaaggtgaaacaatctagaactatgaacattaaaagaaaaggacaatcctaatagcacactcatcatgaattgagggggagagcttctagcctatttgcattgatatggacgaagaatctcctatgctatatcggatcggccctaaaattgatgtcaggatagtaaataattgccatagctatcgagcaagaagctcgctatgaagttaattgaatccgaagtaccgggatacctcgttgaatcaatatacttcgtcatcacttgttgcaatctttgaatagagcattgcatcgaaaaatggtccttgcccaagtagagcacacattttccctgcaatagagaattattttcggtataaaattgcatatttaaggcatttactattttgttgctcttttctagcacatagttataatgctttgaattatgtgtagcgcccaaacataagagaaaaagaatgaattgtggtccgcataaccacaaataacactttaagagaaagaggtattttccagacccatagaactgaaaatattatgattgttgctggcagcaacaactaaatttgtcggcctagaatgcgccacagtcatattacctatggaacaattgtgcactttatagaagcatctattgtccgtcaaccccgttgaactctctaaaaagtgtgatcatttgggctacacccttttagcaatggattttcagccatttctggtcttagaattataagaataaatattacaactcgtatgatcatggcacatatatgcataattttcctaaatcatgaagatttgtgtgccaagtatgcaccgacaggaaattagtgcataaaccacatatagttctagcatccctgaactggattgtgaggaatatctgcggctcccatttggtactatatggataaatgcgcttccaaagcagcaaacatccagtgtctcttagacaccgtgtctctgccaagactgatccagcaagatcacgtgaacaacaattgaactcactaaatcatctttagaagtccgcgaggacaatgctagcattgcatttgatgattggtgaattggtagcacgaagtaccaaatatccgcatgaacgaaccaagtataagctatgaattgcaatatatgctatatcattgttgtaatacccgtagtagaaaaggacatgtagtccccaaagctgcggattctgaaagaaaattcagaccatcggcataaacatccatcctgcaactaatgctattgcatctgtttggtttatgtgcatatcccactaatgcgtttcaaaaggctctctccgaaggtcgggaactttttatggagatagttatgaagcctaaaatccttgacaaataagaattatttccagtcatttagggggggagaatgaacccctagataggaaatgtcaggaaatatgacagcagaaagggactaatgcatgttacaccacactagtgaatgtagtttgcatagagaattaaaactgccaaattactttgtaaatacttttgtgatttcgaaaagtttgactaagttgcatgaatgaaatgcaccggaggagggtgataccgaagaaagtaaaggtacccctcgtcttgtctagaggcctcgaacaaaaagaattggacaagaaacttcggctcctcacacccctaaagtaaccggagacgtctggtgaaaacagggcaagagggactatcatactcaaagtcaaaaggtaccccaccgaatagaaggggagtgtcacaccctgaagtttcccccccttttcttgctttaaaaattggttaaataaattgcccaaagaaattatcttaattaacctagagctaaatccctaattaataaatgcatttaataatcgaattcggcgtggtggaatttttcttgagttccccatgctccaatacattaacatgatttttagtggaattttcagagccttggaaataattttaaccaattaaaattgagcaagtgcaatatttttaatcccaggaaaatcctttttctccttttcttttcttttccctcctttttctttgttgggccgtcggcccgtccctctcccgcggcccctcctccttgtgggccggcccaagccgcccctccctcctctctcgggacgccgacaggtgggccccacttgtccgtcgtctcctacctccggccgttggagccggagctccaaccgccgctgccgccgaaatcgccacgccgccgctgtttcccgccttctccgctccacgtcgtgcctcc

SEQ ID NO: 22371 - DNA, 3523 bp, Oryza sativa
atgcctatcaaaaatagatttttcagatttgaaaatatgactatcaaaagtagatggagggagtattttggaatggagggagtattagtaaatagaatatgatcttgttggattgagtaatatgcaatcataactccccaatgtacttttgaagaacagtgagagattgattaaaaaaaagaacattgagagaagatttgcctcattttccacgcgcatgcttcccgaactactaaacggttttataaaacaaattatataaaaaagttgcgttaaaaaattatacaaatcatcttttctagttcaaaataattaatactcaattaaccatatgctaaagattcaccttacgtattttcactccacgtagtcagcacataccacatttgaactcttctggtcctaattctacctcagttttttaaatagatgatgactttgattgttaacacatatttaacatttattttattaaaaaatttacataattattatttattctgctgtaagttgttttgtcactaaaaatttttttggggcatattttaagtatgatttatatcttatgcatttacataaaattttttaaataagataaatagtcgaatgtgtgtaaaaaaaataacggcgtcgtatataaaaaaaatagagaagcacatattttgtgcattgacttaaacattcttaaatgcaccaacccatggacaaacacgtactccctaccaaacacatgtatgttcctgcttccaaaattaatggcatcatttgattttattaaaaaaaactttatataccaccttcatcccaaattagtgatccttttgactttttgcttgctacgtttgaccatttgtcttatttaataaattagtgcaaatataaaaaaaaggataagttatacttaaagtacttttgatataaagcaagttacaaacaaaataaataataatttcataattttttgaataagacgaatggtcaaacgttacagacaacaactcaaatcgacaagtattttgggacggatatagtataaaagtttattgaaaagatgaataaatccattttcaaatttacaatggtttactttttcaatcaaatcacacaagatagtgtgaggtttcatattgatataggataaaaaagttacaagatcatagctatgggagatcatgactatcatcaggaaaaataaaacaacaagccatatcacacgcctacaacaaagcgaaccctctaaggaaacaaacaaaagcgtcgtgttttatctacactcaacgccatccacgtccttttgttgtagagggagagggcgatagagaaatggatccattctccctcacatgaacccaccaacatggtcattttgtggcggtcagaagcgtcgccgcaagaggacaaatcgtctgcataagagattggtagaaaatggaaatggaaaagcatcgccgctgtcaacctggaagcagaccaggatgtcgcccaaaaacatccttccctcgcatgctgtcgtgccccagtcatatgtgacggttgccaccatccgaacaccttcgacgtgtggccatcgtaccaatgctccaataccggtcgaccattgagatgatcaatggcccacacgcggaactctggtaagtcgtcgacgtgtcggccatcatctccccacatcatacttaattaatgaagtgttttttgtgccaatcataaccatctttcatttatttttttcacatactttcttttctcaatcaataacgatcatctttaatttaatttttactctccttttatttttttaataacttcagaagtgatttgcgacagaggtggtaacatttaaacaaacaagtacacccaacataaaagctttcgttgtactttgtagaataaggctgtgtttagttagttggccaaatttttttttgacgtatacggacacatatttaaagtattaaacatagagtaataacaaaacaaattacagattctgcctgtaaactgcgagatgaatttattaagtctaattaatccgtcattagcaattttttactgtagcaccacattgtctatatcatgacgcaattaggctcaaaagatttgtctcgcaatttacatgcaaactgggcaattagttttttttcatccacatttaatgctccatgcatgtctccaaacatttgatgtgacgtttttggctaaaattttttggaatttaaacacagcctaagtgaataacttcattacttccctgctggatgtaatgagtgcacctggttgttcggactgcgatgctactaaggctaagtttgagatgataggaaaagaggagattgagaagatacgcaaaacgcggtgagctattatcttatgattagttgagtattaactattttaaatttcaaaaatagattaatatgtttttaaagcaacttttctatataattttttttgcaaaataaatatcatttagtagtttgggaagcgtgcgcgcagaaaacgaggtgttttctactcaatctcacagcaatctctcctatcaaacgaagccttatactagcaacttctcctttaccatcacattacctttcctaactgaaaattttgattccttctattgtaaaaaagagtggtttctgatccaaaatttacataaatactccctttgtgccaaaaaaaaaaaggccaatcctacctacattcgtagctaggaattcgttttttttttacagaatagtagatattactacttcaacttttaagagatatttatattagaactttcagaaataggggataaatttattaggactagataaaattaagagtaattgtattagaatttgataaagtataggatattgggataatttatttttcttttatatttgtcagtgacatgggaccgggagtatcatgacttagagacttgaggcagacacgatcgcccacgtggcctaaccccctcgggggggtcgggcccgagggtgatacggccgcccttctctttgtctccccgaggggtcggaccgctaccgcctcggccctgagggccgaggcgccccgaccccttgtgggttttgcgccgcgtatatggggtaggtgagcatagcggggctcacctaaccacatttattgcggtttggacgagcgcgtcacgccgcatggaacgcagtgcaacgcgctcgtttatccggtctgtgaccggtcacagaccggtcagatcgtgggttaggtggcgataggcggtctgacgcacgcctcgccccatcccgtcaggacgagagcctccaagcactcgtccctagccggaaccggcgtgttagctcctggagatggcacgttggttccggtcagatatatgccaggctttatcctaaccattacaggcaagatattgtatgaagaagggtgaacatgcagattgttaaactgacacgtggtggacaagaatgaccgatttgtgatcggtctgacaatggtcatgtcgtcagcagacagccatgttcccacgtcgcgcctgctt

SEQ ID NO: 22372 - DNA, 16128 bp, Oryza sativa
gaccttgcccacttagaaaaagggggaaaaaagaggagaacgatcctagaacgagaggggggctggctcggactttgtagcttcttcatacacagatccaccaaaacacaggagtagggtattacgcttctcagcggcccgaacctgtatacatcgcccgtgtcttgtgtgtttccattctcgcgaactttccacagaccaagagcttagaacctcacacagggcccccggccgaactggcaaaggggggcctgcgcggtctcccggtgaggagccccacgctccgtcatctggcgcgccaagtagggggttctgcgtgtgttcttctaagctctcgcactctttcgtgtgcgccaagcttttcctgttcagcccaatggccgaacaagcaaaggcgcacaacctctctccgagcgttagcggcgacgatggggagccaaacccacgccgtcgagctcgtactccaccgccccctccacgccaaagtcctaggcgggaggaggcgctcgagagggtcgaaggatccgcgacttcgacatccacgggtgatggggaagggcggcgagatggggagcgtcgcctcctcgtctacggcgacggcagcacgccccagggcgcgctccaagctgcgggcgcactcctacgtcacccgcccattgtccttgacccggagtctccagcccaacgttggctggacgacgtggccaacttggtcatgacggcacggcagcgcctaggtgctggtgggcggtcctccgccaccaagacctctggcgctgctaccaccggctccgtatcgtcaaggcggagggcgcggcgagcggcggctgttgctcgccattcggccgccactccttcgtcagcgcctccgacccaggaagatctgcgtggggggccggatgcccacatcgatatcgagcgccggcgtaatggccgacgtgctgcccacgcaacggagggcgcctcctcgtccggagtgtcacatcaacacggacgcggggatcagccctccgtgcccccggttggtggtgtcggctgtagagcctttgtggcgagccttcggaacgtccgttggcccccaaggttccggcccaccatcgccgaaaaatatgacgggagcgtcaaccccgccgagtttctccaggtctacacgaccgggatcgaggccgccgggggtgacgacagggtcatggcgaatttctttcccatggccctgaagggacaggcacggggttggctaatgaacttgccacccgcgtccgtccactcttgggaggatttgtgccaacagttcaccatgaactttcaaggcacatatccgtgcccaggtgaagaagcggacttacatgcagtacagcgaatggatgatgagtcacttcgctcgtacattcagcggttctgtcaagtccataacaccataccatgcatccctgcacacgcggtgatctacgcgttcaggggggggtgtgcggcacaaccgcatgctcgaaaagatcgcctccaaagagccccagactaccgcggagctttttcagcttgcggactgagtggctcgtaaggaggaggcatggacctggaacccctccggttccggtgtggcagcttcggccgcccccggatccgctgctcagacagggcggcgtgacaggaggaggaagaagaggtcagcccataccgacgacgagggtcatgtcctcgccgtcgagggcgcttcgcgggccacccgaaaagggaggcctgcgggcgacaaaaagaaggaggccggcgctcccagcagggagcgcccaaccggcaagtggtgcatcgtccacaacacttcccttcacgacctcgcggactgccgcgcagtcaaaagtttggctaagcggacgaggaagtgggaggaggagaggaggcaggagcgccgagagggcaagtccccggcggttccttccggcaatcggcgaagtgaggccaaacagaaggcccccgccgaggacatcgatgacggcgatgatgacctaggtttccaagagcctggggccaccattgccactgtcgatgggggagcgtgtgctcacgtttctcgccggagcctcaaggccatgaagcgagagcttctggccgcggcccctactcatgaggcgacgcgccgggcgcggtggtcggaggttgccctcaccttcgaccagaccgaccacccaccgtgcgttgcccggggaggacagatcgcaatggtggtttcccccactgtttgcaacgtgaagctggggcgtgtcctcattgatggaggagcagccctcaacatcctttcccccgcagcctttgacgccatcaaggccccggggatggtgctccggccgtcccagccgattatcggtgtgacgccgggtcacacttggccgctaggtcatatcgacctcccggtcaccttcggtggatccgccaacttccgcacggagcgggtgaactttgatgtggcggacctcagtctgccctacaacgcggtcctagggaggcccgcgttggtgaagttcatggcggcagtccactacgcctacctccagatgaagatgccgggccccggtggccccatctctgtccatggcgacctcaaagtcgcgcttgcttgtatggagcagcgcgcggaccacctcgccgccgcgtccaagcccgagggtggcgacgagaggcttggcacctccgcccccgccgccccgaggcagcggatagtcacatgtgacgaggtcccggtcaaggaggttgccctgggcgacggcccgtccaagaccacacggatcggtggtcttctggacggcaaataggaagacgcgctcgtctccttcctgcgggcaaacgctgacgtcttcgcatggagaccggcggatatgcccggggtccccagggaggtgattgagcaccgtctcgccgtgcggtcgggcgcaaggccggtctggcagaaagtacggcggcaggccccggaacgtcaagccttcatccgcgaggaggtggcgcgacttctggaggccggattcatccgcgaggtcatccatccggagtggctggcgaacccggtggtcgttcccaaggcgaacggcaagcttcggatgtgcatcgactacaccgaccttaacaaggcatgtcctaaggacacttaccccctgcctcgcatagatcagattgtcgactccacagcggggtgcgaccttttgtgttttctagatgcatactcgggttaccatcagattcgcatggctagggaggatgaggaaaaaactgcattcattacccccataggaacttattgttatacgacaatgcccttcgggttaaagaatgcaggtcctacttttcaacgtactactcgaatttctttgggtagccaaataggacgtaatgttgaggcttatgtcgatgacttggttgtaaagacgcgcaaccaagagaccttactctcggatctagcggaaacttttgagagtctccgctccgcccgcataagactgaaccccgataaatgcgtgttcggtgtacctgcgggcaagctcctcgggtttttagtctctgcccgaggcatcgaggccaaccccgagaagatacgagctatagagcagatgcgccccccagcaagcttagggatgtgcaatgcgtcaccggttgcatggccgccctaagtcggttcatatcgaggctgggagagaaggcgctacccttatttaagctcctcaaacgctccgggccgtttacttggacggaggaagctgaacgtgccctcactcagttgaaggcgtatctcagctctcccccagttctggtcgccccggagccaaatgaacccttgctactctacttagcggcgaccccgcaagtggttagtgcggcgttggttgtggagcgcgatgaggacagtcctcattccgcgcacccccaccctgtgctggcttggctcgggagagagcagggaggagaggcccccgagccgaacggtggcccaaggcccccgacgaccggagcaggccctctgcccgcttgtcagacggtgccaggtgcccccgacccccaggatggcccgagggccactgcgggaaggccgcacctatcgccctctgaccccgaggctaaccctgtgccgactcgacccgggagagagcagggagaagaggcccccgagccgaacggtggcctaaggcccctgacgaccggagttggccctttgcccgcttgtccgacgacgccaggagcccccgacccccaggacggccccgaggccactgtgggaaggccgcccctgtcgtcctccgaccccgaggtcgtcggcacagaagacgagtgcaccccgcgaggccgcttggacaaagagcgccccagggacgtggcccctagcgaagaggatcggccccaccgaaaggtgcagcggcccgtctactttgttagtgaggccctccgggacgccaagacccgataccctcaggcccagaagatgctttacgctattctgatggcttcgagcaaactgcgtcattatttccaggcgcatcgggtcacggtggttacgtcttaccccctcggccaaatcttgcataatcgagagggtactggacgggtggtgaaatgggcaatcgaactttctgagtttgatttgcactttgaactacgccacgctatcaagagccaggccctcgccgattttgtggcagagtggaccccagcccccgagcccgtctcagtccccgaggccagctcgggcccctcgcagctgcctcacaccgcccactgggtgatgcagttcgacggttccctgtctcttcagggcgccggtgcgggggtcacgttgacctcgccgagcggagacgtcctcagatatttggttcgccttgactttcgggccaccaataatatggcagagtacgaaggactccttgcgggactcagggtggcagctggactggggatccgccgcctcctggtgttaggcgactcccagctggtcgttaaccaggtctgtaaggagtaccggtgctctgacccgcagatggacgcttacgtgcgccaagtacggcgtatggagcgccattttgacgggatagagcttcggcacgtgcccagacgggataacacggttgccgacgagctctcacggctcgcttcctcgcgagcccagaccccaccgggcgcctttgaagaaaggcttgcccagccttcggcgcgacccgacccctcaggggagacggacgcgcctgacaggcccccgaggcctgtcggagtccaggcctcgggacccgaggggagcgctcccagctcccttagattgattgcttggatcgttgagatccaagcatacctcacagataagactctacccgagtaccgcgaagggagtgaacgcgtccagcgcatctccaaacgctacgtgctggtagaagggaccctctatcggcgcgcggctaacggaatcctcctgaagtgcattcctcgggaacaaggcgtcgagtttcttgccgatatccatgaaggcgaatgcggatcccactccgcctttcgacaaggtttctattggccgacagctctcaatgatgcggtcgacctggtccggcgatgcagggcgtgtcaattccacgccaagcaaatccatcagccggcccaggccctgcagatcataccactttcatggccatttgctgtctgggggctcgatatcctgggaccgtttaggcaggccccgggcgggtttgagtatctgtatgtcgcgatcgacaagttcactaagtggcccgaggcttatccggtcgtcaagatcgataagcactccgcacttaaattcattaagggcatcacagcccggtttggagtgcctaaccgtattattacggataacggcacccaattcactagtgaacttttcggcgattacttcgaagacatgggcatcaagctctgcttcgcctcacctgcccaccccagaagcaacggccaagtggagcgcgccaatgcggaaatcctcagaggccttaaaaccaagaccttcaacatcctaaagaagcacggcgattcgtggatcgaggagttgccaacggtgctctggtcgaaccgaaccacgccaagccgagcaaccggggaaacgcctttcttcctcgtctacggcgcggaagcggttctcccatccgagctcaccctaaggtcccctcgggccaccatgtactgcgaggctgatcaagatcagcttcgcagagatgacctcgactacttggaagagcgaaggcggcgcgcggccctccgagccacgcgctaccagcagagcctgcggcgctaccatcagcgccacgtccgggcccgatcactctgcgtcgacgacctcgtcctacgccgcgtccaaacgcgtgctggattgagcaagctctcaccaatgtgggagggtccgtatcgagtgatcggcgtcccccggccgggctccgttcggctggccacgggcgacggcacagagctgcctaacccgtggaacatcgaacaccttcatcgcttctacccctaaagggggatcgggtgtcaggtttcgggctcaggccaaccccgcacccccctcgggcgtgcagggttggccgggggctaccacatatgcatattcttatatctcttgtatctgtatttcaataaaaacattttcaatttcctaaaggctgtatctgtgctgttgtttccttttgaaggatcttgacttgaaataagtcactcgtgttcaatcctgccctcgggggctcgggtcggctaaaatcgccaaacggggcccagaaccgagccgtgccccggggcgtagtgaactccgggggggaatcggcaaaaacccacaatcgggtcacccataaccctcggtcaccacgctcccggcctggccagtctcgacatgtggatctccccaggcactagccccgacccgagccatttgaggactaggacctgggcacgagcccttgttcaagccaagacacaaaaggaccgcggcacagacatcctcgtgtcatacacacaacaaatagaattgacacaaaaaatttcctctttatttgattgcagattaaattagtctatacaagaagggggcccgaaggcctcggaagaagaaaagaagaaactatttaaagattggcgggggcctgggggctcactccgatgcacccgggtcgccagcctcgtcgccactgtcgcccacaccgccgtcatcgccctcctcgtcggagttgagggcgaacgcgagccgaggggccgaaccctcgaagctgtggacgatatggtcggcggcatcccggacctgcgcgcgcgcgccgtcctcggtcccgggagggaactcgtccagcgccgtccatggggagaagtcggggtccctggcctggtaactcgccagtacgagctccaccgctcctcgggcgaggtccctcgaggatgacttaatcgtcccctcgagctcctcggggagccgctggagagtcccggccatctccgagaagcgctgggcgaggcccccctggttggcggcgtacttcacagtccgcccgccccagagacccgcctgccgcccggcgcggactagacgggagacggcgtcccgaagcatgccgggccctacctcgcctgccaagcggagggcctcgacctccccggcggacgagtctagcgcgccctgcagatcggcgatggtgtgttcggcagctgcgaggcgggcggttaagtcgctttcgcccgcggccgccccgccgctgcgcgccctcgcgtccagctccttctcccgcgcctcgagctcagcggcccgctggttcagcgcggccctctcggcgcgggcaccttccagattacggcgcgcctgctcctcccgcactgcctcacggagggacaggctgtccgccagacgttgcgccgcggcctcggcctcctcgagagctcgctcccgctcggtgagcgcgtcctcgcggaggcggagcgcggactcctcttcggcgcaggcggcctcgtgcgccgccagcgttgcctcccggatggcaacggcggcctcgcggtccaccaggtccctctccacgacgccggcgcgctcttccagcgccatggcacgagcctcgagggcctcttcgcgccgccgagacgccgcctcggtctccgccgcccgccgttctcgggcagtggcagcatcaaggaccccccgggcggcgtcgagctttttccctagctccgcctcccagctcccgtattgaaggcggagggtgtcctgcgcctcgttcatcacagtggtggcgatgagggcagccccccgctcctcctccacctccttggcgatctcccccagcaccttccgacgggcttcgagctctgagacgtgccggcggtgtgccttgcggcccacctccaccatggcctccaccgagcgacgcccctctttgacacgtgcccatgcggcgtcgagctccacccgctctgcttgcaaggcctccatctgggcacttaacccgtccaacaccgtggtgttagcgacggccaaggcctgcagaagaggttctgcgctcagtggagcaacggaaggcgtggggaagagccgcctcgaagaggatgccgcgcggcttggcccgccgatggacgtgccggactcggggatgtcccccggacctggtttgtcctgagcgtcgcacgagtgagtgggcccaagcgatgcgcccgcggcctcgtcgcgagctgcttcggaagtcgtcgtcgcctcggcctggcgaagtctggcctcctcccgagcggcttcttcagcttggcgagctcggacggccacctgagcagcttcctcggcttctcgaaggcaatccgcggcctcttgccggtcagtttcacgggtcgcctcggaggatgtcgtcgcctcggcctggcgaagtctggcctcctcccgagcggcttcttcagcttggcgagctcggacggccacctgagcagcttcctcggcttctcgaaggcgatccgcggcctcttgccggtcagtttcacgggtcgcctcggaggatgtcgtcgcctcggcctggcgaagtctggcctcctcccgagcggcttcttcagcttggcgagctcggacggccacctgggcggcctcctcggcttaccgtaggcgatccgcggcttctcgccggtcagattcccgcctccgagcctttgtggtcgccgggtcctcggcctcagactggccggacttggaatggcgggagggacgcgacgggatctcgctgaaacagaagaaagaccagaagacaaacaagatggatgagtgaaaactcgcgttgagggaatgaatacggccacgatgggcgtgggacgaacctgcgagggggtcggttaaacgaccaccttggaggggaaataaggtttccccgggatggttctgtcccccccatcttgcggggccgtttcttcttccgctcccctcgggctgcgacgtcggcgtggccccctccgggcgcctgctgctggcacgcgccgccccgccccctcggggaggagatgggggaggggttccttcctgcttcctcttcccccgggcgtcggcagggcggccgctccccgggcccccgtcgcggggcccagaagcacgaccccctcccggggtagatcgttcccccctgcggctcccgcccgcgccatcgtggcctcgaggagcccgctcctccgacgccctgaccgcctgcatgatggtcaggatggaggcacggtctggatcgctgcagagggggaggactccttgagaaatgagggatgcctccacggagctgagattcagcacccgttggaccactatcttgaagtcctcaggagcccagtcccatctgaccccctggtgggtcctcatacagtcctcggacccggtgtactcccaggcgccccgggcgcgccgctggagtggcgcgatccggcgacgaagatagtcgccgaacaccatggcccctgtgagcccctgggatcgcaggcccgccaggcggtcgaggacggcgtcgtagccatctcccagatctaccggcgcccgccagttggaggcctgcgctggaggctggctcggaagtcggaggcgcgcttcgtcggcgaggggggtatagaaccagtcgctcttccagtcatcccacttcttgcggaggacgcagggaatgtagtggttcagcaccggcccccgcggctggaagtagcaaccaccaaccaccgacggcggcgacaccggctgtacagtgaagaaccaccgaaacagccgaagggatgggcgcaccccgatgaacatctcgcacaggtgcgcgaagatggccaatgtcattaccgcgttgggggtgaggtgcgccatctggagatcgtaaaactccagaacatccatgaagaaagaagaaaatggcggaaccagccctgccatagcaaaagggaggaagaagacggaccgccccgggtagcgtggcgccgggcatccctcgcccagcgagactatctcccggccggtggcagattccggcatgaagcggcgcggcagctcggcctgtctctcgctcacgatgcgggaaggcggcagcacgctaccatcaagcggagcggagccccgtgccatgacgccggaagaagagatgtttgagagcgagcgcgtgtggcgaaggtagggcacaggaaacaaggagttagggcgcaagcggcgaagacaaggggaataatagtgagaggaaggaagcaaatctcttcctcggcgactttatacccttgccaacgctgtgcccggctcctcgtttctcgcgcccactatcttgccccctcgtttctcgcgcccacgcttccactaatcccattcgcccgtttgcggtgcatgaggtggatatgcggctgtggcagtctagatggaacatctcgtgcgcgcgttaattacgctcgccgaccgaagcgccatcatcatatctccaggaaaaacgaaccggcttgtcccgatttttagaccggccccacctgtcaccaggccttaggaagtggcgtcacgcccgaccgcttccctcgaggagggcgatcgccctggcataacgccgggggctactgtcggtgacatgggaccaggagtatcatgacttagagacttgaggcagacacgatcgcccacgtggcctaaccccctcgggggggtcgggcccgagggtgatacggccgcccttctctttgtctccccgaggggtcggaccgctaccgcctcggccccgagggccgaggcgccccgaccccttgtgggttttgcgccgcgtatatggggtaggtgagcatagcggggctcacctaaccacatttattacggtttggacgagcgcgtcacgccgcatgtaacgcagtgcagcgcgctcgtttattcggtctgtgaccggtcacagaccggtcagatcgtgggttaggtggcgacaggcggtctgacgcacgccttgccccatcccgtcaggacgagagcctccaagcactcgtccctagccggaaccggcgtgttagctcctggagatggcacgttggttccggtcagatatatgccaggcttcatcctaaccattacaggcaagatattgtatgaagaagggtgaacatgcagattgttaaactgacacgtggtggacaagaatgaccgatttgtgatcggtctgacaatggtcatgtcagcagacagccatgttcccacgtcgcgtctgcttccggcggaagtggaggtaggtatgggccgtcccatcagaaggtcattcggacggcagccatacaaatctccgtccattaatgaagagaagtcaagtaagaaagagagggagagatggtgcatgtggtatccccttgagatataaaaggaggaccttgcccacttagaaaaagggggaaaaaagaggagaacgatcctagaacgagaggggggctggctcggactttgtagcttcttcatacacagatccaccaaaacacaggagtagggtattacgcttctcagcggcccgaacctgtatacatcgcccgtgtcttgtgtgtttccattctcgcgaactttccacagaccaagagcttagaacctcacacagggcccccggccgaactggcaaaggggggcctgcgcggtctcccggtgaggagccccacgctccgtcaatattagtattatgaaatggataacaaataaagttattctataacagggaagtaacttttagcaacaaagacaatgttcttttgaatgaaaaaagggggcaattttcgtcattctttttttaatattcgagttttacattatggctatcagtgatgaatgcagtcaaataatgcgtcctggtaaatgaaaaaaaaatggcagaaacggtcggctttactcctagcattcacaagatttactcaacataatgaaccaatcctttcaaaggtcaaagtgacattcgaagcgattcgttatgagtaacggcaacatgcaagggaatgctcttactaagtatatgttcatgaaagagatatcacaaagataaaaccacccaaaagtttcaccattcccccgcaaaaaaaaaaaagaaaaagtttcaccattccagtatgattcagtgaattgtatcacattgttaatcacatttttgagtaacaatggaaattgacgacaaattcgcaaactgcattcttaatttgttatcttttcatcgctacaggcctacagcaaaaaaacaccttcaattcaagtagcctgccatttcgtcgaacaccttgcacctcattccttctcgccaagatcgccgcggcgcaccggtggccaaaccatcatctcgacggggaagatgtcgccgagcggcctcgactcatcggtgttgcgccacatcctctcaaacctccacgtcgcgaggtcgagggatacgacccagtcggccatgacgaagaacagcgcgccggtgccctcgcagaatccaccgaagctcacgagcttgcagccgcgcagctggtccgagattttcgccgagagcttgattcgggagaggtcaccgacggtggccgggttcatcagcgcgcgcaggtccaccgccggctgctccacccatttccccggcgactcgagaacccacttcgcaagaacgagctgctcccgcagcgcgaagaagcagagacggccgtcgtgtgtcttgccgatccagtggttcccggcgtacaggagcatcccggtgttcggcaatggcaccgccgagagcgtcatcttggtcgcgtcgactgccattacgtatttgtcttcttcgctctggagcttgtagaccacgtcgccgatgacgaccgtcgggccttggtgtgggttcatggacttcttgagcgctccggtggccgcctcccatgcggaggcggcggaagagtacactagaatgtcgaagtgggcagcagcgccgaagaggacgacggcgacgcggaacgccgcgccggcgccaggtaggagcgcgcagcaggcgaccttgtgtccggcgacgaagcgggaggggagggacacggacgtcttcctcagcgggtcgcagacgaggagcttgagctctctcgccgacccggcgccgagctcgcggagcaggaggcgccggccacggcagtcgacgaggagggcgccgcacgcgggcgacaccgagagcgccccgtggtcgaggccgaggccgacgccggctgcagggacgaaagggggaagcgcggacggcgcgtagttgcggaagaacccgaagtacggaggcggcgcggggagcccgccggcgccggagacgagcagccgccaacggcggcacaccgccgcggcgcggacgatgtccgccagcggcgacagcctcttgaacacctcgagcagcatgtcgtcgggcactgccgacgcccccatcccctccacctccacccgcgccgcggaaccggacccacctggcggcgactgagaccgggcccgcgccgatgccttcccgccgcgaccgcgcatctcctcctccccctccatccgcggccgcgtgcgccgcgccgaatcgaactcccccggcggcgactgcgaccgggcgcgcacgcgcgcgcggcggacgaccacggccgacggcatagccggaccaccgacaacaactacctccacaacgcgtcggagattggcaatggcgcggggagagacaaaggagaactcggggaggcgcgttcttaagggaggcgagaaggcgcggcagcgaaaattttgggggggcgggggggggggggtgcgtttgagatttcggccgcggcgaggcggcgcgagggagaaacgggggcggcctactatttttgttggtgatttggtttgccttttcggcttcccctcgcgcgcgtactatggagggtttctttccgtgtatttgccccaacttttcgcgacctgccgcgcgaggggtggcttggctcgcgtagcgtcggttcgttttgggcgatttttgggcggggcgggtggtggacgcgagtttggggggcaaaacgaggcgaaatcagcgggaaacggggtttatttttcgcgttttaggcgttgcgccgcggggaggtttgaaatggtttcgaatcgagtttgggggcaaaacgaggcgaaatcagcgggaaacggggtttaggccctgtttagttggcaaaaaaaaaaatattgatcttgcgtgtcacattgaatatacgaacacatgtttaaaatattaaacgtagtctaataacaaaataaattacatattccgtctgtaaactgtgagacgaatttatcaagtctaattaatctattagcaaatgtttactgtagcactgtattgttaaatcgtggcgtaattaggcttaaaagatttgtcttgtaatttacacaaaatctatgtaattgctttttttctatatttaatattacatatttaatatttaatatgatagcgtgaaaagtttttacgtgggaactgtcttattttcgcgttttcggcgttgcgctggcgggggaggtttgaaatggtttcgaattctcgtggggtttcgcttctactgcagacatggcagatggggcccccgttgttggtggtgaccatccaggcgtagagggtgtgtggcaccgcggggaggtgcatcgtgcacctggttggttcaggagacgtgtgtttctacttgggaaatccgatagatcgttttgatagtgagatgggctcgaggcctacgcgcgctacaccctcagcacgggttttcgaggacggcaatcctcctagaggatacggcgtcgtgtctagaagcatctagtcggacccaaaccattactataccaactgtatcggtcgaaaaaaaaattacgtcatcgttcttatcaggttacgctacttttttttatttctcgtgaacacactttttaacaggttaaatgttatgttttaacacgcttttcaactggttaaatgttatgttttgagcaaaaattttaaattattatatatgaatttggacaggtattcagctctatccgtcatgtccagaagcatctagtaggactgaaaccatcatgtcaattgtcttactctctgtctaaaaaccctttattttcctatcgttgttcttatcagcttacgctactttttattttatttttcgtgagcgagcacgcttcttaaatggttcaacggtttgtgcaaatactttctattatttttttgtaaaagaaaaatagttcacttttagacatgaatgtatacaactctttcggtcatgtctagaaacatctagcaccatcaaaatcatcatgttaattgtcttacttcatacgacagaagtactttatttttttgtcatctttcttatcagtttaagctatttttttatttttgtaagcaggtttctcaaaccgttaaatagtctttcttataaatactttctattgtcttcgttaaaaaataattcacttatatatataaatctgaatagctatacggctctatgagacgtctccagaagcatctagtctcacagaaaacatcatgtcaattgtcttactccctaccgccaaaaaacattattttttatcatcattcttatcaacttatgctactttgttttattttacgtgagtacgcttattaaactgttaaatggcatgtttcatgcaaatactttatatcatcttcgtataaaaataattta

SEQ ID NO: 22373 - DNA, 8464 bp, Oryza sativa
caaagcaggcttgttctatttttagaagacgtaatagccagattcaaacaaaaacacaagaactcagtgcaaaaaaaggaatgaccatctgactagtgtattagccagattataccatacacaaggaagtccatgggtcaatactacatgaaatgtttaacagagccttctaatccaaaatactaaaccttcagctccactatattacaacatgtgtctgaggctcttagcaatttagattgatttgagaaacttcagagtaccataaaccacagatcacttaatactgagtatggcagtaaaatatatctgtaccatgaaatgagtatattaacagatgaacagaagtatgcagctagagacttaaacaaatacctattgagaccaaggactgtatagtgatgtgacatagaatacaccctaggtcctgcaggagtatatgtccgcctatttttatgttccgagtgtgatgtatctgtctgccagtaccagtcgtcccgtgggacataattatatccacctggagggccattctccctccaagcttcataacttctcctaaacttgttcctctctctgttgaaaacactttgcatgtgtcttattctttgctgcaaaaaagcaaataaaaagtgaacatactgaagggaaatgggaaaaggacctgagaagatgttgaattgagacatttaagggatgaaataggaatcatttgttcctcgtgaatgtgtataactttaattaaaacatagctcacgataatttctaaaccttaacagcagcagttacaatgtataggcagcattcatataatgtccgacttccaaattcaaagtccaaagataaatgaatgtcttggaatataaagaagttaaaaggattatgcattatttaaaacttacaactctctcttgttcctcctcatattcctgttgcatacgttggtaatatcttctcctagcatcctcactgaaacttccacggttagagctgttacttgcattcctccaagatgttgtctgcatcttattgaacttttgaaagggagacataaaaggaacatataagtaaatgatggaaagaatcaaaatacagacaagtataagcatacagcggagacataggatgataaatcagtcatctgttattggctagcttcctgactacacagcatttttgttgggataacaatataaccaaagggattccgacatatagcagggagactgagaaataatcaaataataattgaatgcaatagcaagaaaagagtttgttcctacgcaaatccattgttggagtagaactgacgagggagagaggattgacaggaatcttaccctactggtctatcataataatgctcgtctatggggtagacacattaaatttgttattgccgaactgtactacatttgagcaaacaatctattactcccaaacatccaaaaatgtaagtcatattcaatactattatgaaagcatttggcaagacaaattcaatactatttattaaagctaacctatatatttttccatgtattaatggtcgaactctcattttgggactgagggagtaactaccgactattagatgtaaaaaaaaccctatatggtgttttaacctaaaaagaatgttccaccccacaacacagatcatgtctctatactgtacaaggctcaaaccataaagttttgggggcttcgcttcaattcattctgcttgaatagaacaatcctgattagataaggagctggaacaggacatttagtttgggatgtctacatttctctactacttaaaaagtggagatgcccatctcctcccctccgcacccccaccgagaggagcgtgccccatacatacccccccccccaccccctccacgcgcgtaacgcagccacaatccaaacccattgccaatcatatgggccaatgaatcaatgtccgcatggacatattattagttcaaagaaaagcaacagtttgcatttgaccaatcaacaaacagatagatgctaacttggatacctgactgtagacccaatcaacacttctgcgaacttgagcaacctgaaaattacatggtaagaagaaacagaaaggtcaagcacaggtgatctttgcaacttgtaagtcgtaacaatagcttacaacaagggtttgtttccagcaaaaacaataaccgtatatcacagttgaacggagatgcgaaaggatttccaataatagcaacaatccttagcaacccacctcgcaaacatgaggatgggagtaagtacctgcctagcacaaggtttacccatctgcagtgctcgtgcaatcttaagatagcatttaggaccttggggctttggtcagcaaagagacatatgaagccaagagcattactactaataacaggtttaaagagccacatgcttcgttgccacaaggagctgcataagaaccactaaatccttgcagaggctaggaatgttctcagtgcagttgtatcaccttgatataattgaccgggttcaataaaaacttgcattatctttaaaaagaagcactgaaggtgccactaccttgggcatgaaacgatgcaaacagcctaattggagcatttgacgccgaattgcagatacaggagcaaatttcatcaaagcaacaactaaatggaaacagtcatgtcatcacggaaggcgtgaaactaaacaagaaagctagtaagctgggcacttgaaacaggactgtattcgtattgaatcaatcaaccaggtcatcgactatcaatcaacacaaaagtaacagactaacagagaagaggggatgctctgctcaccgcgaaggtggcggtggtggcgccgatgaggccgaagatgaggatcccccacgccttggacggccgccgctcctgctccgtccgccctccgccgccaccgcggccggcgcggtcgtcctcccgcgaggccatctccctctcccaccacggtgctcgcggccccttatctcacgcgattcgagctcgacggctaggcgcgtgggaggccaagctcatgcttcccctcggccgaattccccccgcccctacgtctccgcttcgattcccctcgcgtggcgtccgctgcggttggttggttggtcggtcggagcggcgccgcgcggggtgaggaggatgattcggagttggattgctgggcggcgcggcgcggcgaggaggggaggggaggtggaggtggagccgcgcgtggaggcaggaggcggccggggacgggagggaaccgcgggtcgtcgtgcgtcggggaggcgccaaccgagtggccgaccgtggccgtggccgtggcgtggcacggggtgaaaaaatcgtggcgtttcttcggtaaggttcgatcggcggcacggtgacgacgtcgggatatctattctgtagactgtagcatagagatcggacggatatgtgtcgtgatagcgaagccgtaagcgaaactagtttctattcaaaatgtgctcgaaggtcgcgtgtatgaattctacctcatcacttatacaatatggaaacgcaagtactattcgtagataagctctagatgtaactaaatcttactttgtctgtttcaaaatataagtatttttagaatagtgtcaagtcaaactttctaaattttaactacttcatccatttcacaatataaaactttttagcattaacatctaaataaatttgggcaatgctagaaagtcttatattgtgaaacggacggagggagtactaatagcaaaaaatttaaaaagattaatcatgtatcattaaacgaaccatcataatatataactctttttatttaaaacatcttacttttgtagatttgtagatactgttagtcaaagtagcataaaaaaaccatatcgataaacaaatgtttatattttggagcggagggagtagtagagggacagcaataaaaacttttttgtaatcattgtattttgagtaagatcttccagatcttctacttaagaaagcccacctggttttagatgattatattaatttttagatatcataagtaaatatatatcctgacatcactgtacttcaagaaaacatgattttaaatagaccatattcaccatttgatagcttttagaaacttcctagctctattaatttatggccgtccaagttaaacggtactttcaaacacaagaatttctcttcacaatatattttgtttggaaagtagaatcttattgggtttacgatgagttcactctataacccaaccactaataactattttatatgatttgttttagtcagtttaagctgtcgtctttctcgttcggattcatcgaaaaaaacaaggagaacgttgtgactgacaaatgacaagcaggtaaaacatgaagcaaatggtgagcccttccttgttgcatccgtcttctactcctctaatgtatcatattgctcacaagtaaaaaaaaacgtcgaatacattcacaattaccatcgattatcactatagcgctccatttctcgtgcgacaagcacaatgagaaggacgatgacgatggtggttgtggcacctggcctgacatgatgctctttgtttcgatcaacaaggacgacaaggagaatgacaatggcggcggcaacaataacgaaaaaatgatgcttttttctaacttgctgcttattccttacggacagacgagatgaaattggggacggaaaaaaaattgtgcttacatatatacaaatgatttagatgggtttatagcctaacccaatccagcgcgtaaaaactagctagtcaagcggtttggttcattgggatacccaggttgtacgtgaacacctctgcataaaagatcattcctaaaatatttctaccgttggcctctctacatggagaaaattgttagtgtgccatcttcaaatatgggtttcaccggaatgttgtcttgcattttgattttgctaaattaccaatttcaaatagacattgcacgttagagtgccatttgccatataaatagactgaaatgtcctcgttctctgtttctctttcaactccgatggccttgctacactggcttgaaccgtcatcgtcacgtgctgctgaaaagggacatggacgagtacactacacctagccagcccaccgctggcaccccatcgtttaattgtgcaccgccaagctgtgcagtccggcttttctatcagcacgacgtgaaggccgccatgacgcacggagtgccaaagagagacatgtgcggggagttcgcaggatgacgacagatgtattatggagatggctttgattaggcggcacaactaggaagtgatgtgggttgagctgatgaagtggagcgcagtgcatcgtcggtgagagtgatggtggtcatggcattcggtggtgctgccgacaaacacattgacgtgtttaaaggaaaggagaagtgatgttcaagtgaacttttgtttataatagtattcgtatagacaatgtttaaaatgataatttaacgatatataacaatagacggcacaactatgaggaaacccttgttgaaagatggcaagatagcaattctatcctccaccttttgctgccgctctcgccataccgactcgtgtcgcacggtcgcgcagtcgcaccgtcgcggttcgtcccacgatccctcgtggactcgatccaaccgctctcctccatcagtgcccgagtgctagaccggtgggacccaacgccacaccaccggccgccgccgccgcgccgccattcgcgatgctccgcgccgccgtctcccgcctgcgcgcgcacctccacccccaccctcacgcccaccaccaccacggcctaccctccgtgacgcccgctccgctccgctccctctccacccgctggggcaagcgctcctccccgaccgcgtcgccgcccgccgactccgacgacgagggctccccgcgcggcctctccctgctcccccgcgaccctgagcgcccgccgcggctgctggtggtgcagccgcgcctccgcccgggctcgctcctcgactccaagctcgccgaggccctcaacctcgccaactccctcgaggagccgcgcgacggcttctacaaggaaggtctcgccgccaagggcgccccgccccacctcgtcgcccagaacccctcatcccgcggccgctcccatgtcggtatgtggcaatcttttgttcatttccagcggttaactcaagcgggagtgtatttaatcgtaattgtatttcgaaggtttaggtcttttctgcatgccggcatgcgatatgcagcgatttttatttaaattctggcacacctggggtttgttgtgataagattattagacgagcacttttagcattgtatgaatgaagggcgaattgtaaggcttgaatctgattgtttgaattttacttataagattattagattagcacttttagcattttatgaatgaagggcgaattgtaaggcttgaatctgattgtttgaattttacttataagattattaggttagcacttttagcattgtatgaatgaagagcgaattgtaaggctttaatctgattgtttgaattttacttatagactgagctttttggatggcacatactagagggctgtgcatacagagttgggtgagatttgctcatgagtactcatataggcgcattactctacctattcttctgtcttgagaaaacgggaaataaggctggctagattggcttgaggttatttctaattgcatctgttaaggttagggtatgcttagtgatgcaatacattctatagatctgccagttatttttactggaaatggtataaaataagtcatgtttctttggaagaccctcattggcatttctatgttgctctgaagatgtggttgtagtacattttcttagtggtgaagttgatttgtacctttgagtctttaatcctttcaaaatgtcaaaattattttctcctgaggtgctaaccactttcttgctaaatatgcgtagttttttgtttgcaatgtttgaacttcataacccagactgaattttctagagttcgatcaataagcaaataggtgaagtcttgagcttcactggttgacacttccagctgtgctatcaagtaactttatttgttagaactttttgccagcatttgtatagttctatacttctgttcacctaggagagtctttcgtcggcttttcttggattataggatttaaccttatgtgacaacttgtcatacagataaattttttggacctggaactgtggataatgttaagtgctacctgaggacatcggaatcagaggtgcactctttatttgtttcttgtacataaacatgactacggtgtaacttcatttgtagttttacaccccggatgatccattatatattccatttgtgttgtgatcgcacttgcttatgctttcttttctattgcacggtcaattccgacatgtatgatatatgaaggaaaatattccagtatgccttaagcgccatttatctggtattcctttgaatctaacaggaaggagtagatgcagtttttgttaatgcaattctcactggaatccaacaaaggaacttggaggcaagtgctcctgcttattttttgttagattttgtcgaagtttcaattattgtgccgcattctgaatttctgagcctcctgtcctttttgttcatgatgatatcttattttgcaggttgcctggggtaagccggttttagatcgtgttgggcttataattgagatatttaatgctcacgctgaaacaaaagaagcaaaattacaggtccattccattttgatatctgaccaaaatgtcactcttgtcagatcttttgagtgcatgtatatggttctctttgatgcataatattcatggaaatatgctgtgacatttggatatttgtttaattgctctattgttttgcttggcacagtcagagttagcagctctcatgtacatgaagactagacttgtccgtgtccgtggtccaggtggacgattaacttttggttcgagtggtgaagctgaagttgtaagtgctcgagggtatgtctgctcttaatcatagtcagcggtggtaaaatattgtttgatgaatgatgagcaaaatttaatgtggatgccatctttggtacaatgatattgtaatgtcaaggatgaactttaacctgtgctggtccacattttgaaacatggtaaacttgcatgttcttgtagttgatttcaacctgcaagatttcaacatttaaattgtacttatacacttatgtagtgacatcaacattgctctttgtttatatcgtttagaattatgaactcattttttatcatgcacaactggataatcatgcatattcctggtacggttgtaactgcagaagatgaaattcccactataagaaaatgatcactgggctgcagg

SEQ ID NO: 22374 - DNA, 5405 bp, Oryza sativa
acttgtctcagctgacatgatagtggcatttcctctgatggtttaattacctcctttctgatcctggatggaagcctaccgcctgttccagctttctttatgctttcaactacctcttttttacatcccctttgttgtgctaaactcttttgctctttctgattcaagagttttcatgccttttcttactagcaaagaaatggaaacattatgtttgtgattatttatttttgttttaccatatcacttatcaaatatccaagctaactaaaaatccttcagctagctatccagaaatcataccctgttaatttgtatggatgttgaggattttgcattgtgccgtccccaattttcctacgatggaacaactctctaaccgtgtttttcaataattcttacgtgatctttgattccaccaatcaaatatttcatattttatgttctttcctattgtatatgaatgtattaagtggctttttgggaatatctggttataaagggaatggccaaagaccatccggttcatgaaagaaattgaaatttttctcatttcctttttcaagagaagatagccccaaaaatctagtagggatttgttgttctagatctgcagaccgaatttgttgtttggtatatttaccatgtttgctgtgtgtgatatgtagctgagtatctaacgtcaggaatttacttgctgcagaatgcttttagaacaaaagcaatggaggttcaccctgatcaaaatcaagataatagaggtggctaacaactccatgctttttttttcttgattcgtcatatatatgtatcgtgttgttatgtatccacgaataccatgaacatcttatgttgtgcagaggctgcagaagagaggtttaaggaggttgtcaaatcatacgaagcaataaaactggagagaaaaaatgatgcaagttgaatgtgaatatgtagcttcactggagctcattgggaagattgaaaggatcaatgaagacagtatcagcaggccttgcaatcaagtggatgatctgttaggttcggctgtatctgttgatagcctgtaagcacaagtttttatttgcgagtttttttttttgggagcacacggccctgatgtagactaggatattgtcgacaaaggtgcaaaaggaaattgctcatttgtgcttagccactaatttggggtgcaaaatctggactgcgggtgagcatttttgttgtgtacacctgctggtttattttttattagtagaaagtagagtgaagatctgatagaaaataataagtagcccataatattatagcagaaaaacaatgtttattacgacttactcagttactctgttgtgcattagagctgtggttagctcaaaccggtgctgcctatcatctatatgcgttaaatgatgcatggatatgaattcggtttgttacagctgaccctgttgattctgcacagcagatcgcagtatcagactgaaattgtgagtgcaatctagccataaaccaacatgtcactttcgaaatgacaccgtatgatcatactctgatacgtggagagtactccctccgtcctataaaaaatgaatcttcccataaaaaatgaatctgatttatagtaatagaatatattaaatctggtactaagttgttcctataatcatgttgccacgaaaaagaaaaataaaaaatgaaccaaaaagaaaagaaaaatgaaccgggcaagcattctgggcttgcgcagttgcgccacactgccacagtccagcccaccatgcggcgcctcctctccgctccgctgcgccgccgcctatgcacggcggccgtggccgcggcggcgcccgacccggccctcgcctcctccgcggagctcgcgtaccgcctcctccgccgccaccactccgaccccaagaggctcaccgccgcgctctccggctcgggcctcgacccgacctcgccgcgcctcctcgacgccgtcctccgccgctgcggcgccgcctccgcgctcgcgctccacttcttccactggtgctccccgtcgctgccgccgccggggccgctcccttcctccctcgcgctcctcgccaagtccttctcccgcgcctcctccgcgccgtccccttccctcctcgcgccgctccccgcccagctcctctccccgtccctcctctcccccgtcctccgccgcctcccgcccccgcgcctcctccccttcgcgctctcactcctctccgcgcgccccaaccacgaccacccctcgctcttcctctccctcctcgagtccctcgccaagaccggccatgtcgccgtcgccgagcagctcgtcgaggagctccagcccaggctcccgctctcgctccgccactacaccgcgctgctctacgggtggtgccgcatgggcaagctcgacgaggccaagcacgtgctcgcccgcatgaaggccgcggaggtcgccccggacgtcgtcgtcttcaacaccctcctcgccggcttcgtcgccgacgggcggttcgaggacgcgttcgagctggcccgggagatggagcggcgtggctgcccgccgaacgccgtgtcgtacaccaccctgatgcaggggcttggcgccagggggagggttgatgaggcaatgcgggtgtttgtggaaatgcgcaggaaggggtgtgcaccggattccgtcacctatggcactctggttactgcgttctgcaaggctggtaggatatcacagggatatgagttcttggacgtcatggcaagggagggtctgcgggtggacgccggcgtgtacctcgggttcttcgtcgcgcacgagaagaaggagcagcttgaggagtgcttggagttgatggagaggatgagggagtgcaggtgcccgccagacctcagcatctacaatgtggtgatcaggttggcctgcaaactcggggagacgaagcaggctgtggcattgtggaacgagatggagaccaacgagcttagtcccggggttgacacatttgctatcatggtgactggcctcgttggccaaggcgtgctggttgaggcctgcggttatttcaaggacatggttgggaggggactctttgttgcaccccagtatggggtgctgaaggacctcctcaattcattggtcagagatcagaaacttgagcttgcaaaggatgtttggggatgcattatgaccaaaggctgtgagctcaattttggcgcatggacaatctggattcatgcactgtacgcaaagaaacacgtcaaggaggcctgcatgtattgcttggacatgcttgacgctggtctgatgccgcagcccgacacatttgcaaagctgatgaagggactgaagaagctctacaacaggcagattgctgctgagatcactgagaaggtgaggaagatggcggaggagagacatgttagcttcaagatgtataagaggcgtggggtgagggatcttgaagagaagcctaaggcaaagagaaagaaagggcagaaaaggagtcgcttgaggcaggctggtcagaatcaatccaataggcatgctgacaaaactgacctttttgatgattttgatgatgaataatttcatgcaaggactagtttttgccttctgatagttgctctatatagtttcgacttattactctagatcattctgtgtgaggtttaatattttttttcttggggaatcactggatctagattgtaaagttgctaatccaaacaagtcaataaacatgtcacaaaaaaatatattgttttttttttcatatgcaactagagcgaactgtaaaatcttacacgtgcagagaaataggtagtctgtaatgatctactttatgtctcttaagttgttgcatgcagtatgattgtgatcataagtatatctcattgtaatttcaatttgtgataactggtaggttgatgtatacgtagcagtatttcttttcccaagtttgatgggcattgaatttctctggtttcattatatattgtagtttaaagtatcacgaatagtattactttaagttacatttgtttaagtatttcttaattgaattcctcccttaagaaatacggagtactgcactaaagtaatgttctttgttctagggtggtgaggagccgaagaaacatggtttggttttctattgttcgtttggttaagccaacaaaaaccagatcgggtgttttgactatgtgtacctgcggaaaacgttggctagaagaagaaaatgactgtttgcctgaaaattgggatgaatacatacatttgtcgtgtagtaagaccccccttaaaacgcacgatagaaaaacacaataggttcccggcgaaaaaaaaacacaataggaaaaaaacgtaataattgaagtattatgtttttccaatcctatgaaaattgagaaaaaaatatatataaaaagatgagtaaattacacccgcggtacatgaacttgtgtggtgggtgcaaatagatacaacaacttacaaattgctcactttgatacaataacttggctagttggtgtgaaccgggccaaaatgatccacacaagtaaaattgctctaaattagtgcacactaatgacataacaacatatacatataactgtgatttggagatcttatttcgaatccaaataaaaatgtgcaaaagtttatttttcatgtccatggtacaatatttgtttcattttttggaaaaatttgatcatctatataactcgtctaatgtttatttatctgttcaagaccaagacaatttttatatgtactattaactactaaaagaaaattttaattttcatgttcatgttctgacactttcatcgaaagtgtattttaacaatcaggtatttttaattattttgctttttcgttggtctagatcttaaaagtatcatgcgactaataatatgtgtcagtaaaaaattttgatgtgtaacaataattacacactagtacgtatcatattacatcaattttacttgtgtggattagtttggcccatctttgtatgaactagccaagttattgtaccggaataagcaatttacaagttattgtacctaattgcacccaccatacaagtttgtgtatcgtgaacgcaatttactctaaaaagatggactctttgattgcatcacaggaaacattcaacaatcaacgaagaaaagtttcacaagagatctaacctcttatttattttcatatggaattgaccataggaatggaatcctatggaatcaaaggactctagaaaaaaatccttcaaaattactttgctaatcctccatttcaaagggtccctaaattaccatttggacaagatttttaacaaagtttcactttgaagtctttgcgctattctaaattctatattttatataataaagctaaaagt

SEQ ID NO: 22375 - DNA, 688 bp, Oryza sativa
ccgaccccagcattccgccggcgcctgacgcgccttccgggaacttcttccctccggcgccaccgaccacgacgacgccgacgagccccggaacgactccctccccgaccaccgtcgccgccgacgtctcgaaaactccgtcggggtccggctcgggacaccacggaggcggccctacgaaggcgaccatagtcgctgccggggcgggcgcggctgccgccgtcgcgctgctcggcttcgcctgcgcgttcctgatcaccggccgcgcccgccgccgcggcgactcgcagaagctgctcggccccgaccgtgccggcgcgcatcgcagcgccgccacctccgccgccgacttcctctacgtcggcacggtggagcccaccacccccgcgcgccaccacgggcccaccaccgccgatctcgtggggtccccgtaccgcaagctgcgcagcgagcgggcgcggcgcggggtgagccgcgacgaggacgccgaccacccgagcccggagctccgcccgctcccgccgctgcggcgcgccgcaacgctgggctcctccgacgaggacgggtactacacgccgcggcagctctccgggggctccggtgggggcggcgccgccgaggcctggagctcggcgagcgcgtccagcccgcccaccaccaccacggcctcacgccgcagcctccccag

SEQ ID NO: 22376 - DNA, 659 bp, Oryza sativa
tgggctcgcggcggccatctcccgagctcctggcgcgggtggacgcaaaggcggtggccgaccggagcggcgccggcgtcgaggcgcatggcggcggatccggcgtcgccaccaccggatctggcgcgctcgcagctggatccggtcacggaggcgcgggcacggcgtcggcgaggcgtgggcgctggcggccgcgacaggcggtggcatacgcgacggtggcgcaggcacgggcggccgggcggcggcgtcaggcgtgacggcggagcaagcacgggcagcagcggcaggctcggaggcgcagctgctgtggccggtggctcgatgcctggcggcgacggcagcggtgcccccagatccgtgcctctcggctggatctggaggatgggagcagtcggcgacggcgacgacggtgtggcgacggcagcggcggtagttggccgatggcagttggcgacggcggtggcggctgtggtggctgccgtgtcatctggcaacggcggcggaagacatggcgtcgggctgctagctgttcggtggtggagggcgacggcggagcagcgatttgcagaggcggcggttggcgtcggtggcagcggcgacggcggttatgactctggaggcagtggcgacgtcggcggcggggaaggagtcggggg

SEQ ID NO: 22377 - DNA, 6493 bp, Oryza sativa
agaatagaataggaaagaccaagaactttatttatctgagaaatatcgatctaatgcaaagttccaaactaagcaaaaggtaaactgcttgccaacagtatagtcgaccaacgtcctcctaggacatgctctaaactagccatacaacttccgttgtcaaagcaacttattagacagacactacaaaccattggtcatcaaccaaaggtcgccatttagcactggatccatccgaggagacgaggacctagaccgggtcaacaccctagtcaagctattggcgttgtagttaagtgggaatcgtgcctattcacagcatctaccctcgggcttattccgctagatttgcctccaattttccggtgtcctcgcaagacagcaggttccaaataatattgagaagatatgtgcacaccaaaggcaaccatataaacagtgtcgttccaccacatggaaaacacttcacatctttcactgggccaggtgaaaaatatctcaaattattgaacctcgcaactccacgattccagaaaattgaggtataatcatttatctccaaatcaaaaaagcgtgctctcaaccattgggaaagcaaaaaatgttgaccgtagtccaaccatactctgattgagatgttaagccactagggggaaggtacaatgaatcccaaacacattgtctaattccacacatttcaacgactcggaatcccattcttgagtgtgatcatagggatagagtggtctacattaatgcccaaagccatacaatagtcattgaaggcttttaagttaaatcacccacactattatctgaatcatttcatgcggttctcagagaacgcaacacgcaaacggacgatatgcgcagtgaattcggcaaaagcatggatctcgtacaacaagtatacgtgactccatcttgtagacacatcgatatcaccaattttgtatggaggagtgtaccagtaaagagtggtcttacccatagccatggatatttaatttcccagaattttcatgcattaggtgattttctgttatttacttggtcttatttggcattatattcccaatatttatgccactcagaaaaacatcacacataaatgcaggaaaataaacccatcataaagcttccaagggggggattctacactatgtgaacacaatttatggaagcatcataacctagaaaaccatctctagattatttagttggaattgcatcaattttaaaagcaaagcaatgcttaaaaaacaccattacatggttatttatgagtcgggagacccacatgcaaaaccaaactatatagggcctaagcaacaagacatagccacacaaacacaattaacataattgggctatagcgtaaaatcccaacactccggaggcttaaacgcaagttgtcaataaaccgaaattaatcgggccgaattaccgttcaggccacgatcttatttgggctagcaagcacagtgtagcccaaaatgcctaatgggtcgaatttccaaaaactctaaacccatgaggatttccaggtttattatttttattaatttgtttgggctgtctcgttactattgggttttattcggttgggcggaggcagaccggcctagccggttcgcctaaatgactgagaaagaggagggggaattagggtttcccctttcctattcattgtccgcaacggcgtccaccacccggcacactggcccttgggcacggcggcggcgttggaggccgtcaactgtcgactttgaagcgatttagggcggcgcacggcgaggaggtcatcgatgacccatccactaccccgattggcaggacggcggtgacgacatcactcccgtgtggcaatttggtgcggcggcggctcggtggcacacgatggagctccgtgtcgacccgtgcatcctcatgacggcggcgaggcgaactcaacgacggcaactgagaccccaacaacggcaaccaaattgcatccggccatatcgtctcggcggaggttaatccggtagcagataaccgacgacccatcatcctcctaccacggctcgacggcagcgtcgatgggaggtcaacggcggcggcgcctcgcttcggcattaactccggcagtaacggcgacattgtcacaccctaaaaatcctaaatatataaattgttgtttaattggaattattagaatttattttaaaagcctagaagagaagatctagttttaattaataaattccaatataaaatggggccagataaaatttcattaaatactttgcttaattctataattcctagatttttctgggatttatttgagctaaggaagtatttttaataaatggaattgcatttcatgaataatttaaattgaaaaagtttgtttaaaagtcttcttttagctttgggccgaaagtcggcccaaaaccctctctctctcctcctcggcccaagccggcccagtcaagccgagccgcccgcgcgcgctcgctgccactgacaagtggggcccacctgtcaggcctgtcgtctacctctggccggccgccgcccgaaccctagcgccgcgccgccgtcgtctctttccaaattcggcagcccctttccttttccggtgaaatcaatagaggggaaatgatcttcgggatctcctctaccttttctcttttggaatcgtcggctaaaatcgtttggaaatccgtggattcgatctcgaatcggattcgtctctctccccgaaccctagaccttccttcgccgtcgccggtcgccgttggccttcgccgccgcctccttgcccctataaaaggacccccaagcccgccgttacctgccgccaccctcgccttagtctctcgtcgccggtaaaaccctagcaccgtgtagcctcgcgccgccgtcgtcgccgccgctccagccgtgcgccgccgtcgctccagtcgtcgccgtcgctcgggaaggccgccgtcgtggtcgccgtcgcgttgccgtcctcgtccgcccctccatcgttgctgtagaccgccggagcaccgccgtcgtcgtcaagccgaaggttgccgccgcttcttcctcgacgccgtcgccgttcgttgatcttctgccgccgttttggtcaccggtgagttcgccgcgtcgttctctacatgctggtgccctccgttcgcgtcgtcacgccgtcgttcgccggcgagcttgtgcgcccgagccgccgccggtggtgacgtcaccgctgacgtcatcgttgccgtccgtcgtggtccggccgtggaccggtcgatctcggccgttcgttttggttaggatcgatctcggccgttcgtttccgtgagccgccgccgtgcacccggtccaccgcaaaccctagccgctgacgcaataaacccctttttccttttcaaaaataattcattattgcgtcataattcaattaaaacccatataagtgttttaatccgatttaatctctaaaaattcataactaattcatcttagctcggatttagttggttcaagtctctaattttttctaaaattgagatctacatgttaaaaatatccacatgtactgttcatgcttgtttatgtgctgttttggtgtttttgctcttttctgtttagattccgacatttccggagagtttgttttcgcaggagaagaatttgaagagttccaagggcagcaaggcaagtcacacagatcccaaacaaccctttgaacatgttgatcccgtttaaagctattgtttctattcaactattgcatttattttcgaatgtcattgggtggaattaacctattgtttggtatagtccttttgttcttgattactttattccttgataacttgggttattataacttgactagttgagttttatatattggttcagctagatattagatatgattgcttagccatgcttagaaacattagcacactattgggataacttatgactcactattatttaatgatggcttaatgatagttcgcgatggtcaatcgtgattggttaattaattacttgccaactaaaacttgataatggtgggttgtgagtacatggttttgagagtcgtgctcatgacaattaaggaccggttcacgagtttcggttgtgaaacattaatcgtgccaaccacaagccagcgtgggcaacggctttaccttttgtatagcatggttcattgcagagcaccagactgagaagtggcggagataagcccacgggggtcgctggggagtccatgccttgtttataagggggtgattatgatccaggaaaggtgcgctgtggtggattgtgttgtgcgaggggtactgtcacagctcctttccgaggtaccgtggtggtattgaggcacatggtgacatgttgtggggctgtgtcttgtgggtacagtggtacacctctggctagagtaaaactattcgaatagccgtgcccgcagttatgggcgggtctaacaatgtctttcgtgattagtctcacacttctcaccataataaaagatgctataactggtaataatttgattagctcctagtttggaatggtatattcctggtttggagatagaactgtgcagccaggattggttttacagaatgattgggcctatgcaacagggtatgttgtatagcgttggattaatattgtttaaattactacttaactattttattaaattctgaaatgtttattaaatgctgtttatgcaaatgaaaccctactatgccatcatttgttatcctgtgcacttgcatatttgctgcgtggcttgctgagtatgtcatatactcaccttgcaatcattcatcagaggaggagttctacagtgatgctgatggtgtggaggattaggtgtagccctggtcaagctgcctgtggagtggagtcgtctgcgccgtttatcttatttttccgctgcttagatctttattgattgagaggaactatctacctctgtaatgacattttattcgcttattaattagagtaataattgtactctattatcaatttgttattgtgtgcctcggctgattcctggacgagggttcacacacatgtaagcgtttggaattttggatagaaattccgggcgtgacagacatgggtttagggctttttctgagacggcggtttcccacgacggcatcgacgcaaggccgacggcgtacccaacagcgacagcgaatgatggccaacatgtctctaagtccgactacacagactgagaatatgtcaccgcgttcccggcgtggtgtcatcagagaaagagagaaacaaagtatcccatcaattcggccaattcggcccagccgaattaggcacgtctccagtccagggtatctcatcaattttagtgatttctctgacacggttttctccagttttcatcaaataaaatagatgcatatagatcaaaagcaggaaattaatctaccactagatcaagggcgggatcaaatctactgcaagtaaagcatctataatatgataaaaacgagaaaatataatcaatctataaaaacatatatatatatagatcgcataccttaatagacacatgtccggatgtatctatgaattagtaaattagtttaggaactaatcttactaattaccgtgatgaagatcagtgcataatgcgtgatctcctaattagtctggtgttgttccagtgaggcgacctatgcgcgcggcgagcagatgcacgactagggtgcacggattgctcctgcatctcttcgcgagcaaacatccatctgtatctgtcgcgtgcttgaccatcgcaggcaccatgcgcatctcagacagtacgtgcaaacaaattaaacaacaagaaaacgatctcgttagtaaacctacatgcatatatatcgacatacgcatgcatgcatgttgcttgctcctgtgcccaatccacacgagccatgcacgcatatgcctgctgctggttccagcacgcatggccgaggcgcccatgcgcattgcgaagcctgttgcgctggggcgctcccgcgcgtgcagcacctcgtgcgccgtcgcgcgaggccacgccagcagccacccgtcatgtggatgcgaggatctgccgagcaggatcactggtggagaaacctagtcccgatttataaccctcctttatttccggtttccaaaccgggagtaccaatccgggactaaagttcgctatctttagtcccgggtaaaataacccggagtaaagatcgatctttagtcccggttggtaacaaagatggctcagtcacgtggctggctgagccatctttagtcccggttggtgttaccaaccgggactaaagatcgagcagacctttttttttaatggccctgttgctgcatggtttatatatatatatatatatatatatatatatatatatatatatatatataaaccatgcatatatatgtttcaatacatatatatgcatacatacatatatat

SEQ ID NO: 22378 - DNA, 12207 bp, Oryza sativa
ttatattatattatatgtatatatggttcagtacatatgtacatgcataatatatatgtatttatacatatatatgttatgcaaatgcatatgtatatatatagaaaatgtgtacacatgcatatagaaacatatgtagtcatgtattaattacaatccattatatgtcctaactagctacgatttcgacgtagtagtagtactcgctgctagctcagaagctaaggaccggtgaattgtgtttccgtcgtagtagaattcacctttgggatcaaggatttcttcgttgatgaatcccatgagttgttcttgaaccgccacgataaattccttgtgtgtggtcaggttatccctcatgcgaataaactatatgaatatatgaaattgattagtaattaaacaagaaatcgttacgtaatgaaaatttgaatttatttgtacgtacatcgagctctcttgtggtgatgatttggtctgcaaggcagtggcaatactcgcacacgtagtagccgcacaagttagttccctgcttttgctttgcgctctacaaataaatgacaaattaacggcgtgagatctaattaatatacacttgtatgtattaatttgaatcggagaaatataaatatagagcatgtgtactcacaggaaatttgaacctccgcctaagtctttctctccagttgccgcggaccaaatgacggaaccgataccaagccctacatggagtgtaaagatatgattcgtagtagaaataattaacataacaagaatttcttaattaacagaggaacttataccaatacctgtctataagttcgaaaaccttgtcaaacgtagactcttttttatccattgagtcatatacgttgacgatgcaggccgacaggtcgaagagtaaaagcacccagtggaatctgcaatgtgcgtgggatgcattacatatgaaacacctagcaagttcgtacaggaatgaaatttattatgtaggaagacagtaaaattaaactaactctgtgttgtacggcaacagtatgaacgtcatgtaatgctgcgccttcaggagatggacgagattgtcctctgtttcttgtggatattggtcgagcattgcgacgtttactctccgagggtcgatgaatccagtatcgaaaaccctccgccgtcgggccctttgaatctccattctacaacgataaaagggagtattttattttatatagtttacttatatacaaggacctaatttattaaaggagacatagtaattaagaaatataactgaacgatatacttacaaaatccagcaactcataatagagacgtcgcgggcatccagctggtatacttcgtagattcccttgaaattgatccagagaatatcatctccttgcaagaagtccgggtccctgatcctcgctccgatcatctctctaccggtggcgctcatctccatgtacagctgatggaacttgtacatttgtgtgggtagggactgcaccagctcgggcttgacaagcggtttaccgagttcgtacatgtatttcaattccgccttttctattggttcaactcctagcaattgatccgtagttagaccggtgtcaataataaattcttctatcgtcatgtcttccccggtcaccaacggctcgatctcctggtttggttgctctccaagctgaggactggtttggactttacagaagatgctttcttcagcattcgctcatagtccgatagcttgatggcctccttgacaggtgcagacatacccctgaagaagttcctgacactggggtctataggaatcttcttttctggacttcgaggcttgaattgtctcttgacttctgatgcaaagctcctcttgcgtgcaatcgtaccccgggtccttgttcttggcggtgtcaacattcgccgtcttcgttgcccttgtgtgggcaggcggtggagctaggggggcccttgactttgaaggtgccggaagaggagcttgcggaggagtaggtgtaggagcccgaggaggagtcgatgcaggatcctaaggaggagtcggtgctagagcctgaggtggagacggtgctggtggagcatgaggaggagacggtgcaggatcctgaggaggagatggcggagccggaggagatggtgcacgagacgccgcttgtcgccctgggaggatgatgtaccgcctgcgccatagaataatggcatggcttgtgtctcatagatgcatctcaccgtctcctccagggtaatccagctcgaggtcctcgtacgcgccttcgaccaactcaacttcgaccttcgagtatcctgctggaatcggcctgtagtggtaagtacctgaagggtccgttgggatggccatgcccgacgccaccttcatgttgtgagagattatttattagtaatcaacatatataagcagcaactagcggaatggctaaatctaaaatatataaactacgaacttacctttattgataagttcttgtaaggaatatgcagctcacatggtgtccgctgagtgatgtcatcaacgggacaggtcgattcgtcctgtgtttgcatggcgtccatgctctgtgatcctacctgccccgttgaggcgcagctgctatggtttcctgacgggcttaccattgcaggaggaatggtcggctggggatcatgggaccgatgtgcggccatgcgttcatcaaccttccttgccacctcctcttgcattctgagttcgtagctcgatacccggaactctagatctgcaatcttcgcctcggtatctctcttgctcctcatccgactcctgtacgtgtggatgtcctccttgaaaccaatcttccaaggaatcacccctttccctcgtgttcgtcctggatgctctggagtctgcagggtgagtgtcagctcgtccctatctctgttcggtcggaacgtgccctgagaggaggcttccactgcatctgttagtcgtcgcacagcctctcgtatctgatcgccaaagaccagtgagccatcaactggtttgagcgttccaccgtgagcatagtaccagaacttcgatcgttccggccaattggcggttgccggttcgataccccgctcaataaagctagcctccatctcctcccacttcggcatcgcgacgctatagcctcctgaccccaagtggtgatagtacttcttcttggcggcattttctttgtttctttccatcatcgcctacccttgtttacctgtcttatatgcaacgaactcgtcccagtgatcccttagctttgggaatgtgtcgaagttcggtgtctgccccttcgggatatacttctggtacagatctctcttgaagctctgaaactgttctgccattttcttcagagtccaccttttcactttgtcctctgtaccagcaggaagggtgaatgtcttgagcattgtggtccacaacatctctttctccgaatctgggacaaagctctcatgatctccgcgtgcccttgttgttcgccagtacaccgtactgacaggcacgttatcctgcacaacccaaccgctgtgatgtacatagttcttggcggcttcggccggggcactaggacgtccatcttcttccacttccattatgatgtgccgaccctcaagcttcttcgctgcacctcgttgcccgtgtgccctcttctgtccaacggagggttgactaccactagcctcctcctcctggttcccctccacatccctttccacgtgcccctgctggttcccctccgcatccctctccacgttcccttccttgttcaagtactggtttggatcctcgttcccctcttcttcattccagtactggctgcttccctccgcgattgtatcgtacaatatctgttcctcatcgcggtcagccatctgttgatacaagaaacatctgctaagttacgagacatttatgttttaacaatctaagtcatgtatgctaagtgtaaatgtcgtacattagaaccctacacaaccttacgtgctaagtctaattacaaatcgtgatataagctaagtctaggtgacgtatattatacaaccatagctagtaaataattatatactaagtctaattacaaataaaataatcttatattaaaactcaaataatattacatgctaagactaaaatagtcatgtatgctaagtgtttcgtgcgtatatgctaagtctaattaagactacaatagtcaattgctaggagtcgcaccaattccgtagtcaataattacatactaagtctaattacaaataaagtaatcttatattaaaactcaaataatattacatgctaagactgaaagagtcatgtatgctaagtgtaactgtcgtatatgctaagtctaattaagactaaaattgtcaattgctaggagtcgcaccaattccgtagttaataattatatagtaagtctaattataaataaaataatcttatattaaaactcaaataatattacatgctaagactaaaatagtcatgtatgctaagtgtttcgtgcgtatatgctaagtctaattaagactacaatagtcaattgctaggagtcgcaccaattccgtagtcaataattacatactaagtctaatttgcaataaaataatcttatattaaaactcaaataatattagaacactacacaatcttatatgctaagtctaattacaagtctaatattcttaattgcattacaaatataacaatcatttatattattacgtcacttgcctgcacgaattccttctagggctagctcttccactccggcttgagggacgactccgacaacacgtcttttctgcaagatacaaaaaatatgtattaggataaatgcgaagtaacatatatatatatattgcatttcacgttcacgttcgttcacgttcgttcgctcgttcacgttccctagctcgttcacgttcgttcgctcgttctcattcacgttcgttctcgttcacgttaattcgttcgatcgttctcgttctcgctctcgttccttcgatcgttctcattctcgttcacgttctcgcggcaacgtacgttgacgtgttcgttctcgttcacgtgttcgttaacggcggtgtggcggcatcgggccggcgcttggcgcggcagcgtggcggcggcggcggcggcgtggcgacggcggcggcggcggcgttgcgtggcggcgaaggcggcggcttggcgtggcggcggcggcgtggtgtgccggcggcggcgtggcgcggcgtcgtcgtggcgcggcgtctcgtggcgggcggcgcgacggagagagagatcgagatcggagatcgatgaagggagagacggcggcggctctcaccccagagatgcggtggcggcggaagaggcggaggcggcggcgaggacgacgagctcgagacgacggcgagatacggcggcgtcggcgcggggatttgccctagacagtggcagcgaaggagagaggccgagagagatcgatcggccgaaaacgttaagtgttggtggagaagacgagggcgcacggggaaaatatatacccccggatctttactcccggttggatctttactcccggttgttctcatcaaccgggagtaaagatcttttcccgctatttccaaattctttttaaaccaggttaggttaagaactgggactaaagattatagcactgcatattattttcgcttacatatgtgtttctaaaatagaagttaatgcattaacattatttaaagtacaaagattaatgacaattacttcgaaaaattatttttgtctgtaataaattaagtggataaatcgtaataagcaaatgtatgacttaaaattaataaaaattccaataatcatatatacttagcatatgaatgatattattaaattggtaaaaactctaattaagatatgtatgtacaaactgcatgatttaaaattaataaaaattgtaatcattatatatacttagcgtaggaattatattaaattaaatgttaaaaactctaattaacatatgtaaatgccacatgcatgatttaaaccttttaaaaattcgaatagtcatatataagtagcatatgaaagatagtaaattaaattgtgaaaaactctaattaacatctgtaaatgccacatgaatgatttaatacttttaaaaattctctagtcaattataattagcatatgaatgatggtcaattaaattgtagcatatgaatgatagaaaattatgccgtacatcaattggatttatatggataatcactacattccaaatagtttacatcgtgtacacaataaatatggcattacatcggcggtgacggttgaccgcacgtactttctcctcactattgttccctccttgtgatcgctgcgtgagtaaggggtgtcttcatttgataggaggatgctagggtcaatcatcaccatgaaagggggttgcctatccaactgatcgtaatcctcgtcagtcttgtcctcaactccgacgatttttcttttgcctgagagaactacttgacgcttaggctcgtcaggccctttgcccttctttcctttgctagacatgtccttcacgaaaaagactaaaatagtcatgtatgctaagtgtttcgtgcgtatatgctaagtctaattaagactacaatagtcaattgctaggagtcgcaccaattccgtagtcaataattacatactaagtctaatttgcaataaaataatcttatattaaaactcaaataatattagaacactacacaatcttatatgctaagtctaattacaagtctaatattcttaattgcattacaaatataacaatcatttatattattacgtcacttgcctgcacgaattacttctagggctagctcttccactccggcttgagggacgactccgacaacacgtcttttctgcaagatacaaaaaatatgtattaggataaatgcgaagtaacataaatatattgcatttcacgttcacgttcgttcacgttcgtttgctcgtccacgttccctagctcgttcatgttcgttcgctcgttctcattcacgttcgttctcgttcacgttcgttgtcgttctcgttcacgttaattcgttcgatcattctcgttctcgctctcgttcgttcgatcgttctcgttctcgttcacgttctcgcggcaacgtacgttgacgtgtttgttctcgctctcgttcgttcgatcgttctcgttctcgttcacgttctcgcggcaacgtacgttgacgtgttcgttctcgttcacgtgttcgttaacagcggtgtggcggcatcgggccagcgcttggcgcggtggcggcggcgtggcgacggcggcggcggcgtggcgttgcatgcggtggcggcgttgcgcggcggcgaaggtggcggcgtggcatggcggcggcggcgttgcgcgcgcggcggtgaaggcggcggcgtggtgtgccggcggcggcatggcgcagcgtcgttgtggcgcggcgtctcgtggcgggcgtcctgacggagagagagatcgagatcggagatcgatgaagggagaggcggcggcggctctcaccccagagatgcggtggcggcggaggcggcggtgaggacgacgagctcgagacgatggcgagatacggcggcgtcggcgcggggatttgccctaggcagtggcggcgaaggagagaggccgagaaagatcgatcggccgaaaacgttaagtgttggtggagaaaacaagggcgcaccgggaaaatatatacccccggatctttactcccggttgttcccatcaaccgggagtaaagatattttcccgctatttccaaattctttttaaacccggttagggttaagaaccgggactaaagattatagcactgcatattattttcgcttatatatgtgtttcgttaatgcattaacattattaaaggtacaaagattaatgacaattacttcgaaaaattatttttgtctgtaataaattaagtggataaatcgtaataagcaaatatatgacttaaaattaataaaaattccaataatcatctatacttagcatatgaatgatgttattaaattggtaaaaactctaattaagatatgtatgtacatactgcaagatttaaaattaataaaaattgtaatcatcatatatacttagtgtaggaattatattaaattaaatgttaaaaactctaattaacatatgtaaatgccacatgcatgatttaaaccttttaaaaattcgaatagtcatatataagtagcatatgaaagatagtaaattaaattgtgaaaaactctaattaacatctgtaaatgccacatgaatgatttaatacttttaaaaattctctagtcaattataattagcatatgaatgatagtcaattaaatgtagcatatgaatgatagtaaattatgccatacatcaattgatttatatggataatcaatacatccaaaatagtttacatcgtgtacacaataattacgtcattacatcggcggtgacggttgaccgcacgtactttctcctcactattgttccctccttgtgatcgctgcgtgagtaaggggtgtcttcatttgataggaggatgctagggtcaatcgtcaccgtgaaagggggttgcctatccaactgattgtaatcctcgtcagtcttgtcctcaactccgacgatttttcttttgcctgggagaaccacttgacgcttaggctcgtcaggccctctgcccttctttcctttgctagacatgtccttcacgaaaaatacttgcgttacattattggcaaggacaaaaggttcgtccgagtatccaaccttgttaaggtcaacagttgtcataccactgtcatcaatcattacgcctccaccagtcaacctaacccattggcaccggaacagaggaaccttgagaggaccatagtcaagttcccatatatcctcgatggcactgtaatacgtggcagttgttccatcgtgtcccatggcatcgacacaaacagcgctgttttggttcgtgctcttcatgtcttgggctctcatgtagaatgtgtacccattgatctcatatccctggaatgtcgcgatcgacccagacggtcccctcgccaggaaggcaagttgttggttgatcgactcgttacccatgagatgttgtcgtagccacgtggggaaagtatcaatgtgatgtcgtgtaatccatgcatcggacttaccgatgttcctggcgcgaactagagccaagtgctcctcgatgtaaggagctaccaatgaagagtgttgcagaacagtgaaatgggctttacggaataaattgttatctaccgtcattattgctttccttccgagagttcccttttcccgtagtctcccttcatggcgtgattcaggtaccccgattgggcgaaggtcttcgataaattctacgcaaaattcgatgacctcatctgttccataacccttggcgatgcttgcctctggacgagcacggttacgaacatacttcttcagaacgcccatgtacctctcgaaaggaaacatgttgtgtaggtatacaggcccgagaatacggatctctttcacaaggtgacaaagcagatgcgtcattatattgaaaaatgaaggtagaaatatcaactcaaaactgacgagacattgcaccacttcattctgaagggcttctaatctatccggatcgatgaccttctgcgaaattgcgttcatgaatgcacatagctttgttatggttccgggtgaaggtcgccgcgttgttccatatgcttcagatcattacgtgcttccagtgtatctttcaactttccgtatacacctaggaagccaagaaggtttacgcaaaggttcttagtgaggtgcatcacgtcgattgcgtggcgtacgtccaagaattcccaatatggtaactcccaaaatatagagttctttttccacatcgccgcgtgaccatcttcgctctctataggctggcttccaggcccctttccgaacactactttaagatctttaaccatagcaaacactgttttcccgctgtgatgtttaggcttcgtacggtggctgttttcccgctgcgatgtttaggcttcgtacggtggtcggccttatgttggaagtgcttgcctttcttccgtaccgagtggtttgctgcaaggaatcgacgatgacccatgtatacaaccttcctacagtgcttaagatacatactttctgtttcatccatacagtgagtgcaagccttgtaccccttgttggactgtccggataggttgctaagggcaggccaatcgttgatggttacgaacagcagcgctcgtaggttaaactccacctgtttgtcctcgtcccacacggggacaccttccttcttccacaactgtttaagatctttaatcagtggtcttaggtacacatcgatgtcgttaccaaattgcttggggccttgaataataatcggcatcattatgtacttcctcttcatgcatagccagggggggaggttgtagatacacatcgtaacgggccaagtgctatggccgctgctcatctctccaaaaggattcatgccatccgtactcaaaccaaaccgtatgtttcgtgcgtcctttccaaattctttaatttttctgtcgatgtttcgccactgcgaaccatcggcggggtgtctcagcatcccgtcctgttgacgctcttcagcgtgccatcacaacattctagcattccccttgttcctgaacaaacgccttagccgtggtattatagggaaataccacatcaccttagcaggaattctcttcttttttagctgcccgtcaacttctcctggatcgtctcgtctaatcttgtatcgtagtgctttgcaaacacggtatgcttctaggttttcatactcctcaccgcgatataggatacaatcgttcggacatgcgtgaatcttatgaacttccagtcctaacggacagactatcttcttagcctcgtacgttgtctcgggcaatttgtttccccccggaagaatgttcttgacgagtttcaataaatcgctaaatgctttgtcactaaccccattttttgccttccattgcaagaactccagagtggtatccaacgttttgtgcccctgctcgcaacctgggtacaacgaagttctgtggtcctccaccatcttgtccaatttatgggcctccttttcactttcgcagtcctccctggcatcctgcaacatctcaccaagatcatccgcaacgtcgttaccatcagcagctatttcctcctcgcccgtttgattttcttcaaatccaacatactgagtaaagtccggaatattgtcgtcttccacttcatcttcttccatttcaacaccttgctctccgtgggatgtccaacaattatagcttggcatgaaccccgactcaaacaagtggaaatgaatagtcctagatgcagaatactccttctgattcttacaattattgcatggacaacaaataaaacccctttgcctgttagcttcggccactctcaaaaaatagtgcacgccgtcaataaactctttggaccaccggtcagcgtacatccattgccgatccatctacatgagtcaaaaaaaaccgtacataaataattattcttacaataatgacagtcatacaataattataagatatctttattcatacaaaaatcataaaatattacaccaaataattcttaaaaactatttgtaaagttttaaactaattttaatgtgttttacttcttttaattttcattttagtttgttttctattatttaagattaactttcactagagttttccttctcaactattttataaaaccttgtttagcaaatgaactaaatttctatatattctttcttccccacacacattttcgctctcatcaacttacaactaaattttggagacaaaaaaaagtgtgcaaaatataggtgcaaatgtagtatgaaaaaacaaaacattggaggatgaagttgcaaaccttttaggcacctccgatttgtatgtaatcaccaaaataaattcaatagaaattttggcatgacctcccctcttttttgaagaaattttaaagcttgctcgggcagctggaggaggaagaagacatatatataggggtgggactttagtcccgg

SEQ ID NO: 22379 - DNA, 23093 bp, Oryza sativa
tgaaccgggactaaagatcatctttagccccggtttttattgcatccgggactattgtggaaatcggccgaccgacgaaagatggtttctccaccagtgtcaatcagttaaatttgatgttactggatttatcatttaaaaactatcataatatgcaaatatttttatttaaaacatgttactttcatagatattgttggacaaagttgcatctcagatactatatcaatgtccaaaaatatttatattttgggactggggagtacttactagcgtttgtacgggattcttcatcagataattaattaacgacatacaacgagatgattggtatcaacagtagctcgctgcaaacgtgggagccgggcgagccgcgggaaatatcacaaactagctgcacacgcgaatcagagcaacgggcaggacagccgcggcgatggcacggcgcacagccgctcagccttgggcgcggtgagcccgaacacgtcgtccatgtcgagctcgagcggctccgtcccagctggcagcgaccagtcgaagcagtgcaggagctccgcgaggccgagctccacggcgaacatccccagctgcatccccgggcacgaccgccgcccggacccgaacggcaggtactggaagtccccacccttgaactccacgcgcgcgctctcgtcggcgaaccgcgacggccggaacgccgccgcgtcggtcccccacagcgcctcgtcgcggcacatggcctagttgttgatccagatgcgcgacccgcgagggacagtgtagcccccgatggcgcagtcgtggaggctctcgcggaggaggagcggcagcggcgggtggagacggagcacctccttggtgacgcacctgaggtgggggaggttgtcgaggtcgtcctggttgaccctgcggcggaggccaaccacgccggctagctcgtcctgcgcgcgcttcagttcgtctgggttgcgcaggagctccgacagcgcccactccaccgtggacgccactgtcttcgtgccgccgaacatgatgtcctacacggatccatggaagcttggattagctgccgtggagagttgtgaaaagatggcagaagctaattacacgttacgtgccatgattagccccttgatgttgtctctggtcaggtggaggtcaccgagttcgacgccgtcggctctcttgtgtcgtccgccgggagcgtcgacgaggtacgcgatcatgtcgtccaccatgtcggacgccgacacgtcgccgttcctcaacttggccaggtgctcgtcgatgatccggtcgatgaaaacgtccagcgcgtgcctcgccgccgccatcctcttaccgatgccgttgagatcgagccacccgaggcaagggatgtagtctcccatgttgaacgccatgaagatctccgagagctcgaggatgatgtcgacgaacaccttctcgtcctcccggctctgtgcaccgaacgccgcccggaaggtcacgttggtggcgaacttgaataccagatcaccgacactgcccgcgactcggcgcagctcggcaacggacctgacgagggcgtccacctcgccgcgcacgacgcgccacgagacgtcgcgccgggggctgaagagcttgagcacgcagagcttgcgcatctggcgccagaacgggccgtagtgcgcgaacgccatgtcggccaggtcgtaggagacgtacaccatggcggccgtgaccggacagtgcgagaagacgctgtcgttctcgtgtatgatctccctcaccgtctccggcgatgacaccacgaacacgttcggctggccaacgcggaggtggaagaagccgccgtggatcttggagagcttggcgaggccgcggtgggtgaactgatgcacggacagcaggttgccgaggacgggcaagccgggaggcccgggcgggaggaggatggctgttcgacggagtcggctggcgtaccagaggaagaaggcgatgctgatcaatgaagcggtgacgaagtaggcatcttgactgtagtactccatagagtgatcacttcactaaggattactacacactaacaagttcaatagcgtgtttatataatgttcgcgagttccatatattatatatagctgctcaattatgttgtttctattgtaaaactacaaaaataatatactaagacatcacgtgtatgaggtaggtgacatatccaatggagcatgcacgattatatatttctatatggttggaaactttcctcgaagctttcatcacaactttaggagaaataaaaactatcaaattctcgcgttaatcagaaggggattacttgtgactgaatttgtcaccttcaacttctacgccagttttcatgaaaaaaggcatcccttcatcatccccatttatggtgaaactcgaactctagcagagaacctgtggtttagggggtaggtccctagctcctgtttggaactcctgtactcagcacaacacaagtgtaaattatctgcccgtatcattttttcatgttgggcttacttcgtgcttgaatggcccgtaggccgtaactctaaatttccatccatttttgaccctatggcctatccatcgtaaagtaattgtgacttcaccaggccatagtaattttccaagaaatatcgggctcggcccgctcggcgtccccatacccatcgctgactttcctcatgcccgccggaatttcagaacaaccccgccgggcacaatagtattcttcattcattttagatttggtcaacatttgtttggattttaaatattttaattccaaaatttccgaaattcctgaaattttggtgccccagtaaaaatgtccaaaatgaaattgcagacatcctgcagcatcaatcgatttctttggtcttctccagtagttttgcttgttattgctgtctttttatggcgtgtttttctgttttgaatttattgtggatattcatcttgaagatcaatttgatcctgactccattgttggcttatcttgtttcaattcgaacctggtgcccgtaccttaatttggatccataaatgcaatatttgctaattcagtgaagtgatatgacaattgtttattctatgccaatactaatagttactattctatgctggttcatgtaaaggaaccgatactaatacatcgtgctggttgatttgaagaaccggtacagacgaaggtcatcattattaatttttgtactccaagaacccgcacaagttaggagggttccatatcaataccagtttttagctataatagtagtgtgtgtactaggcacaccaatggttcgtaatgttgaatagttacaaattactttggacctcctctagaaatatagtcgtatttgggatattttaatccagataaacaagatactgaacatgtgttgtgaataacggagatatctggtttgggatattttaatccagataaacaagatactcaacatgtgttgtgaataacggagatatctatgaacatgctaataatagtaatatagcatcatccagtaacatgtttaccactaaggtgattagagtaatatacccatagaagcgccagaagatgaggcattgttgttgtcgttgcctccattgtaattgtcgttctccgctccttcagtgtcgcctttctctccgtttgttgccattgacgtagaggaagccgaacatgatgaagaggatgcagtgccgagagcactcatgcgtacaacgcactctgaaaaacttgatcacctgacaacccatgcaggttctccagtggacagagttctgaaggcttgctcatcctactaccaacaaccgggactaaatgttttttttattattttttgctgcttgcataatgatttccccaaatcgagtaggtcccgacatccccaaataaaattgagatccccaaatccctacatcaaatcgatgtcacagatcgaatgaacataccatgtttacatcacagatatccccaaatcctcacatcaaattgatgtcacagatggaatgaacacactatgtatatacgttataaattcagagatcaaaatataataagaaaaggacacaaaaacaacaaagacacaaacacattcaaaagtggatcgatcgatggagatgacggcaatggaggctgcagccgcctacacccaccgcctccgcgccgacatcgccgagggcaccggtcgcatggccctcgccatcgacgaccacgacggaggccgccgcctccgcgggagccgccacccgctcgccggcttgcgcgctcgtgcagcccgcccaccacccgctcgccggcttgctagctctgccacccgccgccaactcacgccacccgcctgctcggcttgttcgctgctcactcacggctgctgcgtgtgtgcacccacgggtagggaagagagatagaggagagagaggaggaaaggaaggggagggaagagagagatggagagatagaggaaaggtcatgaggagatctcgtttgtgaggaggagatgataagtgcgagggattatgtacgacgcttcgatctttaatcccggttggtatgactaacctggactaaagatagtgggggacctaacgctttttaaactgggactaaaaatgatctttagtcccagttggtaacactagccgagactgcagatcaaaaagttttgtagggctttttaatcgggactaaaaatgatctttagtcccgtttcccattcgaactgggactaatgtgatttttgccatccgggcaaagatcacttctccggtagtgatcctataagcgaatcgaagaaacaagcaagatcaagataaaagcaaactgaattgcaaattgaattgcaaataacaatttaatacaaacgataaggtggggttatgaagacgagtaattaagcggtctagctgacacgtgtaggtacaaggtaaaatagaaatagctaaaacattaatcttacataacccgagaaaccctgaaggggtacatagctatttctggaggtgggaggatgaccaaggggtccctagggtcgtgctccactatgttgtggagcaccccacaagttccccactttggtcggggtcccagataaagttacaagctcataggcccattatagatgacaacaccttgtttccttgattgcgtccgattgatatagaatttcgagacgaggcaagatccgttcgaaagaggaataaaaatgctatttagtcacggctcctattcgaaccgggactaatgtgaattttgccatctaggcaaagattaattctccagtagtgatgctataagtaaatcgaagaaacaagcaagaagaagataaaagcattttgaattgcaaataaaaattgaatacacacgataagacggggttcaaaagacgagtaactaagcggtctagccgaacgcataggtacaaggtaaaatagcaatggctacaacttatctaacataacccgagaaaccctgaaggggtacatagctatttatggtggtgggaggacgactaaggtctctctagggtcgtgctccactgtgtttcggagcaccccaaatgtgccccgctttggtcggggtccaagataaagttataagtctatgggtccattataggtgatgcaacaccttgtttccttgattgcggccgattgatatagaatttagagataaggcttcatccgttagaaagaggacttgaagagctttccatcaagtactcactagcagaaaacagacattgtatgcacatttgtatgctcgttgatgtggcatggtctcgatgtcctccagttgacttaagatgtgaataatggttatacctatggtagtcatggtcacattagcgtgtaccgaggaaacagtagagtcagggagagatgaacagagtggagggagctccctgtctatctcgaggtggaagatagtgagcgcgagagagacatttagggagtaattcaaccaattgattgctccatccgttactagagtaacgaatctccgtcagttatacctgccacgcctcagctgcggccatggcccgactctgcacatgcgcatgttcgtgtggcaatcccaccatcatcttaactgctcaagagctgctctcaattagcaacatgtttaagttgaggtccctcctcattgtttttggaggtaatattagagcctgtttggatccatgtcacatcggatgttcggacactaattagaagtattaaatgtagactaatgacaaaacctattctataaccttggactaatataattcatgagacgattcaattgagcctaattaatccattgattagcctatgtgatgctacagtaaacatgtgcaattatggattaattaggcttaacaaatttgtctcgcgaattagctctcattaatgcaattagtttagtaagtagtctatgtttaatactccaaattagtatccaaacatcagatgcgacagggactaaagtttaatccttggatccaaacgccaccttaatcctttaattttaattgttgacccatggaatttactagaaataaattggccgtagcccatttaattctaacacctccaagtggctaaccaaatgtctgtctaagaatttacgattttttgtgaactgtttgagatcacctcttatatagcagtgtcttcattaatcactgttgtcctgacatgaacaccacatgagcgcgtgagtcacgcacgttcatactgcataggatattgcagtgtatctgtcactaatcaagcaataactatagaactacagatatcgccctcgtgcatatctgtggatcaggagatgccaaaacagcagatgacgtagacaatatgacgggccacatagaccaatgattccttgctgtgtctgcatctctagcaagctattgcaaatttgcaattgcaatgctgaaggagatggccaaaccagctatacaagatatattgtcccctgacagaaagatttattttctaatggagggagtactatatagtattatcaattttgatattctctccttggttagacctgcatgtgtatagaatatgactatgtaatcatactatatacaatatagtttatctttcgccttcgataaggacaattcgaacagacgaaatggcaggtgccaggtggtgtgttagcatgcaggaagcatttgcgtacgttctatgatgaagcaaccgtgagtcttaaggttaaggatttaaaatttcaaatcgaaaggccataaatttttgacgacttatgtcggtaacaacaggatgaatttatcaaatgatagcagtattggttacaaactttgaaatttattaaaccatgcaagatctatagttaagacaccaaccaaaatacaacttttcaaaacaaagcacaaattcaatatctatttatttttactggaactcaatatttataaatatgactttcaaaattattactccatctgttacatctacttggcaacattgactttgaccatttcaaccttgaacattatcactcttttaatgagtaaactgtgtttagggccacctttcattaccaaagtttactttggaccaccctgtaacccaacctttcactttggactaggttatttttcttttgtttcacattggaccaccctaaaaacttttctaaagcacattaatgactttatgcacatcagcacccataaaccatcaatcttcccgacttacatgtaggctattctcctaagtgggtccaaggacgagtttggactaaaataaaagaataaattgcacccatggtgcatcaacttggcaggtgggtgcaatttagtacaataactggagaaatgagcattttagtataacaagttagcagctaggtgcaatttagtataagaacttaataagtgatcatataaatgcaacagcttgtaagataagtacaattttgatacagtaaattaagaagttatgcgacaacttaattatttgaagcattttttttataaattcagtttttaagtacttattctgacaatataatagtgtggatttgcataagcatatttatatttttattctaataactaataacagaaagtcaattaaactggatgtagaaattattatatttcggttgatatttgagaaggtgaagaaaaaaattcataaagttaattggatgtaaattgtatgtgttgtataattcttaaagattaaatttaatattataaggtaatatccataggattactatgtaatggcatattgacatcgtgaaaaaaactcacccagtatttgcttagctaagttgatgcaccaaaataataaattgtcaaattcttaaactagaacacacccaattatcaatttgttgcactccgacattcaattctcaagttcttccactatatcgtacgtatctgccaagttgttgtacgatggtgcaatttactcaaaataaaaacttgaaggaactgcttgttattgcattgagtttggtgaaattttagtgacccttgttagattcttttcatactttcatgatcaatatcacacacacccaccatatttgctcatcttctacactggaggatagcaaacacatactttccatttaccatatatgctatacttctacgtagaaagtcagaataatttatacatctaccacaaaagctaaacttctacactagaagtccgcatcaactaaccatccatcaaataaagacttcacatatttatgatttctcctctaactatacatggaaaatgagacatgagctagaaaaaaataaatgttgagaaaaaagctcacaagagactattctcgtgcatgagaaaaagaaaaaaaatgatgagagagaaaaaaaaatagccatgttctccaaataagtgcaaggaggaggatccaaaaaaaggaatcatcattacactttccccctttttcacatatatccgttgtccacactcatgcacatcttgatcatgatggtatgactagttattttcttggatctgggttttgactatgcaatatatgtgatgcaagtatgccgttcttctttcatacatgggctccacataatccttattagaagtagaaataagaaagagcaaaatcactgtcttggtgaggaatcatacacattgagcgatctgagagaatcaattgaggagtaaagtaaagttatgttttatgagcaaaacaaaaaaaaaacccaaggtactcatcaggaggagtggatgtaacttgaatcaaggccgttccattcttaaatcacccaagatggtgtatgctttagaataacatgcatgctggaattatttcaagggaatcatatctctgttgtcatccataatctttacttagggatgagaaaagactaagtgtaggggtcctgttgccgatccttaagtaccgaatccaaccatcaattcttgcattaaaagcaaatggaatgccaaacttagaggtagtggttattactaaccatttccacaagtcttggtcaatatgcgtatgcagatgaactatggaccaaaaccacacgccatgtgacaaaatacacctccggacaattggatgcgattacacaaatggaggtcccatatgtcaatcaaaaccacctaccattgagtccaacaaaggtacaacatgtagggacccaccagatctcctcccaaccgaagcaatgactgggagcctgggagatgggatagaaggtcagttaaaccacaatgtcgcccgaacctccatcgattcccctcgccatctgctttcacatgtagcctcctgataatctctcaaaggctgttatgcttgattcctggtggttaccgaccttccaaccgtcataggaagactataaaaggaggagaagctcttactctcaaattgcacaacaagtggagtacaactcacctacacatttaggaagctctctagtagagttaaaatataggaagagagtgaggggaagctccgaaaggagagccctaaatgtatgatttctctctgggatgttccggagatgttggcctatcttcaggagtgtccccgatggatgccttattttacaagtaagtgtcggcgcactctctcatcttgtacctcgatggatgccttattttacaagtaagtgttcatgattcctggtatttaattaccttgcttaagtgagatatattctcatagttgcgagttcgttgcttattttttgtaataagtgccctataagtaggactcttgatgaagaaggaaattcctgcgccaggcttgaatagtaatcaatgacttaggcatagtgttgaggttagtggttaccttcgtttgttatgtgctacacggaaagtgatattcatagcaggtggtgatagccctgtctgccctttacatccctccatgtttggatacatcatagagctacaggcctgtaagttatgtctagttaattattccattgctgtcctttctagccaaagcgtaccattagttattgtccttggataaaatctctttccttgatatacacaccccttagctatgattcgatacactcagaatactctaaagctgaagtgctacatcggtatctgtgcgcttgcgggttgatctgtgaccgtaacaaatataaatacctacccatcaacgaaggtgtttagtggtacgtggtttgagcagtgaagttgaacttgccacaaggggattaagaaaccagcgagttcccaaaattcagatgaaaaattgcttcacttgtgtcttatttacttattgcattttgttggtatttcttacattcacaaataaatccgcaagcacacgaatactactgtagcatttcacccatgagtattccgaagggaaggtggtggcataaaggtatggttttatatatcattaatcaatctataattaattcaccatagtgtaaaaaagggttaggataataattaattcaccatagtataaacaaggtagtggacacaggagattcatctatattataatgtctagtacaaaataacaatacgaaactatagtacaattgtacttctatactaatcatgtttagtatacacttaacaagtacatgctaacaacataggacttagttctaggcacctaggtacagcagagagaccactcccggctggtctgccagcatggttaaagcatttacggactattacgtcatacctgaacgtagacgaatacaaagggtggacatgactgtcaccacctgccgcctaattcactttccgtggggaacacctgcatccaacgatatttatctaacctaagcattgtgcttatgccagcaaataatagcactaacctaagttggagctagagcaacctataaaggtcatttgactattaccatagcatagatcgactagcctaggttgaagtagatatacaatgtatatactactcatagaacataagctcaataaagaaatatgtaaactattctattaattcaactatagtcttacaagaagagtaaagtactaaagacatacccaaaactccgaacaaactataggaccgaagctcctctagacatatttctactagaactatagagaatacaatatggaagagagaattgctccttcggtgtttcttgtgaagtgaagagcacccctctattatagccttgtaatgatggttttatggtggttatgggccgctaatcgtgcacatctatcattgggagtggttgagtcgacacatggaagaggagtgccaagcgcgccaagtatggttcggccgaacccattccaccgccatcgcccaccgactttggtaggagtatgttaggtgggccccttggtcggttcccgtttgtttgacccccacattaggttagtttgagctgacttgtgggcccctcaatccgtgtgcttgcatgtgattcgccggaggtgtgtttccttgcttgccggcctcattttccctttaatttgactatatccatgttaattctctaatcctaatacgactatattatttctgattgatatacttttaggaaatgctaattttcccttgattcattgtcacacctgcagtttccccttttccgtagtttctaattcaccaataaattatctatagaaattactttggctaacctcgagaaaacccaagttaacaatgtatttaataatctaatttgtcagggagaattattttttgaattctcttttctctaaaatcattaacaggatattcacagcaccagaaccaatgttgttaatttaacttgtcaagatttgaagtaataataatctttatcttacgcttttggtcatgagtcatgcccgattcactcccctcttcgtccgcggtttcattttgcatgatgagttgggtcctatttcgttcgcgggttccgtttccgttcctttcctaaaactccttatcctattttccctattcctatttttcctccccctctcctcctcccactcggccgccgctccccctctcccatgccgcgtgccgcccttcccatcggagtctgagtcggcctcctcctctccccactctgctgactcccctctggccccatctcctttagtttttcccctctcctatttaagttagaacccacctcccccgctattttcctatttgttttattttagccttagacctagctagccgctgccgccgactagccctagcgccgtgtcgccaccgaccgctgctctgccaccgctggccgctgccgccgcctcccgccgttgccgtcgtcgccctagcgtcgccggtaatatgtttttcctctccgtgtcatagctattgccataatctttccggttctaatttgtttccgtcctaggttttgatctaacgtcgctgccgtctccgtgtgttgccgtcggactgtcgtcgctgtctcctcctcgccgatagtctcggttttgtgaggaacctatccgtaatctcccgtttagggtgttaattctttttagtggcggcgttgaaaccctagtagtttagccgtcaaaaccctagcctagtgccgccgccgccgctctgtgtcctagccggccgagccttagccgctgccgtcttgcctagctgccgccgctgccgcctgtgccggccgagtcgtgccctagccggcgccgctctgtgccgccgccgtcggcaccgagccaccgccgctctcccgcgtggtcatcatggtttgccactgtgctgtagctcggtagccgagttgcaatcgaaatcggtacataacaactgtcaacacatttacttttgtgtaattcacattcatagacactatttgagcactcatcaccttaggattgcaaaacttaatataatttcttagtttgtcttatccttcaccaagcctagcaacttgggttagttttgattagatgttatttatttttaatatcgcctattaacccccctagtcgacatctcgatcatatacccatgtggcaatgaaagaggggaagtggattggattggtccgccattttctgagggatggtactaacctggatctagagggaatattatttttcatggatcatctgtaacaaccctctctctaggaccatgtagcccagcccaactgacgggcgggccacttacacataccactccacatacacttttgtccttgctttgtgtaaaagggtcaacccggaattgatatcatcggagagaacagaccttatcagttgattccacccttgctaaactagcaaggtactaaacatgcgcaaacagctctcatggactacatagtccccatcctaattgggtcaggatgtcacatcatcccatatcacccgtccccaaactaaataccttgaaaaatgggtttgcccccaacctgacacatcccatcctcccaaccaaacacatgctaaatagtgaataacactcatggcaaaccagaaagaaaacgacctgcacagatccagtcttctatatcctgccgtcttcttcctcgcacacacatgcatggcaaaaacacgagcactggtaggtcagcaaacactagatggaactcagcaagtccaaaaccaactgacaaaagtttctaaaaactacaaaatagaattttggcagcgaggtgattctgttttcaaatgtcccgacggcaacaaagacactatggcgatagcgacagtggtggtactaaacgtgacaagaactcaaaaccctaaacgactacacgctaagactaacaacatgacacaatgatgcaacacaaaactaaacaaagcaaaaactgaaaagaacaattcttttgttttcttgtatagccattttctggttataggtaaagctcttgataccacttgataaaccctgagctccactcgagacactcacggcttcgattggcccgatctttcggtgagttgatgataactacgatttgggagaaacgttaacgacccaactacaaccatatgagacgttgttcttgatgcatctctccgtgggttgttgaacatgcaatacagatcaaccttattcctacaagcaaattgaagaaacaagtaagaacaagataaaaacaatatgaaatgtaaatagcagttgaataaaaatgataagttggaattccgtaactgaaaaatgacgatctgttaaactttagtttaaacaaaacccgagaaaccctgaaggggtacctagctatttaagggcatgggagttgtttgtatttcttatgataatagataaatctgcaagcgcacggaataccgttgtagcacttcaccttcgagtgaccccaaaagaatattgaactcagggaacatgtgtaatttccctaaggctaagactatccaagggcaacaacttaaggtaggcaggctagagaggactttctatgtgtcttaattatctaagctaagcaaaggtcatttcatatctattacttcgggcaccaatccctgctggtctgccagcgtggttccggctatagctctatgatgtatccgaacgtggaggattactaggccgggattcagggctgtcaccacctgccgcctacctatgacaaatccgtgggatacacaacaaataaaggtaacctttaacctagacaccacgtctaagttattaataattactctaatacttgtacaggaacttccttctttatccatagtcctagtactagagcacttagtataaatactagacaatgaacccgcaaagatgaaaatctatcttacttaaacaaagtaattaaataacataagaaaggaacatgaatgcttactttatagaagatgttctccgaacccggagcagagtatacaaacagctccggtactcctccagaattcctcctaggaagctacactcgtcgagatagaagtcggatgagggccaaacttccgggcactcctccagagcttcccctcactctctacctaattctaatgtacaaaagatacaatagagcctcttataattcagctcaaagttgtgttttggaaatgagagtgaaatcctccttatataggctccaaatgacggttaggggcttgggaaatgaccaaaagaccctgcaaccgccttaggggagaaatccgagccgtccacgtgaagccagatggcgggaggcgccatgattggttcggccgaattggcggttcgaccgaaccaaaaaactgtcctcctgacctctcctttggccggtaggttgcttaatgggcccccaacatcttgcacattgttttggcccaattctaagtggttttggtttatatatgggccctccaattcatgtaaacgcatcctgaattcgcggaggtgcattttatcgcatgacggatgtgttttctcctcaaattacctacatacacatatttcaccaacactagtagaaatgattagtaataaaccctaccactatgttggattccatattttatttcattatatgcaagtattgatggtcaaatattatgatttaaggaccgtcaacaggaggacgactaaggattctcttgggtcgtgctccactaggttgggactgttgacagctattaagtatcaaattctcgccgtcaatacctgcacaaaactgaatgtgtaaaacgtcttacataagtggttgggtatatttctaacaatttccacaagtgttgctgtatatttggatgcaggtgacaaactaccaaagttgtgaagaaatatacataaagaaggaggagaatcaaacctatattcaaacctatagtgttttggacccaaaaacctaatgaaacacctccaaatgagcccaaccactatgccaatggactgagggcccaccagagaatgtccaggagaatgggatgggcagtggcgtagttgtgggggtgccggagggggccaacaccctcctatccgaacaccaccaccacatccccctgtttttactctatattgaggttaactaagataggtatttatctagtttatttgtgcagcttagaattattattagtttagttagttagcaagcctaaaaaacattagaatgaaacatgatctacaaaattagtctgtgatttctcatttttttcaaagtaaaatagaagatacttatttgtgagattatttattagtttacattaaaaggatatagcaataaagactagttccaaactttcaatgatattattaaagagctaaaattcagttttttaaaggactagtttacgcattgattgttattagcagtgactaattgaccacccttgtcatctgttgacggtcgttacagtcaaatttcgactgtcaatatgactaaaatagtggagaattagctatgcttacaatgcatatttgttttcaaataatatagtttcacttgtacttggagaataacatgttgcaagaatttatcaaataaaataaagagaaagtggagaaaacctcactcctaagcaagcaaatggataaggaggcctccgccatgagggcccacctatcagccaccctgtcgaagcttgaggcctgctgggccggcccaggttcggcggcgcccagtctggttagctctccacgtggacatccaggattgcttctcaatgacggttgtgagggtaaaatggacatttcacatgccattaaccgccataccacccctataaaaggaggagctcattcactctcgcaacacattcaagcaagctcaaattcctcttcatactttagtattagtatcttagtgctaagtggagtagaatagaattttggtatggctctagcagctcttgtgttctcttctgtaatactttctatattaatgaaatactcttctttatatatcttcggtactttgtttagtctgagtattgttcttactttatatttgtgtcgtaccaattctatgggtagtgtaccagagaggtgcaatcatgcgggtttaatgtttaatatatcagttgctctatgtcatgttcacgggtgtagagtagtattttgtaatgtaagcacggcgcttagattattaaatatcattaattgggcatatatgctgcgggagagtagaggtgggccgctgatggtgacagctcattacggatattcctccatgtcagtatatattcctaagacaaattcctggggtgtgtactcctccgtatttagccccggttggacggctatgacaggttgtcgtaaggaactcggcaacccggggtggtctctcgatgtacaaggagggcactgttagggggtattggccacatgattgtatactagcagatgtaaactaggatttgagtgtatattagaagtataggaattgagtgctttctaattcttcttccacttagttagaattactccattacgaggatttgattagctttgcttcatgtcactctaccctacattaaacttaacccctgcttagactttgactattacaagtaatgtatgtataaggtgcactagcaaaggtcactcttattatcttccgttgggattaaaaatacggtcttggaatacttccgggtgaaatactccaatggtaaattcgtgcgcttgcagatttcttctgtaaccataaatatatatatatatatatatatatatatatatatatatagtggatctagaaaagttttggtccttgtttagatataatgatctggatttataaaatataaattgtatctttataattagatttaatccaaatcatgatctcataccggtcagcaaaccgaactgttttgttcctgccaacacacatgggatatagtttgggtctggaaacatggacacaaaataaatgaaagatcatttcagcaactatttaattggaaaaaggaatcaaaatcatccctttcaaatcaaaatatggaaaagtccaaattccttccttatgtctcttctctgtttctggcatctttcctttctccgttaaagtcaagtttgcgtcctcttttcatcgggtctaggaaaatagtcctagcagaagtcaatttatctccctgtcgttacactacatctttcttttctccgttaaagtcaagtttgcgtcctcttttcatcgggtctaggaaaatagtcccagccgaagtcaatttatctccctgtcgttacagtagcttcgtcaagctctagcagagacagtggcctacacccgacgccaccccaatcctgtgcccgattcaaccaaacccgtggagataatctcaaattagttgagcgcttttgatctatatctcctaccctatcttttccctcaagaaattgaaggaaataccatggaagtcgctcccgtatcgaggtcgaagtcgagtttacctctctagcgaaccctagttttatctctctggcaaacttgagtcggattcaaccaaattagcacctcgacggacaaaaatgccaacaaaagagaggtgatgaacggaaagttaccaattttttaattagttaacacaatattggtgcttcatatataataggaaaatgttcagagtggggtggtggaaaattcaccgtacaccaccaccacttattttatagtaaagcatggatgtttttccaatgcatccatccccgcgatcatgacaccacactcttaattagatcagcatacgggagtttactattttggtatctgcctatcgcaatggcacaaccaaacttcccaaaacattaacattgaaattcacaaaacctagataaatttcgaaaaaaaaaccttcattttgtctaaaaatgtatcagaaaaaacaaagtagtaagaaaataaagtcagaaaaaatcgagaacaaataaaatccaaggcaatttagtaaatccctgaatgattctcaagaaaacataaaagctaagaaaatcccttatctcactacaagaatataggtgtttcgtgaaggtgcttaaaaaatatagaccagcttgcaaccaatcccgtctcagtaaattcctattgaaagtatatccgcaactgggtgaggatttcaatgaattcgtgcttttgctggtggtcaataatttttatttagaagtcttcgaaattgctaaaaaataaagagggaaaaattcaacccaacattgcagaccatgtgttgcccatgtgaacatttgtgtttatccaaaactaaaatgcattagcacattagttatcttacaatcatcatgcataagtagtatttacaatgttaaaccctgaaactagctacccatcgacagctgccagaattattgaaattcaaattaatttacaggtcaaagcaagcatgcgttcagtatatatacatagttggcggtactttcaatcttacttgtagtagcaaactaacgacgtatccaagcagcgcagagtcttacttaacaatagtatcccgtcccatagtatccgtacgcagttccagccaagttggcggcaccgagtgccggcggcggccgagcagcggcgactgctgcggccgcctcggcttccatacgcgctatgtccgactgcgtcctctccttgaacttcctgatgaacgtgtcggcgcgttcgtccaccttgccgtcctccccatcgtcaggcgccacgagcaccttcctgcgggtgaccgcaggctcgacggagcgtgcggacaccgccgtaggccatgcccgggccgtcacagcggctggcggcggctgtggtggtctggccggcgccggagctgcagactgcatggacgacggtgcggcacgcggagtgatcttggataggaggtaggaggaggaggccatgatcaagttggccgtgatgatggtcgatgactccaagagtgaggagttattccggcgacgtgacggtggcatgcttaattagctagacgcgccttgtagagggtggaactggtgttggaatacgattcttcacggtagtacaggcgacaatggtgctatttatatgcgagaattaatggagaattgccatctgtttggagtgtttgtcactctacgttgtaatatttaggttgctatagtaaatatcttcgacatgtggtggtccttccacgaagacatgttcccttggacccatgcctataatatgttgtccttatcttaactgagttgtagcagtgagctttttaggcgatcgatctcatcttgattttcactacgctaaactctaggtgcgttatatatcctcaggtgatccatggtttaccaaaccagtccatatattctgcaacatgagggggtcactgctatagaaaacagcatcatagccgtttagaaaacatcatgccttgaaccgtcagcaatactgagcattattgccaattcattttcgatttggcaggagcttgtttgaattggcagtaatattccatcactatctgttcacgttaaactgacagtgataagtcagcagtgatacatgtctatgtagtactggttgctgatcgtggcagaaaaagaccatctccatcgagtcaatagtcaagtacatttattatttaatttggaaagactaacttgtacatgcaaattcatttttgtcgaaaacatatcacatgacctctctctatattggtttttctctatagaatgctcattttcagtttaactctaaattaatcaacgaaatttcgctcgcttagctcgttactgacagcatattgatttggttataccttgggtatttaattaattatacttttgattgtaatatgcatggatgcatccaacttctattattaataggaaaaccatgttcttcttttcggatgtaattagccatacgtaacctttgaaacaaatcattgtcccgaagaaacggcaccaaaactttctcttcaaaaatctggtttacaagtggcatggtgggagaataggatcagatacgaccaaaggaacaacgttacgattgcttttcagataagatggccaaaggggtgatctgtccagctatttgttggagtgtcgcacatgtattcctgacaggacacactcgtcatgcttttcagataagagcatacgcagtgttgcacttagaggaggcattagaagagagagaaaaggatagaccacacactgtgatatgttttttagccggtctcaagcaagagctgggtactagtcataggtcccgattctactggaaagagcacatgacatggcccacgcgtcagacaaattgtgtctttggcctgtatgtaggagagagattatgacttttctttatcttattttaatttatgtgaggcccacaataagtacctttgccaactttatacactgcatcagttctcacgaggtgctatatctgacatgggtcccacctttagtatcgatgcatgcatgacacactacacatgctctaacgtcgtcttattgagtacagtcttctgcgcgttactccaatgctgcacttatcttaattgcctctctaattcaaaatataaggtgtttttttttgtttcgttcggataatctttgaaaaaaatgcttcaataatatatcatttttatgacaaaaaagtatatcataagaaaatacttttggattaaaatccattaaattcagctttcactgctgtgaagcatcttattagtaccggcaagtccgtaccagttactccctctattccataatataaggcatagtcaaacttgatacggtcttcaaaactaatcttagtcttataattcttatatattacaaggtttatagtaacaaaattataaccatatgaaagtaaattcaaatgttaatccaatgatataatttttaacaagtaaaaattcaattcatattattcatattatactaaatgttggtcaaaatattttgaaggttaaatcttgaaatttgtgagcgccttacgttatgggatggagggagtagtagaaaaactagcactaatatgggatttcccaccctccgagcccctacgcatctcagaagtagaaaaatgacattgttcgggatcattactgacattgtttaataaacagcattgatgtatttagtacttcctccatctgaaaatataatattttttttcctacagaatttgtcccaaatataacttcttctccaccaatattctcttatcaatcaatcgcaaccctataccattcaaaattcccaccaacctccacttctcaaccaatcataatcttctaccgtttaattttacctacttttttataaccgtgttcaattctaaaactccttatatcctggaactgaggtagtatcaattccctacatgaccgacatagaaaggtaactattagtgtcagtttttgggcaaaccgacacaaaagagctggtcgaaggaggtgagtcaagcatattggcagagcgaaataaagatttaagtgccctcccatccgcatcgactcccctcctcttccaggctcacactctaggattgcctcgcccttctcgccccactgtgcgtgcctcccccttctctcctcttacttctggttttgccccctcatcagctagtgaggaggctgggatgctagatctagcgactctagcctccccaccggtggatccgtctagccaaactgagggcgcaagccgatcaccactcggatgccttcgacgctcatcactaggctacctccctatc

SEQ ID NO: 22380 - DNA, 13844 bp, Oryza sativa
aactgcttttgatttggaggagatgttgcaccatgctgaacctgaagttgtggctggctctgctcgtggtttggataatttcaatgcattacaaaaggcatcaaaggaacttttctacgatgacgcaaagggttgtggaaaggatttcacattgttgcgtacggtgcttgaacttctgagattgaagtctagaaacaatttgtccgatagtagtttcaacgatttgttggttctactaaaagaattgttgccgaagcccaactcaatgccaaccagcacctatgaagcgaagaagcttatatgcctgttgtcattgggtgtgcaaaagatacacgcgtgtgttaaccactgtatcctgttccgtaaagagtacgaggatttggacagctgcccaacatgcaagagtagtcgatacaaaacaagccgtagccagtccgagggtcaggatgttgtccttgacaatcttgaagagtccgatccatgcaaagacagcaacaaaaagaagattccccagctggtcatgtagtaccttccggtgaaagatcatttgaagcgtttgttctcgaacccgaggaatgccgaattgatgcgctggcatcatgaaaagcgaaaaaaggatgggatgattcgtcatcctgcagatgcaagacagtggaaggaatttgacacaaagtaccataagtttgcagaggacccaagaaacgtaaggtttgcattgagtatcgatggaatgaatccattcggtgacttgagcagctcacacagtacgtggccagtactcctaaccatgtacaacctctcaacgtggctgtgtcagaaaaggaagtatattttgttgaccatccttgtacaaggaccacgacaacctggcaatgacatggatgtgtttttggagcctttgctggaggatatgcgcgatttgtggaaacacgggatctgagtttgggacgaattccttcgggagtacttcacgctacatgcaattatctttgtcaccgtgaaagactttcccgcactgttttacctattggggcagatcaaggggaagacaggttgtgttatttgtgtggatggtactgtgtacaggtatcttaagggatcgaagaagctagtgtacatgcggcaccggcgtttcttaagaaagaaacacccgtaccgctccaaagcagaatatttcgacggtactgttgaggaaggtgatgcaccagaaccatggaagggtgataaagtgttcagaatgaccaaaaacctgaaggttgtttttgggaaggtaaaaaagaaggaaatgaataagcggaagagaaatgatgccgaagtgccagtaagctctagcatgccattcaagaagcattccattttctttaagtacctttcgtactggaaagatttagacatacgccattccattgatgtcatgcacctagagaaaaatgtcttcgatagcaccattgggactatactggacataccaactaagagcaaggataggctgaaatcacgtaaggacctcgtggatatgcagataacgataaagcttcatcctgtggatgaaggtaataatggaaaagtgtaccttccgcctgcttgctacaccttgacaagagcgaagaaaatggattgtgcaaatccctacatggggtgagagtgcctactggcttctcctcaaacattaagcgaccagtgtcgatgaaggatctgtcgctttcgagctacaattcccatgactgtcatgtaatgctcacagtattccttgccattgcaattagagcagtcgaaccagttcacgtaaagctggtcatcacaaagctgtgctatttcttcaattccatatctcagaaagtaattgatcctgaagagttaggtcctctccgggctttcgctatacagacagtgtgcgaccttgagatgtgtttccctccatcatttttcgatatgatgcaacacctcatagttcatatcgtgcctcagataattgcacttgggcccctttacctgcatcagatgtggccttttgaacgatacatgtccattctaaaaagctacgtatggaaccgcgcccacccagagggatccatgatagagggatacacaaccgaggaggtcgttgagtgttgcattgattacctaaaatatgggaaagcaattggtttaccggtacctcgacatgaaggtagattatctaggaaaggaacaaaagggaagaaaagaatccacgacaatgactacaaaaaagtgaaagatgctcatttcactgtactgcagcaactcgcattagtggagccgtacataagcaacacctgcaggaattacaagcaacaaatgtgggtcgatctaatagatggatcatgaagaaacacaagcatcactttactgaatggttcaaggacctcgatctaccagatggccataccatggaagaaagaataattaaaatgctagttgacgggccatcaagtgtgtacacctcatggcaagcatatcatctgaatggatacacgttttacacaaaagcgaaagacaaaaggagtgcatgccaaaatagtggcgttcaagtagaagcaatcgacacaactgggcaaaagagcacatactatggattcatagaagaaatctgcgaactaaactacgggccaaatatgtagattccactgtttcggtgccaatgggtgaaacacccagccggcatgtctgtggacaactttgggctgacaattttcgacttcgacaacgtaggccacaaggaagacccatgggtgcttgccgatcgggtcgctcaagttttctatgtgacagacccatctaatttgaagaaagacatagttatttcgggaaaacaaagtattttgggagttgatgatgtcgaagatatcgaggcatacaatcaatatgagaacatgatactatttacagattttcgaaacaagatactacgcgtcgaagaatcaattggcgaatcgccgaagccatacatgagaaatgaaggtgtagggagatatgtgaaaggctaattcatgtgaactgatggatgatgaatatttatgtatgaagtgtgacatgcatgatgatggataatgatgaatattatttaagtattaatatgtgacatgatgaatatttaagtattaatatgtgacatgatgaatatttaagtattaattttatattttttattcaaacaatttaataaattattaattcttttcctatcattatgattcaaacaatttattaaatatttttatggatgttgaattatttatgttgtgtaaattttatttacatatatctgcattaaaaaaagaaaagaattaaaatcattaaacaattttcgctggcaggccaataagaacacttctagcagaaatcattttcgctggcggtgagattaggtggccggccagtgaaaaaccatcgcctataagtacgcaaacgaccccaaaattttctaagtacggcgaaggcgcgaaaaccctagcgccgctaggctgcccaaattttgtgcgccagcgaaaaaccctagcgcctcctccgccaaccgccgctgcctcctccaccgcctactccgccgaccgcctcctccgccaacctcgtcctccaccgaccgccgccacctcctccagcgcctactccgccgaccgcctcctccgtcgaccgcgtcctccgccgaccgccgccgcctcctccgccgcctactccgctgaccgccgcctactctgccgaccgccgccgcctcctccgccgaccaccgcctactccgctgaccgccgcctcctccacaccgcctactccgccgaccgcctcctccgccgaccgtgtcctccgccaaccgccgccgcctcctccgtcgcctactcagccgaccgcctactccgctgaccgccgcgtcctccgacgactgccgcagcctcctcatccgtcgacctctgccgcatcgtcgctggtgagcatatgatgaatgcctgggatatttgatatgcatggtttgatgaatggttgatgaaatgcctgggatgatatttgatgaatgtttgatgaaatgcctgggatatttgggttaattctgaatttttcagtacaaacagtacatatccccatttagcaaattctgaatttgtgataaacagtacatatcccttttttcctcttcaataacagacaaacactttgatcgttaatttgcagggcagctcaaaacacactaacacatattcttcttttttcagtgaacactgctcttcttattataaaaactgaaagttctgaatttaatctgaaactcaagtgcaaatgtgatttaaatgctgaaatatgctgtagagaaaactgaaaactgaaatctgagatatcttcattaattgagtttaggttctctgatctgaattagtaatactgaatatagttctaaatctgagttagtaatactgaatatagttatacaccttttttaaagctatggaaaaacacaatgaagcacaacccgcgggtgacaagtccaatgaaactgaacttatcggcttgcaagtaatcgcggaagaattgtcgtcatcaagctccggtgaagcagggagtgactcttatcactcaccgagtgaccctcatccttctcctccaagaaagaataagggcggtggtgaggacgacgaggttgactcggattacattccccctgagccggtggtacgtaacatattttgtttatccaaatctaattgtgagtgcggattttaaccgatgacacgtcagatacaattacagaagaatgctccacgccgctcaaaaaggaaagcgcaagccgcacctatagaaagggaaccaactgtggaagccgcatctgccgtgcgcccaacagcttctcgtaaacccaaaaaaagaagaggcgagcgaggcaaaaacgtgctgtcaaaagaagtccacgcccttacgcggatcggtgagaaaggggaacccctatcgcctgaagatgtatgttccaagtatagcaaccaatgtggggcaatagtaagggataacgtggagatcacatttaaagattggaagaaagttaacccagctaaaaagaacacgtgttggacggagctgaaaagtaagttttcttttccagaagggacagacgaagaagcagcgaaggatttcgcgctaaagactatgggcaagttatggcgaaactggaaaacggatctgaacacgaaatatgttcaaaaggatcgccaaccttttaatgactatggaaagataacaaaggcctagtgggaagaattcgtggccttgaagacatcagcggaagaaaaagagaagagccagaaaatgttagaactggcaagaaaaaacatctatcctcatcatttgggatcggccggttaccgtcctaaagccaagaaatggagaaaagaagaagaagaattaaaaaaggcaggcaaaccaattcctatggaatatcataacgaacgagccaggaactgggtgcatgcaagaaccccatcttttaactcgaagggcgatgtagtcttcaaagatccaaagctccagcaggtagccaacaagatgaaggagatcgtcacacaacagaaggatgggatattcgtgccagacagagaagtggaccaactgtcagttgctttgggaacctcggagcacggaggccgcgttcgaggagtctcctcaaaggctagttggaaggatggcttcaaagaagatgctgctagctacaagaaacgtgatcgatataaggaggagttagtggctagctgtagggcagcaacattgcaagaatgcataagattttttaaccgaaacccggaacttcagcaacgcgttgataggatgcaagatgcgtttcctatgcccgatgtccctagctatccagtcgatgatataaaggaagatactccttgcagactgcttattccggttagaaggacaggaaagacaattcaggttgcaactggaagggcaatgccagggcgcagatttcattgccaagatataccagatgactatgccaaggtagaggtgcggacggtaaatgaggatcacaggatgtacgagatagactttccaacacccgaggatatcgtgtaccttggagatgcagttgaccagataatactatggcacaaaaaggatattcaattaggatcaacggattctccgccaaggatactgcggtcactatgtcatgccttgcgtaacatggacgaagaaccgggggatcctccagaagatgcatcacctcggcatcaacctgaaaagcaagccgatcagcctgaaaaacaagcagatgaaccagagcttgcaaagcaatccaatcagcctgaaaagcacgcagattaaccagagcttgcacatccaatgcctgagcaactagagcctgagcagccaatgcttgataaagcagagcttgaaagggaagaagaggttgtacaagaaagggaaaaggaggttgtacaagagagggaagaagaggctgtagaagagcacaaagaaaaaagtgcgcccaagaaaaagtttgtggtaaaggcattcccaggaaggaagagagatatcaaggggaaagcaaaggatgtttatgataaaaggaaagcaaaaggcctgaaaataagcttggataaaactttgagttttattcctactgttgatgtgccagaactatttgagaatggcaaagcattcctccccacatgggaattagaagaaggaccttggcaattaaaaaggtggcatgaatggtacatgaaagcaagtagaataaaaggcctttcatcatttacagttgccgtttcagaggaggttttcatgagcggaccatgtctactacatgttagttttaaggatatgcatgttctctaccgtaggcaaagactcgatgccaatttggtcgccatttggtgtctgtaagtgcacgagtactagctaaattgatgatagtacctatgcattatagtactaactaattcgatcatccatttttttgaaggatgaattacgtcatagcagaacagatgcgtgagactgtcggcttcctagacccttgccttataagtaagccgaaccacaccttcacgctagatgagaagagggtaccggcacatgttgcggccatgactcccgaagagagagatgcatacctgacagaaaggcatcaagctaaaattcgcgatgtggctacttacgtagctatagcacttgaatcaatgcagggcaaagaatgcatctacgccccatacgcctttgagtaagttttcgtatctaatatctactacgagtatatacttaatcgcggctcgactaaggatttttttttttttgcagcgaccactggattacttttcttctatatccaaagtataacgaagttatagtcttggattctcttgataaagacatacaatcatatcaggaaatcctcagaatcttcgatctgtaagttatatatatatggatgattgttttattctcatgacaacatgttgttagctttgatgaatctaaattaattgttttcttcaagcagtgcatataaaaggtattaccaggtaggcggacaacggcgaaacgacagagatcaaatatacatccgcaataagtggccggtaattaattttggacgacatacaactacttaattttttataaatgcacgtgtatatccatttataattaactaatataccttatattgatgtcaaaagtgtccaagcaaccgaagggaagcgtactatgtggatattatacttgcgagttccttaggatcaatggtcaatattgcaaaaattatggagatgcaagtagatgccatcaatacgtttgttaaattaattgctaactttgaattgctaacaagttctgttgccattatctcgatgcagcttctaaaattccccaagagtgatagggagctggatgataaatccattcagaatatacaacgagacttgtgctatttcattcacaatgaatgttgtcaccagcttgggaggttttttgataaagaagggcttttgggcttgccagaaaacgatattctttctaactggagcaagcatgcaatttaaattcaacgtcaatatcattagtcgacttttaagactagcagtagtgggatatagtagtagttagcacatagctgattttgctgtttatatatgtgaaaatgtccaggtctgcaggtgatggagaagaaggtggtgaagtctgaaatctgaaatctgaaatctgaatttacttttgaatctgaaatctggatggtggtacctcctgctatttttgttgctgctgctattctgatctgaaaatagatattgaaatgcagcacatgtatgtttcagacaatatattaaaattgagatgaactatgctgctgcttctgctgattgcgattgaactgattcaggtgaatgctagctttatatatatagggacattttattttgtaactgaaactgatctgcaagatgaaaaatgatgtgatgatgtcccagctgtatatatgtgatgtatggctaaatatatgtgaagagctgtaggactgaatatgaatacgagctatgaatctaagtctgaatctgaatttagtgcagttgcagtactgaaccattgcagatgggattttccaggagatgagctgtttgctggattttcaggaattggtacattcaggattctgtgctgcaatttttgaatttactctctgaaatggatatgttctgttcagaaatatatgcacataagttaataaatgggtagatgcagaaatatatatacttgtcctgaaatttatatgttatgttctgaaaattgtatacatatgctgatctgaaactgatcaagtgcaaatgtaatttaaattatatatattctgaaatctgtcctagtatatgttttggagagctgtgggtgaattctgaaatcagacctagtatactacctgtgggtgaattctgaatttgagcacaaaaagatgtactgtattctgctatttttctgaaatctgaaattatatagccaaatagtgtaagttttcactggcgggccacgtgtcaataaatggctggcgagaagtttaccctggcggcccacgtgtcaacacacagatggcgggcagttttctctggcggcccatgtgtcagcaaacgactgactgaacgcatctttgctggcggctgtccttagtcagacgctagtgaagcaagttttctctggcggttagtactagcgagccgctagcgaagaaagttttcgcttgcggctagctttagcgaaccgccagagaagagattttcgctgacggctccattgagaaagccgctagcgaaaatagatcttctctagcggctggactccgccagagaaaactatacatcttcactggcctctactctctggcggctcctagtaccgccagcgaaaacctgttttagccgccacaaaaaacgtatttcgtagtagtgtgtgcgcgtgtggcctcctcttcgccccactccgattgtggatgacgacagccatgctagaggaggtggatcaggtgacacgagattgatttgcgaaccagtgagttccgagcccaagatgagttgttgatatgtgaactagtgatttcttttactgatgagtatttgatccgtgtgttaatattgcggatcaatatatgttccattacggttgatgcagggttatttaggggttagtatttggggtttttctttgctgtatttcaagcagctgatcacttgattgaattaaaacgtctcgacgcgttttttagggcttgtgaacctcttcatttccggaccaaatatctgccacttatgaggacgacggatcatcaacaccggaaatccagtgccgattggagacctaagagcacccgcaatggtaaagtaaggtgctatctataaaacatgtacatctcagcaatatactagattaatagtaaaccacttcaatggtatgtctacatgggtatctatagctctataatccattgcctcgtttttctctatagactatctctaggttagtagatagctttgctctctctctctcttcatttaatctcttccaagtagaaaaatatgctgacatgaatctcttgtagagagcctatagataatcattgcgggtggcctaataacaccgatatcctgccatgctggccagagtagaggatctgaagtggtagtgtttacatgataaaaacttgttttttaatatacgacgttactttttagatacgtttgaccattcatcttgttaaagagaattatgtacttatcatttcttttgttttgactaaatttatcgtcagcattacttaaaatttctaatatctgcaaaaaaaaagatgaatggtaaaaaaataaatggcatcatgtatttagaaaacgatgatagtattacagtacaccaattattggtcatgttcagaacggagtgattgttcaaatacaaaatcatcactggcacgtgcaggccattggttatttaattaagttcacaagttctgttcccacctccgttataaatacaaacaaaagttgtgtagaattaattgcgtgaaaagcacatatgtatgttcggtaaagttccattaagttactcgctaaaattcaaacataataaattaacacgataagaaagcaacaacgagattaattagttgtacacgtagccgcgcaagtgtgttcttcaagctagtagacaaggttcgcttttctatctggtaagatgacaaaccaaacaagcacatcatgcataccgtcgctataactactaaaattaagctttagacatatctatcgcgtcgtgtccccttcttccactagagtctacgatggtattctaagccttcttacattttgctttcttgcttcatacggcctagcttctattgttccattgatcataggtggtatcatatatagaataatggacgattggccgtatcttgctttctaatgtggtacaggttggtgggtatattttataggattgaaacacaagaaaagtctgccaaagaaaatgtttggcagtaacatcaaaaactattttttttagaataaaaggaaaccctcaaacctcgatgactctcaaaccctcacatctgcccgttggtctgagcaccacctcctcatcgttctgatcgctcttattgctttctatagcctgacaacgctggtttgaccgtgccaaaaccaccggtccaaccgtagctcctccgttggtccgatcaacaaaaccgagaaaaacacgaatcaaaaaacttaaaagtagatcaattatattctttctatgtgtgtttataaattacaacaatagtacactaaactcgaaatctagactaaaagcttattttcgtcgagactgtcctctcaccaaagcctcaaatccaacatgtataagtagtcctaattccataggaaacgtacccaaacaagtatcaaatgtatcgttattacaattgaaactctatctttccaaatttggactacttccaaatttaactatgtatcccatatgtacacaatcccacttgtatactatatgaaatctttaccaccatgtgcattgttctttagaatatacataacacgtgatcttctttttgtccggacatcaacttctcccaagtcgactcccgatccatcacagacaacactctctcaaggcctcaagcaacaccacatttggataaacaagaaaccatatcagagcacaagttctttccccaacatgacttaatattaatacacaatagtattacatacgcatagtaatcatgcatgtcgaattcataaacatgaagtaatcacgagaatccaaaagattagctcaaatcagaaccgcccggtcagaccgtcaagtcagtcggtctaaccggtgcccggtctgaccggcattgaccgactcgtctgatcacatatctctataagcaaaacaccattcacagtaaaatcaaaaactttgttcatcgtcaaacctcggtccgaccagaccaatccagagcataaaaccctagcacaacctatgtctggtccaaccggcattacatggccggtctgaccggatatatccaaaggcaaaactgcacttcaccaatattccaccaaatcaaatatgatcaacatttccaattaattacaaaataataatcaaacctttcttttatacatttctacgcctagtactaattagatcaataacatttttagttctttgaacagttttacgcataattattatcgtgttaatgcttttgttaactacattggatcttagcatggatatgtgcgaacttcaagcatatatatatatatatatgtcatgtggttacccgcgtgttgcaacggaaaaatttagaaatacctacaaagaacatgatgaacataatttgtaatatccataaagacaaatttttaagcttgatagtatgtgatataagattatgattttttagacgattatctccacctatatatatatatatagtgcgtgtgccttggtatagactaaaaaacataatctaagatcgatgctttatttcattcccacagtttacgctaaaccgttggcttcgccagggcatccagctgatgagctgaataaaccccatgtcttgcttggcattcactacaccattggtccccatctcaacctttccgagcttcgcattttcatccttctaggcagaaatctgccaggaataccccaagcaccaaaacaccatcagggcgatcggtccatgacattccttatcgtcgggaaaacaaagccaggtactgttggaattgtatacaggatattcgtcgttggtgatttgtactactaccaccatttcaaaatgtaaaacgctgttaatttttcgcacaacgtttgactattcatcttactaaaaaatgtagtataaatatataaaaataatactccctccgggctgataatattagttgttttgaacaagggtacagtcaaactttataatctttgattataaataatttctaaaatatttgtcttaaaaatatgaaaaccagatgtgtagattattcttaaaaagtacttcaacaaaatcatatatttgttgatatttctatatatattataatataaaatagttgtcaaagctactttttggagatcgtgcccttgtcgaaaacgacaagtattatcaactcggagggagtataagttaaggttatactttacttgttgataaagcaagtcacaacaagataaatgatatttatataaaatttttgaataagatcagtagtcaaaaattgtgtaaaaagtcaacgacgtcatacatttcgaaatagagagagtatatcactcgaacagaacacctcatttgtaaagggtggcaacccacatttgtgatgcataaacgtctcgcgagtgattagtagtcactagtgagaaaacctacatgttagaagttaccatccgtcatggaggagtcatcggctacggatcataattacaaacctttatgaatgagaatttacaatttacgaattttaaatgcaaacaaaagaccctaatttattttaacgttaccacggtattccaacattccaaccatggtctcacattactggccacaaattcatgattttcaagtaaaatgtacaggcacaacatagatgtttataggccaagacctctcaatacacacaaaccatctattccatctcacctatagtccacgtgttgataggtttcagatgtcattcttttgactattgcttttcaaacgtgaggcgctaatttgacatactagatgactctaaatgagaattttttctactacaaagttgaatatatcatcgagttctacaacttccata

SEQ ID NO: 22381 - DNA, 8805 bp, Oryza sativa
ggagttccggaatgtctgcattgctgagattccaaaccaccatggaaagggccaattgccaagtatgccgtggttggtttaccggtggaaagggcccggtgggaaagaaagaccagggggaagaagcggggtagaggaattggtcaactcattaggctcaaagcacagactggcatcaaggagtccaaagcatcggttgcttccacttgtttgttgcctctacttctacttggacagctcagcagccctatattcccttgttccagcaagcaaacaaatagaatagttggaacgaatagacaagtaggacagtgttactagctagttaactcagttcattcttgactttcggcttgtagctttgctacgcaacctcgcattcgaaattagtacttgcttggacagcaggtaaagcagggacagtagtatatggtagtcctttcttagggtagggcgacgaatacttcaaattccggaaaggggtcgcgaagctaaagcgaaagttatagaaagcccctcaataatagactcgcacctgggagaaggagtgtttttaatttttaagttctagaccttgttgagatctacaactttcatatagagcatgtctctatccgagttatttgtgaaattcaaaaatttaaaatttctcccatctgtgacaggtactaccacccatcgtagataacgttatttgtgaagggtaatagttatggcccgtcaccgatgagtgctttcattttttatgggccttctcattacaaccgtcacagatgatttgttatatgtgacggggcatgtttatgacccgttataggtcatatgtgacgtgttacaactatgatccatcacagatgaccttatattagtgatggatcatccccagtagcaatatcttaaataggatacattttgaccaatttgagatgacttctaatttttctcattagtccatcgcacatggctcatcacggatgcccggctctacagtagcatatggcatctatgtctgacctaacaaagaggaatcctcaccatttaagcacaactatcggtctcagttagaaaatctattctatacaacactcttccctcccaagaatgaaactcctcccaccaacatccaaaggcacaaacccacttcacactacagttaaaagctggtcaaaatgctcccacgtcggttagaccttggtcaatccgatatacggacagcccacactatcacctctttacagtcttcatttcacataatgtatagagtgacgatatggctatcgccaaaatgaactcatgatggatctactattcttaagcattgcttttctaacatcatggtgcgaatgtgcttgtagcatgatgggacataccatccagtggggagctacccacgaaggatcaaatcctggtcttgccaaaaaaaaaactcacatgctttgaaaatagtacggatcaagaattggcctacgtatattgagccctcttgtaaaaaaaaactcacatgctttgaaaatagtacggatcaagaattggcctacgtatattgagccctcttgtatgtggtatgggagtgagccctcgtgtaggggtacaagcctaaaagcacagattaagtatcaattcatatccgtgtagggggaccgtttcgggtgccttttcttaattgtgaagatgtgatgcgtttaatatgtgtaagtatttgtgaagatgattgaatgttatatgttgaaatatttgtgaagatgcttgcatgtgtaataaattatagatgatattgcttgcataattttaagatgtatattgagttttaggatgtagtgggttataactatataggaggtgtacataccttgggaatggtcttttttctatgggcagaatttattccttccaaatgtttttttaatggcgtctcagaatttagaatgctgtctatatgttggcttcgttttcctctttatcagttctgtttataggttacaaatggatctttattatatgtatcaatataattaaatatcctagagcaatgtgcttggtatcatggtatgataagaaaaccgaataaacttatgaattgtagccttggatgaaaagaccagactcatcccgttggacaacaactacataaaaatagatataacttgtgtggcgattaattagctatatatcctttttcctgaacatggtaattgattctctaccattttgcctgaacacatggcaattaattcgcgctttttttacatctgtggaaatattaccagcacgtacttatcctagaattttagaaataaagattccaaactaactctcctgcttagattcctgtgagtaaagcaagagctctcgaccaaaacaagaggtttacaagcatggcaaaatgcaataagtaaaccttttgggcttgtctccattattggtgcgtggattcggatatccatgaatcaattcgcagaactccatagaaatattgacaccttttgtgacccccgagatttgtatacaagaggcagagatatggaccacacaatcatacaagagtctgtccaaggattgattcttgctatatgttctgcccttttgtgcctaacttgcttgagctaccatccgcagttaatttacatcaccagaataatctcacaataaactgatcatacaacctcttcctagcgcgtgacattagcatgggatataagcgcatgcggcaccttgaatttcttagcaaatacaaatactgatagtcaaacaaacagttaaatgcaacgtaaacagctactgagttacaatttctttttaagaacgtaacacagggtttcaattgttgcaactatatagtttaggcccacgaagttgaataataattcccgaaaaaaatctcgaaggccgacaaatcactactatagaaaacctctaataagtactgactcataggtgctggttcatttaaaattggcatctaatgatcgtgtcccacctttgtggaatgcaaaaatatagaaccagcagatttgagtaactgtagatgccggttctagagaaaaactggcactaatagtactaattttttaaaggataggaacctatagatatttcaaaggtgtcagttaattaaaaaactgacacctataatataacacccataaaaccgagccaagccgagccggtggggtgggattctttttatccccactcctgcaattcaaccgcccttatcctccgacctgcgagataacctttgctactctctccatctcattttctccactaccgtctccacatcccgtctccctccttgctccctctcaactaagtatgccgatcggttgccatgcgcatgacgagcttgaggtgcgcctagcgaacgtggatcccaaggtacgcatggtcagggggcgggtcttcgtcatgatcacaggcggtggggtcgtcgtgccagtgacgggtagcgccgtggacagtagaggtgggatcgggggagccatagcagctggattcatcccattcacggtcgcacgggggctcgcatcgtcggcagcccaacagggttatgaggcatggcagtggcggtaggtgtcccatcgccagccgaggaggcaagatatgggcttaggtcaaaactcctccatttctaacagtggaggagtcgaggcttggcggatggggggtgagtagcagattttggaatactagttgaatgtccacgattttctacggataaaagaaaatacattgtaatatgtccatgctcttctatttcttttttctacaggaaatattcgccttaatttgattttatatgttgatgttcatctagaagcataattgttgacattagcaaccaacttggaaaattgttcttaccttgctttctggaatcacggttcatgaaccaacaccttttacatcaagtgagaaaaacatacataatcttgtgaagaaaatgtccttagttagccccaagcaatccttgaaaagccaaaaattctaaatgtgcaatgctcaaattgaaactataacattggcttcaaacatctctaaacctttggatttaatcagggactgattcatctgaccattgtctaaacgatgtaaaatctgaaagcttcatcttttggattccagaaaagaagtaattatgaaactattttactagattggcccaactcctgatataactagatgataccccgcgcgttgctgcgggatattaagtattgacataggtttaaagggtccgtgcacagattctaaatggaaggatttaacataaaagctgcacagatgtacaccattttcaaagaaatgagttagggtccttgtataataggagcttattaaggatgatgaaccaataagtttaaagaaatgagataaagagaagtctttctcatgtagcgacaacaattgaatggtcacatatacatactttggctggagctactgtaggctatctattgtctaactgaacacagtttatatagaccaaacgcttgtttccaaatgagaagagcaaagctgaaaaataccttatacagctaatatcgatgatatgaagcttattgcccagtcaccaatccctgttttatagatgagtaacctaatatacatacaaattcggggggaagttctgcagattgatcgactgaactgacgttagcaattggctaatcgctctgtaaaaaaaggttattggttcttgcctcctcaaatacataagaatgaaagataaggaaaatcaagaaattttttgagataataatattataatttaaattatgaaatcaattaacatttgtaaagaaaatcccaggagggagggacctgcagagactatacctttcacttacatcattgatcaccatgctgcatatgatggaattatctccaatcacatcatgtgcaaaatcaccgtctgcctggaggatgacattttttttttataatttgtcacctcaaagaataatctatagtcgcataacttgcatatcaaatactgtagttgcttcactggacataatactataaccagtataaaatataaaattcatggacagttgcaaggtaacttaaatgattgaaaaattgagcatagcagaaaatgtatattttggaatcaaatctagtagtatgtaccaaaaaaaaattgtgccaatatacttattattcaacgttgtagggtacttgaatccagaaataaacctacagtcaaatctgagaagaaagtgaagcagggagtgagtaatatgcaaccacaaatactgttgtacggaagaaaagaggtcaggttgggatactaaaatatatgtcgggaactaatagctgaattgccgagaaacaatctgcatcaatcaatatcgattagaaagagatatttacctggaatgctgtattagggatgaaccgggaacaatagggatcagcatgaaggggaacaattaatctcatcgcctagaagatggatccatgaacctgtgtgatcgtatggtgcagcaatacaacaaacaacataatgtgtgtaatatatacaaagaagacaggaagagggaggcgagacaacaaccaaataacgcaggtgacatttattaggagaggaagatggatagacaactgggagccggctaggcctgcgcatgtttcccttgaactggcgcggccgcgcgggtggtatggctcgttccgtcgcttgccctactgccgacgatcccctttatgcgatgcgctgatgctgttggtgggagagagggaggcgatgcggtgcgagcttaggtcacgcggcatgggagagggaccacctgcgggctgcagcactggaaggtcgcgcggcgcaggaggcggaggacgtgctcgttgggattcgatgcggcggaagagcgagcgttgcagtggccgcggccggtgggggaggcggagcgtgatgcgggaggagaggataagatccaggtggacggcacgtgatgcggtgtaggtggaaccgtggaagcgcgatctgggcggacggatcgctcgatttagatccaacggtttggagaaaaaggatgacgtggaggcaccaggaagcagagaattcctagtagtggggatgatttgtataggtatataggattagctagtaaagaagaaaaccaaatgaacatcgatctagaaagtgatatggaaagaacctaactctcatagcctcttaagatgatgtctcaccacattgtgtcaggaatcgactaacatgctcaactattaaaatattctcttgtcttgaaaactttgagaaattgggtgcctgtatcggtttggtaatggaaccctgtcaaaccaatcaaaatatggttaccgatacatgtatgtatgtttttcttaggcttaagtccaaactgttcccgtataatttcagctattttgtctgcccactcctcatttctatacccacatattgatgttgtgttggctgctgctcatgttgattcttctacggttgatattgtctttcaccatgttgatattcacattgaccctctagccgatactgatgtggttctggtggtcattcttgccaatattgatgagacgatccccgctgataacgattgttttgattagattgctcatgatattgttgttgctgaggttgttgctgttggtgttgcccccccatactaggcaactttatgatacccaatagacacctttggaatatggatcttgctaggtgtccatgggccttcatccttagctatatcataagtaggttcctgaaactctgttttcatagccttataataaggagggtatttacagacgtcataggtttctctcgaacagtagatccattaacaacccttatgatcaaattttgtaatatattcactaaactccagattaattgattaaagctcgatttacagcatcatgtactgtatctaccctataattcaccaactcactcttacacctacattactcattcatcaaatccaatgttccaaatcatctatatacaaacgaacgacctagatcatcccacgccgaaccctctcccgatatcgcgcgtggatcgctgtttcctcccccaaaatcgcgcgccctcctctcaaaaaaaatcgcgcgcccccatctttttcctctcgcaaacgtcaccgcgcttatgccgccattcatcgccgattccttcgcctccacatgaaggggtagccgattcctctgccccaaatccaggtcgccgaacccctgtccccagctcgtcgtcactgattccccctctcacatcaccgggaccaccaccgcgtttggtcggcgccgatccccatctcgagccgccactaatcgccgcccatctcgaagaccacatcaccgcctgatcctgcttcctcgccgtcgacctccgctcgtcgttcacggccacaccactgcccacgatcatctccgagtcaccacgcggcgcgcaaccgtcacgttccatcgctgccgcccccgtcatcaattatgcctccgccaacgcctccatccgcggctccacgctcaagtcgatgccgtcaaccccaccgatgaggtattgacgtcatctactcaaccgctgcttcacatatgtaagttgcaaacaggtctctgaaaatcctcatgatctgttaattgcatgtacatatgcattaggcaataggtttggttatggatatataaagcttcagtgaacagtcaaggtggagattttgcgtcttcagtgaacatgattttggatgctctataattttcttgtattttttttgtcaactgaactgtacagatctatataattccagcaaattttctcaaacatgattcacatgcttcttattcctgcaaattttgttcttctacttcttttcctcttgcatatgtcaacataatggagtgactaacttttgggtattcttgccttttgatttgcagacacttcacataaatcaactgtgcatagacatatcccagaagaatggagtgactaaataaaattttggttgctccaagcatctctgaaagaacttgttaccctgtatagaattaagtgaacaatttaattaagtccgatttgtcattcgagggtgcttttgaagtaatacgtggtatatattaaattgcatgacttgcctttgatgaagctatatccttatggtcaaatgtcatctgtaacatttcaaattcaggatggtatgcatgggggcgatgagcctcagatttcaagtttcctttttttttatcccgtgtttgacctttgaattgcatctcaggcttagtatcatggttaatctgccaacttattcaatatcatggaataaaatacaaagaaagaatttcactccatatgcttttgaatctatcgcaggggtcagattgttgaggttcatctcaacaattcaacaaggatgacataacagctgttgaaatttcttgtttcctgcgtcctgtctctgatattcagttgcttattctgtcatttttttttgcaggaattgtcatgtcaccttggttgctttgcagctgcaaatggtagatgtccaaaagcatctgaggtaaatagctcccttctaatagcctgagttgtgccacaaattatctattatctattctcagtgatgattcaatagtggtttggcggcatatgatcttagaaggaccacttctttagacgtatatcgcattgtgtcaaaaatcattgtggattatcacacataataggtagggtaagtataacaatgttgaacattgttcttcaatcattggagcgaccccccaccccaccccctaggaggttgagaaattgaccagggctgcagg

SEQ ID NO: 22382 - DNA, 17758 bp, Oryza sativa
gtggccggctccctccccgcgcctatgaaatggaaccccctccttccgttctctcgttttagcctcctcccgcgtctccccgtggccgcaccacccctccccgccgttgtccgctctctcccatgccgccggccgcctccagccgtctccagccgcctctccctcctcgcccgtgcgtcggtaggccgtgctgtcgccatcctcggcgtcgcagccacatcctctcccccggcctgccctccgtttcgcgcggtgaccatcgcaggcgcgttcccgccttcgtctagtggcgttgccgccactgtaccgccccagccgcctgtgccgcctcgctggtgctttggctgtcgtcgtcgcctccttcctcggcaccacggggccatcctcttccccggccaggccacggcgtcacccgaatttcgccggaacgctgtcgcccgcgccgcctctccctcggtctcatcggcacccactccggcagcctcttccgccgtgccagtgcgccggccgacgtcgccatctccacctccggcatcgcagcgacaaggtcgccctcagcctcgcctcccctccacccgaacccctccgctgttcatcgtcgttgtcgtcctctcgccggcccggtcatcgtcgtggcgttcgtccctccgtcaagccgttctcgttcgtcgtcctcgctttgtcaagtgagccgctgcagccccgtcgttgtcttcgtcctcggctccgcgtcgtcaagcctcgtgctggccgtgtctcgccttcgtccaaggatcgccgccgaagtcgttcgcctccgttgtccccgagccgtctccgccacgcccgttcatgtgtgcgtgtggtgacctattagtgtgcccgctcggtagccgcgtggtttccacgtgtgcagcccgcgtggtgtctagtggagtctgtttgtcggccacttgcctcggttgacacaccggatccgcttccgtcgacccgtggaccgtctctgtgtactcggtctaccgtggtcccttaggttgacatgtggggtccgcatgtcaacaagcgcagccctcctgtcttttccaggctagcgcttacacatgttttatagttgtaaaacctaattacaataatccgtaaatctccatataacagcattaaacttcggatgatcatatcttaatcatacgaaccccgaatcgacccgttcaagtctcctaatgtttgttataacctaaagaaccttgtgctttcttgttatgtattgttattgcttctttttaggcttgtagctttgcttgtgtgcttcgcgtagcttctgttgttccggcggtttccgaagcgtgcttcgcggtcgtcgccgaaggttcggaaggccgttctctctgagcaaggcaagtcgcatcacccttgagcatattgaatcccaatttataaaattattttgatttaaattattgcattaccgctttacttaaattcccgggttatcactgttttatttagccatgcctatttacctttgttatgaccttattattattgctattgttattattaccttgttcaccctaggataaacaaaacaccaactagtgggtactctattaacggttccactagtatgaatttaggtagatgcttcgctgattaattaggcaacactaggtggttttataactttagactttgggagttctcatatcatttggacactgtggaatggttggcttgtgatggaattgaacacacacctcccccctctattcaaaactcccaaaatggttttaggctgggctcgaggtgcatggttctgctagtagcacctcggccactataaggaccggtcttcgggcttctgttgcaacgcactaccgtactaaccacatgtctaataggtaaggcttaactcggtgctcagtctagtcctggcaagagtacacggatggagatggacgaagtcggggctcgatggacatctctagggcaaatgaaggttacacgggctgcggctcgatagtcgagatgccatggcatagggccggtgtcctgctgttaggggctcaatcttacctacctgtctcgggattcctgccgtaggcgaggttgggtcggttcttttgtcacggctaggatgggtaaaggggttatgtcacatcctttacgatgggttccacggccgtggaatgcagagtaaagatgtgtcttgtgggtaaagatgtacacctctgatcagagtaaatctattcgaatagccgcgccctcggttataggcaagcctagcaatgtacccaagttagtggtttacttcttaaaacctacttaacaactaaaatgtggaatggttggcctggattggcttgggacgagctgggacccaggtcgggttgccagttcggtctgaatcatcgtagaccttgggttaaggcaggttcgtgcgggttcacggccttgattaataatactgtgtagctctaggatcgtgtttacaaaatagctttgggcaactaagtgactttcaaatgctgttttctgcaaagcttaacccctatactatttccccttgtacccccttgcattattcatgcatctttcggtgtgacttgctgagtactgtggttgtactcattcatgctctatctctcccccttcagtaagagaagctttggagaagaagtcctaggtggagtcctgacttataccccagttgagcgcctgtgaagatggagccgtaggctcgctagtccgctgctgtttatttttgattgtcaggcctgaagcgcctgtgtaataatgtaagttttatcgatataataaagatgtgccttttgtatcatgtttgtgtggtgtaccccggcttttcctaggacggagattaatacactagcgttcgggaaaatgcaaattttctcggtcgcgacaagctggtatcagagccatctcgactgtaggataagccaagtggattaaacctaaggacatattttataaacaaaactattggcgaaaagttccttttttcctcctttccctaatgctatttgcaaaaggtttactcccttcttcctccttcgaatttcaactagtactagatggtctgctttgcgaagaagaagatgtcgtcagttgtctgccgaagctccggaagactgttggatccgctagcgaagcgaaggaagcagtgaagccagctgtgaagccggagtgaagatcttggagaacccatcgcaaaacctaagccatcctctagggtagagtcgttagtcgtgtgtttccttacttgtgtgtgtagcgcgtggtttggatctgtagggtgtgatgtaaccatgctaggttgtttgcttaatcaacttgcagaataagcctaacatacatcacaacagaaaaagattagatctgttaaggtcctatccttagttctgatctctttctttcctccaattttccctctctccctcttcaaaccttgtatcagatggctaacaatgaaaaaggcaataaggtcagaagtcaggacaagggtacctcaagctcccgattgaatgaagcaccagacaccagttgtgtggcagtggtccaacacctgattaaccagaatcgattgcttaaagagctactacagcagcatcagacaccaattctgaacccgagtcagatgcaacctcaagtgcagttggaggcagtccaagcactcacacctcaagtcagtgcaccaccagcatcccaaccggcccatcgcgccatgcaacatctggactcaaaagaagctagaatcatttgttttatatgtgatgaacaagcgcactatgcaaggaactgtccttagcagaaaagaaaagcatcaatgcgaaccgaagatgaagtccgtaagatgaccattaccggcatagaatggcctccaccaggaatgacaaaacgtcagataggaaatttctttcgaggtgcacaacagttgacagaacatcttttagctaatggaggtagagtgtctgatagtgaagattcagatcaagtctcctcagatgatgaagatgagaagtatctccaatgtttcaagcagaataaaatggaacataaggcatgctctcgttgtggagaaattggtcatgttgctagctcgtgtgccactacctgcgttcattatgaggaagaccatccatccgacgggtgtccaacgagcaggatcacttgtttctggtgtgaaggaactgatcatgtaccaaaagaatgtcaatttagttttctgctaacgaagaagatggcaaaccaacccgccagttccgacggagagaagcatcaaggcaacacaaatcctcgacaagacttgtgccactacctgcgttcattatgaggaagaccatccacccgacgggtgtccaacgagcaggatcacttgtttctggtgtgaaggaactgatcatgtaccaaaagaatgtcaatttagttttctgctgacaaagaagatggcaaaccaacccgccagaggacagaggaatcaaaataggaaaagaaaatgccgagtccggaaagatatctgttgcttcaattgtcatgaattgggtcacttcaccgacaagtgcccgaaaccgagaaacatagctgccaacacgtcaatccacgcaaatccctggaatcagaagcttgctccccagcgaattgtcatccatgcatcccgaagcagtcctatagcccgcgttgcaacagcttgaactccaatgagtgcactaccacaaggtgtcaatgctcaatttcagccccagcaaccagttgacaagacagaggccagtatctgcgttgtacctttagatgttccagcacagcagccaagaaatcaggtacaagatgaagaacctgagtgtaagaaagttattgtttgttacaactgcagtgaagaaggacattactccagaaattgtccacaaccaaagcgtaacccacgccatcattccggacattatgcacgaagaagacatgaccacaatattagggtcactggagcaaatgcagaacctgtcaagcctagtgctagtcagaagcaatcataatactcttgtatcggtgttgaagtacttttgttttatagttgttccctgtcaaccatgtaataagagagaaacatgagataatgaatgagtttgacaagtttatgaaggatcgatgttaagattgcaagtgctgtgagttgtgtatgttttattgatgattaaggagacctagagtctcatttccgtgagctcctactctattatgaatcaaataacctagttgtagatagaaaagaaaatcaagtgatcaaccaaagagacatttgtttggactaagagtttcagatgtgtcttcttcggatcaaaggcaacaatcatcagtctagcttttgacgaattacttcaaggttcctctgaaaggcagcaggccccagggaccacattgccaccagaagcatccacaactctcagagtgaagagtacttggttgagagaggtcaaaaggtgattgatcgaagaggtcggaaaagatgtttggttactgggaaaagatgtttggtcgaaaggtgattgataaacgataatgagaaacatgatttgtgtcactcgaggaagactcccaataacaatcgaccctacaacagtcaccctgtcattaaggcagaagaattcgcgagtaagcaagatgaccacaggtagaagtacttccatgaggacaaggatggaaacctttgtgacatgaccaagaagtcaagaagttaacctgaacagttggaatctaaagctcggttcaaccttcggctctgtattagatgctacctagaataaaagcacttgcactagtatcgttcaacacaatttcctagcaatcgatccatcgggaaagaacacatcaaggttgaaggtgcgaaagaatacgttgaatgctaaatgatgacagcatgaagagaatagtggaaagtaaaccgaatgtaaagaaagtgaatccaagttgcttgttcgtgagaaccattcccagttatgaaccaagtgatatgttcgaagataatctatagagtccagatcaaaatcacatccaacaatcagatttggtagcataaagattatacagttacaagtccagcagcaaagtcatctgggaagacgtcaaagcatgtcaagtgggataagttggttctcttgggaagcataattcaaagttagagtggtctacccttggatcgaatagtagaaatgtctagcacccggagactaggaaggctaatatgaggcaattagtggcaagttgtcaatcatatggtatccttggtaagcgggatatcttagtctgaagcatttggtggtaagctggaaggaaacgccaagcgtggtattctcatgatgaaaagcatggtatcctagtaatgacaagctggaatcgacgcataacgtgaagtgggtaacttgtatgaggctgacgccaaagatatgaactatgagaagttctagaactaaagccccatcttcaagtgccgcaacccagtcgaagtcagctagaggtgcaaccagggacaagtcaggtgaagagaagattccatctgcaacagaagatcaagccaagcagttcagactggggaagttttgctgggcaagtttgttaaagaagacgcaacggaagaagtcagaccagaagagaagactgcccacctatcttcttgctagccttctcgaatcttgggtgcaagattcctgtaagggggtggatttgtcacgtcctgataaattcatcccgaattaaaaatcattctttaaaaggaataatagaattaattaaaattcaaaaagaaatttgcaaacattaaaatgcgtacaagaaaaattcgaatgtgacccggagaatttttgttaaattctccttggtctaaaaggagccctcaaattttacttgaattttcagagcaccggaaatatttattaagcaacaacaacaattaacaaagtttattaaaaagaaaaactaaaaataatcccctttcctcctttgggccgagtttagcccaaagtctttctctcctccctcccttttcccttctctctcgggcctcctctcccctcggcccagctccgtccccctcccttccttctctcgggccacccctctcccctcccctcggcccagctccctcctctcctcctcccgcctgggcctgccccggcccaagccgagccgcagccctcccgcgcacgcgcgccgcacgcgcgttgaccgcgcacctcccacgtgggtcccgcccgtcaggcgtccccgacctccagccgccggcctccttcctctctctcctgtgaaccctagcgccgttcctccctccaatccgctcaattcaaatggctaattccaaaattgattagggggaattaaaccccattgattcctctctctttccccctaatttcccccttgaatagcaccattaatcgcccggaacagccgcgccatccccggccaccttccatggccgccggccgccattcccgcctccgttccgccctctcccgtggccagctccctccccgcgcctataaaatggaaccccctccttccgttctctcgttttagcctcctcccgcgtctccccgtggccacaccacccctccccgccgtcgtccgctctctctcgtgccgccggccgcctccagccgcctctccctcctctgtcgtgcgtcggtaggccgtgccgtcgccatcctcggcgtcgcagccacctcctctcctccggcctgccctccgtttcgcgcggtgaccatcggaggcgcgttcccgccgtcgtccagtggcgttgccgccactgtactgctccagccgcctgtgcagcctcgccggtgctatggctgtcgtcgtcgcctccttcctcggcaccgcggggccatcactccggcctccaaggcccgtaggactcttattcggatccctatccgaattaagctcatattggatctccatccaatccccttattctggcccattaagcgtgcgaccctgtaggttcatgtatactcggctgttacccgaaaactccttttcggtccacgcatcaacagtggcccctagcagaacgtattgacccacagggcatacataaagataatatcggctgaacctctggtgtatacttgtatgaacccttttgcctcacgatatcgattaagctcaaggctagatatgtgccatcctctaatatctcaatcattcatccgaacctgttgatagattatataacttgtgattgactcctcaatcacctttggcatggccatgcactttcataatctacaacatcgaggggcccagagatatctctccataggaggggcaaatcccatcttaattattcatatctcactacatgtttcatagtatacccgaaaactacttttataactacccaattacggagtagcgtttatagcagtccgtaagtaagctactacacatgttgggaaccatgataatctcagatctaaggatttaacaccaacactaaataagatcactgatgacacaacacatatggctcttgcagtgtcttatgttggatctatccaacaacatgttcactaacatgtgtccatattattaatttgatatctctatatcatgatctatgagacatgatcatcaattagtatatgtgctgatcatctaatcatatttgttccacatatgatatttaatcagggatcctatagaaatattaacaaacaagataaagagtctcatgaaagaatcacatattcattaactaataatgagttatctatttcaagaaacaatgtcggataaatatgtaaacatagtatgtgatacaatcatatctatgattgcctctagggcatatcactaacaatatatatactacacataacacacggatataatcatataaagctctgcaagcagctagggcggttaggcaaaaatggcgatcagtagtgttgcccgtgctgcaatagtaatcttgtgtctcgtcgccctcacaaaccttgcgcaagcccagaactcgccgcacgacttcctgcaaccccacaacgccgcgcgcgcggaggtcggtgtcggcaagctctcctgggacggcaccctcgccgcgtacgcgcggaggtacggcgagaagaggtcccacgactgcacgctcaagcactcccgtgggccgtatggggagaacatctaccggggcagcgccgggcggcggcggacggccgcggacgcggtggcgcggtgggtccgcgagagcgcctactacgactgcgggagcaacacctgcgtgccggggcggcgttgcgggcactacacgcaggtcacgtgggcacggaccacgaggctcgggtgcgccgccgtgacgtgcgatagcggcgccacgttcgtggtgtgtagctacgatccaccgggcaacaccaacgggagaggtccgtaccctggatgtggggattatgatgtcgtgtccgaatagctctacttaattactacctttctctagagaaatagctgtacgtatagcaaaacaccacctagtagaatttcacgtgattgttgaattttaaccccttgtgtataactccctcttatgtttacataaccaaataccattgtagtctaaatttagattttccatgataaagcattatacttgtacgttctttctttttgctcgtaatacaacaatgggaatttcagggcgatatgaacgtgatagttcattttaacccacttgttgctgtataataaaagatttatacgacatacataaatagtacagagggatgaagccatggaaaattcattattttcttatggtagggaaaaatcatcattgccaataatacgaataccagaataagctaggcccggtacttttctcgataaagatttacatcggtttacgttagcacgcttttcaaactacaaaacggcgtgttttgtgtgaaaattttctatatgaaagttgctttcaaatatcaaatatatccatttttcaagtttttaataattaaaactcaattaatcacactttaatagctttcttattttacgtgcccgcttttaatcttatgaagattcaaatgccacctaaatatattcaaagtacacctccagtaaaattagatgataccccatacactacaatacaaagacatcctttggtgtcggctccaaaagcccctttggtgccggatttggagcggacatgaaattggtggcacctatgagtcttcctcattggtgccggtccaacagccggcaactatggtgtgcatgatttcaaaaagaaaaaaagatatattgctcggctcaatcgaaccatcacagaattatctacgtcataatgaatcatatccaaccataaacaatgaacagtaacaatgaatcttgcacgtcccagaatatttcagtcagcaatttccaaatgctagctctagtcatgaaagaacactgaacacagagatcatatccaaccatgcatagcatcttgcaagaacagtgcagaacacttatccaagaacatgtaacaacaaaataacaacacgaacaaatcacataacaaatcgcttagtcgttgtccgtcgactcgccactcatcgtcgagccatctcgcgaaccccaccacccagagcaatgccccccctccctagatctacatgccactagtgggaggccgatggagagggagaggaagagggagaccggatcagcgccccgtcacctctggggagcccaccagttgcctcccttggccactgccgccaccaccaacataatcgggttcataaacctgtcatacaacacaaaagaatagcagcagaagtctcttaaattcaaataaacaaaagaacccgtggagtgtcaaccatcctacacgggcgaccagctggggcaagagccaagttgaacagctactcaccaccctcaccgcccgtgtagggcaggaagaacacacatcaatactttcatcctcacctgaaagataacaagatgaatatgaatggtactcgcaagacatacccaatataattagtacaaaggagaatgcaagcttctatttcaaaggaaggataaatgggttaagatttgccataaagctagttttatggatcaaatactatgctgagagtataagcatttgtaaatcatcgcaatctgaagtttttgacagaaagcatatatatctaaaattgaaccacaaataagcacaactggtgctctcaccatcatctatgggccaccgttgcccaaataaccattcgcaaaatatctaccaagatattcatgactagtacccaccatttaacccatgtttcatgctaatatggagtgactaacacatcaagcgtcgcccgtaaacgtggacacgactattcgcatagttttactccgatcagaggtgtaaaactttacccacacaaaatgaacaaggaacaagtgtttgatcgtcgccatccactccaaggtgagcttcgcctcaacccatcatctggtttcatctttccatgcaaaacacatccatactcatatttctccactttgcacaggttgagttcacggtgccacggtggccatcgccgtcggctctagtgcatagtcgcgcgtcacttcgccgttcccgttgacccggtgcatttccggccaagcagctgcacccctgacgtaaccaaggtcttaggagccagacgcgccaagggattccatagagatgccaccgacgtggggatcgagctcatattctctacctccagccgccagccatcaccgtagtttcctccttcctcggtgagctagagttcgattccttatgcaggaattcctcttagggtttcagtagcctcatgagcaccttcatttagcagcccacagactagagcgagccaccgccgtgaagccgacgccatctacagccgacgggtcgatcctcgtttcgccaccaccatccaagacactaggcccatccataaatttggttagctccctaatgccctctacatacacatttctgcatgtttttcatttgaatcaaaccatagctctaactggtcatgcaccccgaaccataccgccacttgcaccactactgtcattgattcagggatcaccattggccatgattagaccacctacggatgcgcaagagacccattgtggacaccccgagtattataccatccagtgtccaacgcgaccaccacatactgttggaggagtgggatccaaacacgcataaaaaagccactcatcctcaatgtgtccatgatcacggttgacaccttctgctataataaccggaatgccgagtagtgatcgtaagagataaaccataagataacttgccaggctactccgtcatatgcccgtcaaccacacgaaggcggcgactagaaaacaaggcataccccagtgcctcgatccaaagcgctatccccaattatctcaagcaatcaaaacccgttactcgtgctcagctagtccccaggaatgcgactagcctcacacattcatcgcaagcaattggaacatcatcacaagtgcataaaaaggggttaagtacagcaagtatctggtacagaatagggtccgatgtcccatctaacagcacacaagtagcagtggaagattcaaacaaaagctagaagcacaaaacaaaaccggtggtgccacaaccccacaaggtcaccgggcaagagccaagctgaaggcagcagaagatcattccctgccctcgccgcccccagaggacagtgaccacacaggaagcacaattctacgccggagtcctcatctgaaaaacagcggagccgggttaagtacaagattgtactcatgagtcttacccataaaaatatatataaggggagagagaagtatacaggtttaccttaacctagagcaatctaagttcaacatttgcataaagccaattttattgagcagatataagtgaaagcgataacacaataaactgattagcaacattataaaattctggacagcaagcgaattaatctgaaatgtacaagtaaatgagcccaaacggcgctcacaacatccaccatggaactaccaaattccatgtcatcatggcacagcctgccaacatcaccatcaaacataaacacaccagaataacccaagtttgatgctaacataactgaggcacacatcaagcattgtccataaccatggacacggctatttgaatagattatactctgatcagaagtgtacaactgtacccacaagagatgaacaaggatcaaatgccgcccaccacacaggtgcaacctacaagtgattcaagctcatcacatgtcctttcctagccccaccccaaccatttaaaccacaccggggcccccgacgactcagtcacgtgcgtgtgatgtgactaaggcgggctcaccacgcgggagataccccctgccgtaccccggccaaccgggcactccgcggatcccaaatcctcacgtttctccgatgggcgtaaatgatcacagtaggtttagtaatcaaacaggccggtcctaggatacggtgtgtggtaagtatgtagggtgcttgaatggacgtcaaaatgttcggtccttaacgacccagacagagctactgcatcaggggaaacatacctcccatcatcgccctaccacccgtccaagtcaatcatatttcatcaaccattatttaatgtaagtgctccagtttttagcccattaaccaagttgtccatatcccagaattaacaaaactgtccagccatatagttgtatccccactaagcaaaactaagcataatgaataaaacatcccaactatttccaaccaggagagtaataggtatatggcagctatatataactaaggtaaatacaccaattaattgtctaccatgtcacccaaaactattaactaaacaaatgcaaatatatatatagattcgcaaccaagggagtttaagttcattggcgctagatgcttaggtgctcgccatcccgctgagggtagtcacactcaggctctggttccgcttcagcactctccagaatcttcgaatctatcgaaaagaagcaatatgcgaataagattcaaataagcatgcatatgcaacatgctcagtaaaaacatggcctaattacagtaggtagagagtatgatgaacatattttagaaacaagaatcatctcatttacatttatggtttgagagatataaaaataacaagccatatacactgaaaatggcactatgctaaaactgaatataaactatagatcatttggtgatccccacataatctagcaaattttcatgagtgcaacttgtaccgtactaaagagtataacttactggttatatgagaagtatttggattatttaatttggagtttgaataagttagtaggtatttaagaaatctagagagtgaggaaaagaaaactactgcttgcagcactacataagatttgtttccaaagtttacttcctaaatacttcgtgattgaggaatatgaggaaggcaagatttaactcagctattggtttgtgaacacaacttatacgaggtgttggatagttcagcgagggattaagtcacaacatgaagtttctagctagcctaagaactaagaagctcaaagacaacaacttgctttcccaatggcaactcctaaaggtcgtccaacggttgctgcttcaatgcatgcatgcatgcatacactttataatgcaggtgatgtggcactgaggttgcgaaggttggagcacaaactaaccatagaacaagtacaaatcgatgacgaaaaaacatggtgatagcaacctaagtaaaccgagagagagaggggttgtaatcgccggaatggagagatacgagttgtagctgttccttgctgtaaaactttgcatcaacgacctgtggagagagttatggaggctcaacataatggcacaccaagagggacaccatgtataggaaggaaactcaccaagtggaggaaaaacagggttgttttgctgctaaaatcagtagcaagctccacctatatattttcttcccgatctccctcatgaaccctatcatatggaagatatttggatggatgggaggcttggatacttgatattgctgtggtgtgacatgcatggatggatctcaagtgtttggaggagttttgatgggaagaagtgagctgggagctcagcttgcaagaaagaaaagaacagacaagggagaaagaaaggggaagaagataaaagggtttcctgcttgtcttatgtacctgaggtgggctgcacgaccaggagggtgggtgggggcttggtggagagcctaagtcagtgacaagtgagaccaagttgagctgggcccaagggacagatagaggaaggtcggacacattgaaaacagtgaattttcaggaattttctttctctcgttcttgggtaactagtttgtcctagctaaaagagagtaaaaaatgtgtgttctagggtggagatagattgagttacctagattccatttttcaaagtttcactcaaaaattcaaaatattttaattctggcaaaaagatgaaaaggggtatgctgagacctaaattggattttaatgaggtcaaaattaattgtaaaaattctagaaaaattatattaactcatgataaataatctagtttgtattcatcataggcttgaactgaaagaggtaaatagaattgatcatccactgccctctgtaaatgttgttggacagaatcattcttgtgcctgacaaaagagaagagagtaggatacacctgagcaaagacctttccattacacaggtcatgccagaagctaactgaagatccactgttaattgttggccttgcaaaacctctgaatagaacttcaaactgaacaatgtccttccaccaaaaggaaccacaaacgctggcattttgaggcaatgtcctagagtaataggaattccaaatcagtttaacccaaggtatctgcatatgctggttaaagaactttcctaactgcttgaggagaagggccctattttgcactctcagatctattacacccaaaccacctttcttcttgggcctacaaaccttcccccaggcagccaatgattctttggtggaagttaaatcctttcccctccacagaaaatgccttcttgctctatctatattctctatcactgccaccggaagctgaagggagcacatatagtaagtgggcattgctgacagaactgaatttacaagagttagcctatctccataggagaggaaggaagaagtggccacaagtcttctttcaatccgattagtgagaggagaaaaatccactaccttgggcttagaacaactgagagggagccctagataggtgaaaggcagagaaccctgagcacaaccaaaagtctttgccagacaatcagccttctcttcatccaaatttaggggtatcagacatgactttgcataattcactttcaatcctgtggaaagagtcactgtattgaacaaagcttttagagctagaagttgtttcccagaggcttgcatgaatagcaatgtatcgtctgcatattgcacaattggaaaattttgatccccaatgacaggtataggaagcttgaacacccctctttgatgtcctttgttaacaatggtttgcaagatatctacaccaatagcaaaaagcagaggagatagaggatctccctgcctaacaccccttttgcaagggaagaactttcctgggaccccattaagaagaactgaagttgaagctgaactgaataagagctgaacccactcaatctatttgggtgggaatcccattgaagtcataatctgaaggactgcagggtgctctatcatgtcaaaagccttttcaaaatctagctttaagagtacaatttctctcttagacttctcttaggatgtccaagaagtgaatgactttatgacaattatcaataagcaaagatagtttggacagcttcttactccaacattttaagtttcttctgagctgtttgaacttggctgaaatagcaagggcatttgaactcgcgttttgaatggaaagccaagcattttcaacctgttgtaggaaaccatcatgctgaacccaaaaattctcaaatctgaacaaattagctttagggatggacgtcttcacctggatcataaggagcacatgatctgaaatgtgcttcgaaagagctagaaccatagtgttcggataggagatagaccaatttggggtaatgaaaacccaatcaagctgctccaataatggattatcctgcatgttactccaggtgaaagacctgcctttcaatgggacttcaatcaaacccagattactaattagttcattaaacaggtaaatgtcactcatgtcagcacaaggcctatttctgttgttgatagatctgtaaaaattgaaatcacccataaagatccagctttcattcaaatctatgtctagcccattcgtccagtgaacaaaaccatctctttgggggccagaagatggcccataaacattaaccagattaaaggtatcagggctaactctggtagaaaactgcacgataatagcatgatctgtttgatccacaacttgaccattgaaatgagcactattccatcccacaaacagaccaccagaggctcccctagaagggacaaaaacaaacttatcaatacgtctgggacaaaatttcttgacataagccaaatcaaaaacctctctcttaatttcctg

SEQ ID NO: 22383 - DNA, 3720 bp, Oryza sativa
ccacaaagctgagtgcctatattctgcagcaactgaatagagcattcagtaggaggattttcagaatcactattatcatcagcctcaaaaaacttagggggtaaaggatgaaaagaagaaataataccactctgttcagccagaagcttgagccttttagcacttttccccctaggttttccaatccctagattggggtcaggtgacatgtactcctctgtgagcttgtttattctagagctcctcctacgatcagtgtccacaattaccacagttttaccttttttctttttgcttttcttcaaggaaggccgacaagaggacaaattctgctgaaaagggtccaggggcatatctgagacatgttgcacaggggggacacagctaatgggctcaattatttcagcattttcaaattgttgggcctccaaatcttcctatcccaacatggtctgttgagtctcactgtcttcaatcccaaccaccagcagaactgctgctagaagagcaaactgaacaatatgaataacaggcaaagagaagggcacaatctgaaggtcttgaggggggcccaaatccagagaccactgaggtgagagctgcagcaatctgaagggactctgattctgaactgacaaagtgccttcccaagtagagagagttgtgttaaaagcagacagaatcctccaaaagaacagattaataagaaaccgaggctggacaagatgttcaaaagagataattccctggttctacagcaccatgttatgagaaccagccaccactgacagagcactattctgagaaatatgctgattagcatgggcatcctcttgcatattgtccccaaagacttccacatggtgtgccagctgcgggacaggatcagggataggaatatgattcacaggaggaagatcttcatccccaggcatgatatcaggcatctccccatgacacagaaagaccgaaacagtccaagatcttccaacacccccaaaagcagcagcccttttaatcacaattcttttagggacctcaagggcagaagagtacaaagctttaaccaacaaacttcctcttatattatcatctaactggactttgactacttttccaaaaagagagactgctttgtcaataacggtcggggttttgaaatccaacgggaagtccaaaaacataacccacccttccacagtaaaaggagagtttcggcaactagaagtgagatcatggggaacaaaacatagcataaactgattatccacctcatagggaccccccgcgattagcgtatctcttagcagagcagacgcaacccgaacataaagaaactccataggatgatggttgacctctaacacatgataccccaacacattctgaacatagtttaccgccaactgttgaaaaccctcaaactggtcaggggttgggggaggctcaatgcaagccacagccataccttcattgcgccttggaggatcctcttgaagacagagatcaacgcactcaagctgatgatcccagggttcatgcagttgtatggttggagggaggaaaagagcagggtcagggttgacaaccgccatggaagcactatgtcacgaccggaaataacccaacgggcgttccttacgtgcgtgcattaatccttgtcccaggaggcaaggtacaccaaaagttgatacaattcagagtttaacaagcggaagcgtaaatagttaatttattacatgggcagcggaggcccaacacacacaaagacaaacgagaaacagcggaagactagggcgacgaccacaggcacttgacggcaggcacgagctagacaccaaagccttcatcctccaggaacccctcttctgggtttgggaaaaattgagcaagactgagtacaaccaccgtactcaacaagacacacccacaagtgcagaataaaagcaagggagtacaaaggagttatactataaagggttagggttgcagtaaacagcatttaaagacattagttgctcaaagctattttgtaaacacgattctagaactatacaattattaatcaaggccgtgaacccacacgaacctgccttaacccaaggcctacgatgattcagaccgaactggcaacccgaccctgggtcccagctcgtcccaagccaacccaggccaaccattccacattttagttgttaagcaggttttaagaattaaaacactaacttgggtacattgctcggcttgcccataaccgagggcgcggctattcgaatagattatactctgatcagaggtgtacatctttacccacaagacacatcttcctcacgtgtaaccacgtgccacataccaccacggtatacagacgaaagacgtgacatagtttccaacccatcctagccatagacaagagtaccgacccaatcccacctacggccggaacccctgggacaggcaggcaggactgagcccctagcagcaggacaccggccctgtgccatgacatctcgactaccgggccgcagctcgtgtagccttcatttgtcctagagatgtccatcgacccccgacttcttccatctccatccgtgtacttttgtttataactagactgagccacaaactaagccttacccactagacatgtggaagtacggtagtgctttgcaacagaggcccgaagaccggtccttatatggccgaggtgctactatcaaaaccatgcaccccgagcccagcctaaaaccattttggggattttgaatagaaggagcggtgtgaagccaatttcacaataaccaaaccattccatagtgtccaggtgatacgaacattcccaaagtctagagttgtaaaaccgcctaatgttacctaattaaaagcgaagcatctacctaaaatcatactagtgataccatgagtagagtgtccactagttggggttttgtttattctagggtgaacaaggaaataataacaataacaataataataaggtcgtaacaaaggtaaataggcatggctaaataaaacagtgataatgcgggaatttaaataaagcgataatgcaataatttaaatcaacataattttataaactgggattcaatatgttcaaagatgatgtgacttgccttgctcgctttcccaaacgccggcttcaacttccacgaagagcggatcttccgaagctgcagcgtctacacgaccaacggaaaagaaaaggcttttactctaataaactccatataacaagcagaaacaaagcacaaaaatgggttcttgacttcttaaggaaaaattagagacttgaacggtccaattccgagttcaaatggccaagttatggccatttgaagtttatatgctctttaaatggatatttgcgaatttcttcatttaaattttaatttaaaatcggatttattgcgtcagccgaggggaggagcgcgcggaccgggtccacgggagtggggcccacgcggcagcctctcggtccacggtggaccgggtgcacgcggctcacaccggccggcgccgtgggtcccacgcgtcagccgcacccgagggctcgggcggctgacggccgggccccacatggcagccgcggcgcgcgcccgaaggcggcctcgccggcacagccgacgggaggcggcgcgcccgcgcccctatggtcgccggcggcggccataggcacggcggagcggcggccgagag

SEQ ID NO: 22384 - DNA, 10926 bp, Oryza sativa
cggcgagtggcggaaacggtggagggaggcacggggagcgtttatatagggtcgggagggggagagagaggccggatgagggggaatcggccgcggaagatccggccgccattgatgcgccggcgaagttagggggaaactttctgaacaaatccgagggagagagagagggaaaagtggggggaaagggagagggaatcacggggagtgatttccccctctttattgcgcgcggggacggcgggaggcggcgggattcgcggcggcggcggcgctagggcacgggcgaggcggcgggagcggcgggaggtaggggataacgggtgggccccacctgtcagcgagggtggcgggcgggcccgcccgtcagcggcacgcgcgcggggaggaggccgattgggccgcgggggagaggagagagagggagggaggtgggccgagccggcccaagaggggaagggggggggggaaaaagggactttttagggtttttctttttataaaacctttttaactttgtttatttcttaataattattatttgtgctctgaaaattccactaaaatttatttacgcattttaggcttttaggaaatatacaaaaatcctccaagccttatttgacttttaactttgcacattttaattgttggaggctttcacatggattttacttattctatgcataattttgaggatgtattttagagtcgttttgggacacgacacactaggcaaagcactaggcaaagaagctgggagcaaaaggggaacactctgccgctgatgcgaggaagaggaagggtttccttgattcgtgaaacaaacaatttccttccctaaaccatccccaccaacatcaggcttagacacagtcttgggccgccagacatgggccttctttttattccaacagaccacggcccgatggtctaatttgcgacaggaagcgcatttgaccatattaacacattcaaattcccggtgaccatgcgacagacaacgatcacaaaaaggaggggttttaggccgatctaaaattgaattcttcttatcagccgataatggcggatcacaattccgctgagcacggaccagagtcttaccgacggtgatctccggaaaacgaagacgggcaaaaatagacttgacaggaataacattcttagtctgaaatttagaatccgcaccctttgaagagtgaaccaaagagagatctaaagactttgttatgttaggctttagaaaaccagagaccctgggaggattaaccagcttaggagaggaatcagtcttaacaggcttggaacgcgcagcagactgctttttagattttctagaaacaagtgtccattcagaattctgctcagcagaccatagcctccattctctctgccaatttggacctccatccctccaaagatggaatcgagcatgatagtctttacagatgaaagaacgaagattatagatccaaatacccacggctttagaacaaaccaaaaaggaattgctccgatccttttgatgagcgacaaacagatcacccggagatcccccaatacaagccctcagcgctagaccaaccgaagaagtgcacaaccgaaaagaagaacgggggaaatcgaccacaagacaaaaaggacgacgagagaaaaaatgagaaaagtgcaccgggaaagagaacctggattagacttcatcacggatacggtcaccaggggaaaaatcccaaccccctgggggcgctggtgtcaccatggatgcactcagaggactccatggaccgcctccccaatcgtccaagaaacccggaacaaggatatcgcctccattcgctcccgatgaattagctcagttctatcttatttcggggtattttggtttagggtagtgctaaaacttttggtagttttttggcgctatacaatagttactaatatacatgtactaaaccattaatatatggtctcacctctcatacacatatgatgttttggagttatttatacaatagttactaatatacatgtactaaaccattaatatatggtctcacatctcatacacatatgatgttttggagtctgtgttgtagctggctacaaatctgtcgtccactttccttctctctcctctcttatattttccacatgtgcttatagttgatttgtagcctgcccttatacttgctttgacaatgggtcaaggatttataaataaatactaaagaaaacagatacactttacaaatttaggtctaaccatgtggggtggtgcgggttctatttccagaacctcatggacttttctgaaaaataaccagcaactgacatgtggacctctatgtttaaaatctggaaattataatgaaagtagtttaaataatttctgtagcactgaaaatggtgcaaacatgtaaactccatagaaaaatcattttagctccaaatgagttgaatcaaaatttgttagaataaaaaaatgaactatttttttatgtcaagtaaagtctgtaagaactatatgaaaaatacatccaaatttggtcatatgtaaatagccacatatagtgtattcaaacatgtaaaattcataggaaattagttacaactccaaatgaaatgattctagatttgtgaaaaatggtcatttatggtaatttttgtgcataagatgacatgtattacaacttgttgccatggagggtagcaagggtatacttatgctatcttgttgatgaacaacatgatttacttgatatacatgtttcaaatgcattattaaatactgttgtaaaatacttgtaaaataaaatttgctttatgctaaaaattaaagactacaaatagcctttcctttgatttagagcttgcatgtatttaggtttgatttttgccttgccagtacattaatgtactgattcttgcttgttgtatattttgttttccttagtccctgttgcaggttataagattgttttaggttgagtgttgcgggaactactcttccaggatagttataactgggggcttacccatagtcggttgcttgtggagttcttttgggtagacatgcttccactgtacctatatatttggccggtcggcgtatctaataacttagatgtaaatgtacaataggtttaaatatttgtatgccctatgttggatgtcgttgcttgatataaaaatgtgggactagtcctcctccgagaaactagtctagcatgagtaagtgtttagaataactgagttgttacagaactccagcgatttgagtcaagtctccaagaatgtgtaatacatatggtcgccgccttcgtgtggtttgaccggcacgtctcaggctaaagttgattggcatgccgagtcgcaacaatatatctcttgttctctactgggtgctttgggatctatatgttgtacgttattttgcatgccaaagctccaatgagtttggatggttatttttggtatttcttactgacattactagaaatattcattcccagcaatggcgctaaaaatagtcctggtatatttatggttacaaaagtagtccacaagcgcatggatataccattgtagcatttcacccggaagtatttcaaggtatcgtatttttaaacccaagggaagataataagagtgaacttttccaatacactttatacatatgttacttgtaattgttaaagcctaagcaggggttaattttaatttaggggtaaagtgacacgaagcaaagctgatcaaatcctcataatgaagtaattctaagtggaagaagaattagaaagcactcaattcatatacttctagtatacactcaaatcctagtttacatctgttagtatataatcgtgtggccaatatcccctaacagttacttacgacaacctatcatggccgtccaactggggctaaatacggagcagtaccctccccaggaatttgtcttaggaatatatactaacgtggaggaatacctgtactgaactgtcaccatcagcggcccacctgtactgtcccgcagcatatatgcccaattaatgatatttaataatctaagcaccgcgcttacattactaaatactactctacaccaaattaatgacatagagcaactgataaatcatacattaaacccgcaccattgcacctctctggtaagctacccacacaatcagtacgacacagatataaagtaagaacagtactcagactaaacaatgtacgaaagatatataaagaagaatatttcattaatatcgaaagtattacagaagagaatacaagagctgctagagctataccgaaactcttccgaagactttgaggactcctaatactattctactctactccacttagcagtaagatactaatactaaagtatgaagaggaattttagcttgcttgagtgtgttgagagagtgaatgagctcctcgtcttatagggcaggtatgacggttgtagtcatgtgaattgtccattttactctcacaaccgtcattgaggagtgatctggaccgtccacgtggagggccagccggagctgacgccaccagggttcggctgaacctgggtcggccaacagacctccagcatcgggtagggcactgacaggtgggtcctcttgtcggttgtgacagttaaggcggtttctggacggttacacctgacatatggcccctccttatcctctagcttgcttaggagtgaggttttctccactttctctttattttatttgataaattcctacaacatgttattctccaagtacaagtgaatctacattgtttgaaaacaaatatgcattgtaagcattgctaattcttcattattttagttatattgacggtcaaaatttgtctgtaacgaccgtcaacagttaccatattattcggtttttgtttgagaccccatatgtcgaggagtgatcctctctagtgggagatcgtgagatcccccttttatgagttcggccgggggaaaaggctcgcttggggagatcgcgagtctgccctgaatgctactaaatcgtgtgcgagcgccaagattatacaggttcgggccgctatggagcgtaataccctactcctgtgcgtgagattatggttgagtgttacaagggttcctaacctccggagagtgctcccgctcttctcctcctagagttcaggttttactgagtgtcgtcccctctctcggtgggcaaggtcctccttttatagttcaaggggttaccacatgcgctgcttctacctactctttcataggagggggacccactttaccttgaccgggccacgatccttgccttcgcccggaagctaagcagcagtccgtccttgagcgggacccagcaccgccccccgcctgacacgggggacagccttgtcattccctcataaatggatgaagactcgtggtggtcctcctctcatggagggaactctgaatgacgcttcgatgggatgggacatacctacctccactccgccagatacagaggcgacgtgggggcacaggcgcccgtccaatcggacgtgaccggcaacaggccggtcacagactggtcacgtccgattgacgtgggttagtcaggcggcaccgcatgtatgcccttaccgcataaacgcggtgaggaacagttggggcgctgtgaattgatggctgttcagcctgggtcccctccctgctcgctccccccaccacatggcagttgggcgagggcctcggggcgaggcagcacgagggcccgaggggcacgacgtggcaccccgaggccccccggccgtttctgcgactcgtgaggtgcgggagtagggccaggctgtggagccacgcggctggatgggaaggtaacttcccctcactttgcatacccccgggcccatatctctgacaaatataatagattttgtttgcttatccattcaagtaatagcaccagcatgatgtttaattatatgaatgtgctagtcatcttaattaatatgcatgttttgaaggctgaacgcctgaacacacatcaacaaagaaaatgtggtaagcaaaagaactggaaaatcagaaaatttacttcaaaatgaactgaattactctgtcaaatactaagttcttgtgttgaactgaattatttttcagctgctagccgcttccatattcttttgcccccatcatcatttaaattgcttgcaaatattgcacaagcgtacgtgttgtttcaaactcttcagggccttgagcccttgagccgccgctggaagacggtctagttgatgtgaataatcatgggatggataaccaagggtcaggggggttctttacaaaaagtaatgtatgtggcgggcgtttttttttttttgtaaaattgctacatccggttggcagcccttggattgagatcgagaggaccccattgcacgagtgcatgtgtgcatgcgatggctcgtgtgcacctgatacgctgccgtgctaagtagctgcttggcgcaatatatatgtaacaatttgagtggtttaggccaactcaatttctggaaccatacttaccttgcaagctttcatatcagcatttcttaaaagtttaaactcggtgaatagtcattgggattcgagcataaggtcatattagtttggatggacacttttctaacttacaatcaatttaagccttcccagagcttcacagatttgattgcagccgtatagcaagtgtttgccagggcatcgatacatccaacctccattggggtgcttggtttagtcggtgtatgtcaccattccgcttgcattggtaagatcttgtaagagcttggttaaaagcttgagtgtgtgtgatatttaagcctccacttcctagtagttaataggaacgtgcatatttttgtgtatgttttttgttttcaacatgcatagaaaatttgggataactgtgctcaacatgaacatcttggtcaagtgatattagaatgatcaacatgaccaatatgaggtaagtgatgttcttccaggtaagatcaaatctactctatcttattttgaagaaaattatgatcctcgtgctaacattgattgggagctagtggttgatagagaatttaaggagcatgacttgtctgagaaacatatggttatgcgtgcctctagtgttctaattaaaaatgtttttttctaattggaaagtaggcataacaaaacaccacaatcttggaaagacatgatacgatatttgagagatgtttatgttcccatgtattatgctgacattctgttcaacaaactgcaaagtttaaaacaagataatagaagtgttacttcatactattataatatacatgcttgtttattacgttgtggtttagatgaatgcgaagaagctacataattgaggtttttacatgggcttaacaaagaaatttaggacacgcttgcttgtcaatgatatagatctctttctaattttttacaacttgcttgcaatgctgaaagtaaaatagaggaggacatgaaaaggaaacatgctatgttttttcctcctattactaatcatttgcaggaagtgcataatcatgaaaatgaggagagtgacatgaaagagctgccgttcccattattcacactcaaatttgatggatctccatcatcagaagagagaatcacatgtaatctacatggtgctgcaattaatcaaggttagtttgccgttaataaattgaaatcatccacttttattgctatcatagagcaaccattagttgagattcctttgtcacaagttgatttaattactgatcattttgataaagaagtgttgtgtgataatgcttcaattatatccatgccaaactagtgaatgaacatgctattcctattggtaattcttactgcgctgattttaagcatgttattcacattgctaatgaggtagaggaacgtgaattgatatcttctttaaatactttgggctacgttccgtttgatgatttttgtgagttcaatagtttgaaggagaaattatttgctaaatctgatttgccatgtccaactaatgctatttttcatatctttggcgaatataatgatagagaaatataattggtgtatagaatttatatatgttcagaattagaacctcctgtagatgtggataaaacatgcaagctagagagacctattattgctaatcatgttatcttgagtttgtcttgtttcaattggaagaaacaggtttctctaaatggactacgcgacaagcaccatatggaaaaaccgagtacggttttccgtgaagaaggggaggatgatgtgaccatggctactatagatacaaccgcagttcacatcatgaattaacaagaagacatcaagatcaagtcctcccaagtgctggaatttgattcggccgcctactacattgctgacttcaaacggccgccaaatatgcatatgagctttgttttgggtccacgagtacatgatagaaagctctcggagtcctcattccaacggatccagcctcattgctattttccattcaattcagatgcaattgaagaaataagttgccgcgtcacgtgtcttgggcctctgggcttgtatctttgtttgggagcttgtatccttgtttgggaccccggcacaagtggggcccatgtggggtgcgccccaacaagttggagcacaaccctagggacccctagatcttcctcccacctttataaatagctaggtagcccttcagagtttcttgggttttgttagattaatgtttagccattgctacttgcttgcagcacgcatgtcggctagaccgtccgtctgcttgttcttcggaaccccaacttatcatttgttttttcaattcctatttgcaattcagattgctttaatcttgtacttgcttgtttcttctatttgcttgcaggaataaggttggtctgcacttgcaagatcaacaacctacatagaggtgtatcgatcgctaagactcaacacaacaacgtcttgtacggttgtactcggatcatcaacgtttcttccaaatcatagttatcatcaactcaccgaaagatcgggccttgagtgtctcgagtgaactcagtgtttatcacttgggccccacctctatcgatcgccttcctccagagactgtcatgtgggcacctaaggcggtgcatggttgtctggccccatattaagtcggtttgagctaacatatgggcccttcaatctgtgtgctgtcacatgattcatcgaaggtgcgctttttgcacgccgttacatttctccttcactttattgtataaaccctacattcatactatttatccaagacaagtggatctataatatttataacaaatgttagttctcttttatttattgaggtaattgacagtcgaaatcggtaattaacggccatcagtaccaaactgcatttataaatgccttagattcaactcaatgtgcgttgagggctttgtttatatattgtttcacgtgtgtaatacatgttaatttcctagggcttgtctaagtatcttcctcttggtcaattacaaattgtgtgaagtcatattgctcgttattcctagacctttttactaaaccttcttagcttttcacccatgttgcttaatgcttatcgtctagactgtgctttgtttttgctagaaaatgaaacaaaagaatgaagcctattaataatgttggaggtacaccactaggacctttcggccggacctaccaaaaccaagggcttaggcgagaagtcaggacagagcggacgggtttcaccaaggacgggttccctcagagaattgtgtgggtgaagatcgcaaggtgggaacccctgccgagaaggacacacgcttcgccaaagattgggccgagccatttggctcgttaagagcccaaatatgtaaaggacactgtgtgcccccaataatgtctctttcacaagggtaaccatgtaaattctcctgtacaacttaaaccctaaaggggagatctgtaataggattataaatagccccctagggccatgtaacaaggggatccaaaaatttttactaaggaatataattgttcttactttccaaccactgttgagagaaccacgtctttcgacgtgacacggttgtctattcgacaacaaataatatagttttgtgagataacaagagcatgtttccaaattatagcaatgtatgtctcagatagttttattttggattgcactaaatgcgcagcaaacaccttatttgtttgcttcatatataattctttttccattcctatggtctaaatatgaaatattatcttcttagtcaactgcaggcactcatacacattcaaggctttgtatgaagtcaacttcgaaaaaaatgaatgtttaggaatttatctcatcaatggataaagcggcaaatattttataagatcttagaaattatattttttgtagaaatttgttatagattggtgtaaataacatttacaggttttttgcaataccgtgcttgtgccttttgtacaatgattccatgctatttgagacatgacgcttataaaagattttatagaaacaattttgtacatttctgaatattaatatcgatgattttatagtggtatattgcttgtaatattgatgtgttgctgcgattcaaaaggatgttactagtaggtgtacctgtactcacatatatgttagtggctttgcaataatatgagttattgggcttgtgagtttggaactccacctccccgcatggaaaacatgataatttattaatatataattaattaagtattagctaaaagaaatttaaacacatataataggttgggattgaggaaaacactaaattaatcaaggtcagcctaccccctgaggaagaaacatt

SEQ ID NO: 22385 - DNA, 627 bp, Oryza sativa
ttaccgatgggcctggcgcgaactatagccaagtgctgctacatgtagggagctcccagtgaacagtgttgcctatcagggaaatgggctctaccgcttacagtgctgatctaccgcaattattgctctgcttacaaagtgcccttctcccgtatatctcccttcatggcgagactcatgtaccccgatggggcgatggccttcaagcaattctacacagaatttgatgacctcatctgttccataacccttggcgatactcgcctttggacgagccctgatacgaacatactgcttcggaacccccctgtacctctcgtacggaaacatgtggcgtaggtatacatgcccgagaataccgatctctttacaaggcgacaaagccgatgcttccttatatgcgaaaaatgaaggtgcaaatttcaactcaccactgacgagacattgcgccacttcattctgaagggcttgtaatctatgcggatcgatgaccttctgcaaaatcgcgttcatgagtgcacatacctttgacatgggaccggacgaacgtcaccacgttgctccatatgcttcatatcattacgcgcttccagtgtatctgtcaactttccggatacacctaggaag

SEQ ID NO: 22386 - DNA, 1483 bp, Oryza sativa
aaaaatgattcagcaagcattcagcacaggaatcctaaagcacccacttgacattgaaggagcaccgcccaatttgcaaatacgcagatgataccctgatcctactaaaaggagaagctgaccaagcaacagcaattaaagaaattttggattcctttgcaaatttctcaggtctgcaaataaattaccataagagcactctagtacccatacacctgaatgaggcaacaaaaactatggtgacgcaaattctacattgccctgctagttcactcccttgcagctaccttgggttacctctttcaaccacaaaaatctcgcataacatgctgctgccagtcatctcaaaagttgacagatatctagccggatggttgcctctatcaaagggaggaaggctaactatgatcaacgcagtcatgtcagctatcccgacatactacatgtcatgttgtatctggccggaaaaatctatcgaagcaccggacaagataaggcgtgctttcttttggaaaggggaaaaatccataaaaggaggtcactgcttggtggcatggcaaacagttctactacaaaaacagcaaggtggtcaaagatctcagggcacataacacagctttaattttaaagctaggacataaggtactcttttgcccaaacaatccaatgactaacttggtttagaaggcgatatctgaagcatactgtacagttactccccagatccagtgatacccccacttggaagctcattatatctcagtttaacaccttaagtgctgcaactcaggtaacccttggtaacggcaaaactactctgttttggaaggataattggctgcaccaacggttacaattcacacacccaattctattctcctttgctctggatcaggactgcacggtagattcacagtttacacaaaactcctggcatgtcaaattgcatcctaacctctcctaccaagcagaattagagctgcactcgcttatgcaaattctgcacaggcttagccccatccctgagattcctgacacaagagttcttttgcattctgtacccaagttctcaacctcaatgcctaccaacttctgacttaccatggagccctttggaaaccggcagaatatgtctggatacacaccatcccacaaaactgtaagatcttcctttggttggctttcaaagacaggcttaacaccaaggcgaatatggtcagcaaatgctggagcgaagatccgcactgcccgctttgcccggcattagaatcagctgaccacatcatcctgagatgcaagaatgctaatagcctatgggaaaaaatgaacctactgcacctggcaaaccattctgaatcatcctcagctttccttcaagcagtcgttgacagaaatcattcaaatagaggaattgaacctatctggtttgcagcttgcgcctaccaccctgtggaaagcacgcaacaacatgatttttgagaga

SEQ ID NO: 22387 - DNA, 9126 bp, Oryza sativa
tccggagcatgagagccaatgaagcaaccaaagaacgaattctctcctggtgtgcagggctgtagttgtgacattactttgtatatacccttgtaattccagccccctgttttgtttcttttcttttcttttcttttgtctattttatttttcccgtttcccctttcttaataccccctctgctataacctgtaacttgtaaacctcatttctcttaatgaaatgactataaggtagagcacgctctaccttcttgcttcaaaaaaaaaaacatcgcttattttccatttagattgaacatggaaatgcacatatgtgaaggactagatcattggcatttgaactgtgaaacacggtgtatagccataaaatttaaatggtgctaaacaattaaaactgtccaatgaattgtacatcatcgctcaatcagtatatcagaaaggagatattgacttattgcaataccattgacaagaacatactgtattcatgtttgtgtcttggaagtaccataaacctaactcactcttctagcttgagattttctaacatggaaatgattaaccattacagctgtatcttgatgaaggagagctaagctatcccataagtaatagaaaacacctctaaaaaagacgaaaataggtatggcactgtcatgaagagaacaagtcatcctataaaaaccacatgagtaacttagagaacaacagggcacatgaacacatctaagattctaagtaaaagtgtaactgtaatgtgagtgcaggtaccatgctacaataacaatactacctcttcaatttcctgtgggatatgattatgaaaatcttgaagcatccgatgcctatccaaacaaaagaacaaaactggatttatgatggaaagattgtagttcagacttcagacagtagagtccttaggagaagaaaccaagcttttgcttctcctcatctaactcagctgtatcattatcagcattcccttgcttagctacagcctcacgcggcagtggagaattccattttgttgtaactgattgctgatagagtaccccgccagccagagtgaagagcaagcaaaccaaaccaattgaactcgcatgtttatcccagatcataacattgattgcaaccgtgagaaacttgttgacaacacgcctgttactgtgaaagccgtggcagagattgttttccttgctgcgaaaccaaagaagctaatgagcagcccaaacacaggacaaggaaactgtcacaaaggcatcaagttcaaaccaactctggccccttgattcaatggctgatctgaagactgataagtgctctccagtcaaaaaccaaaatacaggagcgattaccagctagagaagattgttgtagagtacgaagccccatgtgttcagcccagtttatgagaacttaagattctgagaagtagctggtgagaagctagctggtaagaatctgtagaagctgagaaacccagcttctagcttctaatttatttttggatttcataactatagattcttataatctgagtgaaaatctggactatttggtggagcttctagcagtaatagcttctaaaaaaatcttcagctcctagaagctcctccaagcaggcccatagttactagataagcaactgcccatgggtaggctgtgaggctgaaccccgaatatgtcatcacgtaaccaacagcacctcctaaaatagtcacaaaggacaaaattgtaagcttggaaggacatggctgcttcctgaatcctgaaggcagtatcatcagcgatggcaaccaaaagcggggtcaacgatctgaacactataaaggtatccacattagcacgcttcaggagatgtgtaggtgttggtgaagatggcaaggtagaacacaagcgccgccggcgcaaacttctttgcggtctggaagttgaagggatcatggtagagtagtccaagctttgcgagggtccagacaccagccactgatgtcaagtactgaagtgcagtcaggaggccagggtagctgaacttggtcatggcatacttgttgatgatcgccagcaagctcgagcacagagaggcagccgaaccacggagccctagcagctacaaacgcctctcaccaatcggccgagatgcagatcccgcaggtgagattcggattccgatcgcattcgtgaggaaaggggaaatgcagagcagtcaccgctccgacgaggggtcttaccaagaaagctcaagacagtatatatctcgggtggacggattcccgcgggagggggagggagagctccgccgctggcggccggccggcagctgccgcgacccgcgcgtgggcgaggttgagcggatcgggagaagagggaggggcatgtttgtggtgtaatttggcttctattatttaatcttggtaggccaaattatttagtttagctttcattatttattgaatgtttggagacgtatacgcgtcggacgtacggcgcgagccgaaaaatcggacgcctcgcacgaccgtccgatgcagcacgcgcgcgccagccgtccgattggagaaacaactgtcacccgacgcccgcgccgttgcaacacccaaacacattaatctgtttcattcaatgtgtcccgccgttgaccactagcacgaggggagatcttcgcggagcgactggcgctgcgctgccaccggcgattctctccagcgccggcgaccctatccctcgcgcccctatcctcctcgcgccggcgaagcctgcaacaacgccgacgtgccgccacaccacacgcagtcaccgccctgcaacttcgccaccgacgccatggctcatctgatacaccaagttgagagggatttttcgccgagctcatctagtgcaaacagaggaacaaccccaatgcataatgcaacgaatttggtgagtaaaaaatttctagggttttacttgtttcactttttttttgaaaaagtttcaataaaaaattgaagtatagatctatgaaacaatgtcttccctcatgcaacatttatattcatgtcttatttttaattgtaacttctgtataaatttggactggaatttgacttgaacaataatccttaacttgctaaaacataattgtacaagttaatgaaacaagataaaatgttacagattgatgtccaagcaccaagctcatctggtggcttccttgatgtgctattatccaaatcctctgggcatgaaactgacttggtgagttgtccttggatttgaaatatcacaaatgtaggggggatattttgctttgaaaacacagtatgtaacttagtgaaacttttttgtgtactaggttgtggatgtggaaagtgttgacaacacagatgtggctgctgtgactgttgaaattgatgaacaattggatgaagatgcatctgaaaatgatgaaaaagaaaaggatgttgtttgttccccaccaattgttccatacattggaatggagttcgatatagtggaagaggcaagaaatgtttacaacgcttatgcttataagctaggatttggaacaagaattgcatcatctagaaacagccaggcatcatcaggggaaaaaaagcatcgaagaaatgtaaagtatctgaaaatggagacaatcatgatgatgaaccgaagttgataaggagagaatttgagtgtgttcatgcacgtaagccagaaaataccacaaaagatagtgctggtggcagtagcttcatttctgaagagaacaaggaaaatccgcccctgcttgaaggtaacaaaaagaaggctcccttgctggtggaagggaagaggaaacgaccaaaggttgcaaagtatgattgcaaagctcatatggctgtagggcttagggacaacaagtggagagtcattgctttccaaccaaaacacacgcatccgatggtgaagcgccttggaagaaggagatattacagatctcataggcacatctcaaatgaagactatgaatttctaaagactttgcattatcgaaacattgcaacatcgcagattttggcgttgttaggagatttgcacggtggtgtaaggaatctaactttcattgctaaagatgtctcaaatttgaggacaaaactgagacaacaagtttcactcaaagatgttgcaatgactattgattatttccagtaaactcaagcagatagcccctccttcttctatgctgcaagatatgatgaagacaacgtgttgaaggcgttgttttgggtggatggcagaacacggaaactgtatcaaagctataaagactgtgtcttctttgacacaacctttatgactaaccgttacaacatgccatttgcacctattgttggaattaataaccacctgcaaacaatattgcttggatgtgctttgatttgtgatgaaacaactgaaacattcatatgggtctttgaaacatggatgcaagcaatgaatggacagaaggtaggttcagtgatgacagtccgagataaagcaatgagagcagcgattaaaaaggtgttccccggtacaattcatagatgttgcttatggcacgtgacaacaaaagcagatcagcaactcctgcccgtgtatacttcaaagaaaggcttccgtgaagctctgtatagatgcatatatgactctgaaacaatagatcagtttctatcagattggcaaaaaatggtagatgaatatgacctccatggaaaccaaactttgaataacttgtgggaaacaaaagaaatgtgggctccggtatactttaacacaagttttttcccttttactgggacgacagggagatcagaaggtctaaatggactattcaaattatttgtacacccacaagattcagtgtggatctttgtcaaacaatatgagcatataattgagacaaggcttgacagagaggacagggagggctacagagtagagacaacagaacctagaatgtattcaaggtaatgtgatatgcctgtcttgaaacaatttgaaaaagatgtgctttctgtttttaattagaaaaattgatgaaacaaataatatctgtactgtgtaacataaactgtgcaagtgtggaacaattgacattaatgggttgaaacattgaattatgcaggtcactgattgagaaacaagcatcgcagttttacactacaagtgtgtttgcagacaaattctagtatgaaatatatgaagcaacagggctggatgcagaaaaaacacaagaagtccccgacataatatataatgttatgccaagtgacatagaaagaacaggtaaaaaatatagggtcacagttgatgcagcacactcaacctactcctgctcgtgccacaaatttgaaagagatggacttctttgctcacacatcttgagggtgatggctgtccttaacatccatgagattccaagtaagtacttgctgaaatggtggtcagagcaagcgacattgcaaatacgtgatgagtacaatggtccagcaccatcaattggagtcccggcaacaagcaagctgagattcaacgcattatgcagggcaatgacaagccttgcttcagatgcatgtgttaatgaggaaaagtacttgattgtttcagctgggattcagaacctacacgcaatggttgcaacaccacacactgttgagacacaacatcagtaaggtatttttcctagtcaacaagacccatcaagttcagctaagaatccagcaaccaagaaaaggacagggaggctggtagaaaaaactcataggatgaagccaataggggaacaaataactgaaagcagcaagaagaggaggacaaaaaagaagagctcatgctcatattgcttcaacgagacacacaatgtttcaacatggccgtatctcaagatagcgaacatgcgagacgctctactaaaccaaaaatggtgcaagagacggagttgacactctgagaaaaaagagtttcaagagctataaatttagatgcgatgcactatactgttagaaaatatagtggtaattgccatattacaatataaaactatcttcttgtgttaggtgaaacaaattatgttgtgagatgcaacagacatattttttttaattcacatatgggcagaatgttggatgattatgtgaaatgagtctttcttatgatttatgtgaatgattgttaagtggaaagaagggaatgccaaaaaaaaaattacatctctgcactaatgattacagtggaaaaagaatatgtagagctggtgaaacattcattaagtgtagggtgagacaactgtataacagtaggtgaaacatttgcttcttatggaacagaacatgtggagctgtgaaacaatcattaagaacaggctgtaactattatgtaacagtaagtgaaacattgcttcttatggaacagatcatctggaactatggaacaatcattgataacaagctgaaacatataagtactagaaggtgaaacattgtttcactctaaaaagaacatcttgaactatgaaaacaatcattcatgactgccccctagtagatgcaacattatataaagagtagcagttcaacttgatagcacaacttcagtgcacaaacaaaaaacagaaaacacaacacacttcagtgcacaaattcagaccacacatagctacccagagcatccactttgcactattttttctaccatttttacaacttcagtgacacgactgccccctacactaatttgcttgaagttgatcatggttaacgaatttccggtagttaggcatgtccccttcattgaatgcttgcaggtttttcccatcccaattctcaatgtatctcaagctgaagaaactgcaatcaaacctaatgcatggaaaagcaagtgataagttaaaatgacacacttgtgcacaaaaaaaaaagaaaaatgaaacaacaatttggaaacaaaacatataaattgctttgtactggatactgtggaggagagcaagtctgaaactttgatatatctttgattggaattttagcatccactgcaaccttggtgaaatttgtgacctgaacggcacatcggcattgggacaaaaaaaagaacttaaaactcaatgaaacaattaaaaaattataatggaacacatggtgttccagtgaacatcttaccaggttttgagagagtatgaaccactgagaaatatcatccctcttgattgaatcaaagtaatttatttgttcccgcaaatggttgatgcaagtcagcacccaatgcttgtcacgtacaattgggaagaacaacttgatggggtgggaggcaaaaaaagtagcatatattaaatgataactggaacaaggaacagctatgaatgaaacaatatgttagcatatggtgaaactaacaattgaaacaaataaatgatcattgaaacatagtgttaaaaatagctgaaacattgtattagtatgttgtgaaacatatcagcagactaactgaaacatgaaaaaaaatcagagggatgggaaactggtaccagatctagtttaggaagtttatgctccttgttgattgatttcagccattttacacagctttcagacacaaacttctcaggattgcaaatcaatttatcctaaggaaaaaaagggaacaattgaattaaaagcaaaaaaacaaaaacaaaaatagatgtaataaaaagggggtggttaaaacatgttaccgtcaagccaggggaaaaacaaatttttttatgcttgatttcatcttagaatcttccctacagtttgcattgaacatctcaatccaacatgacataacttcattgttcaactctcctctaggtttcattgcttcacggaaatactcaagtgagacatggaattctccaatccttaagaatggagttgtcctgtttttcccaaaaaaaaagttgggaaaaaattcagataaagctgttctgaaacaaatgttttgcatttattgagacatgtcatagtgactgatgaaacaataggggaacctacactgaaacatattaataataaaaaggttgaaacatattttgcgcaaaaaaaagtgtgaaaacacttacaactctttggcatctgccttccttgacctatttggcaaagaatcaacaacagatcttctgtacacatcatctatttcagaagcggtcttcaacttcttcgcctctacatcactatcacctttctgtgcccttttcttcctatttttcttctcatgggtgcttggaccactactaccagcacctactatagaggaaaaaacattagagaggggtaggggtgttgttcatagttactttacccacaccgaaaagagagagagagagagatagagaaagagaaggaacaaaaaagtggtgattttacctagaggtagcgagcttgtagcacgtggcggtgaagatgtagctggggatgttgcccttactgctgctagagagagaactactgaagttgatgtttttgttgcaatgggtgaagggggggctggagaaggtgtccttgcagtgggtgaaggagttgcagaagatgtccttgcagaaacaggtgactgaggtgatggagaaggtatccttccatccattgccgattgaggaacatttgaaacatccaaggagagcatctcaacagccaagtcctgagtactaatgaaatcaggatcagattcattgaagagtctgaatgacggtgcatcacatgcatcatctagatttgagatatcagagtgggaagcaaaaatataatcatcaatagctgggctgcttggcacagaaccgccagaagcttcctggcttggtccatcaaaatctgtagcctcagctgccccctcaatgcttgatggttttgaaacggcctcagctaccccctcagtgcttggtgtgtttgaaacaacctcagctgccaacccagtgcttggtgggtttgaaacagcctcggaaatgcccactgcagtgttgctgtcagctagcaccttgcttatgtcagaaatcatatcacatgttctttttgcacgcaaatcaatcatgtccctcttgaagttgtcaagtgctgaaacaaactcatcctgccacatggcactgtgcttctcaatactagatttt

SEQ ID NO: 22388 - DNA, 1017 bp, Oryza sativa
tgagcttcaagtttggcgttggcttgcgagatggtgattgttgtcgaagttgtagcttgttgcgaagaggcggcagcttgagacgcccccaatatttgagacgaaaggattacgtccctgatctggagcgtttccaccgcggccgctgccttcgccccctcttggtctgtcgaagtagtcggtgccgaaggtgggagagatggcgccgccgtcggaggtggcgcggctcctgctgctgcagaaaggcttgaaactgggctttcaaggcctaagctgcctccatcattgcttgtggcgtgcgagtgggcttcggatactgtacttgaggtgtaaccgggcgaaccggcaccgaagtcatgtgacgggtcgggtgcggggccgcagctggagcaagcttcgcgaagtagttttaattggttaaaattatttccaaggctctgaaaaattcactaaaattcatgttaatgtattagaacatggggaactcaagaaaaattccaccacgccatttttgattattatttacgtttattaattaggattcaactctaggttaatttaaacaatttcttcgggcgatttacttaatgaatttttaaagcaagaaaggggaaacttcagggcgtgacatctacgtaatatgacatcaagcagacaaaagaaaaggattatactggttcaggtcccttatcaggtaatagccctatccagtttatatgagattgatgacggagaaccacagattacaatgaaagtaagcgaatcagacgataacgacaagatcgtaatcgatgtactcaacgagatcttctggcgacttggctccgcgtactccggcttcgtaaactatggtgggtgtgttggcgatgagattcgatgccctgcacccctccctggaggtccctctttataccgtggatcatcttgacccccaagtcaacggaatctctatcccttcgagtaggattcaggaaatcgcttatctcgtagagatatttccgtaatttgcaacagatt

SEQ ID NO: 22389 - DNA, 6340 bp, Oryza sativa
ctgtgtgtataccactatacttctctcactaacatgaacttgttcagcctcagcctctgcattgtcaccttccatgcctacttgctgcacttctgcattatcaccttccatgccaacttgctccatttctgcattatcactttccatgtcaacttgttctaccccattcccatctgattcatctcccatgtcctcttccatctccaactcatagtcacttccttcatcctcatatgatagatcaactaggattggtgcatctgcatacacctcagccacccctccatccacaatacaatcattcatgtattggcacatactgtcgtcatccaatagtgcccttaactcagaattaagatctttccctgggaacaacaaatgtagcattgttccttcaccaactttgtagtggtcatgcaaatggcctactattttaggcagagataccttatcttgatctaggtaagacattgcctcacttccaccaacatagtgcttctccctaccagacaccacaaaatctctattgaagtgaaacgtaacttgaagggtgtttaagacgtccatggaacctacatgcaagttggaaaaaaatcacttccccatcgttttaaaatacctaggttttagatcccaaataaaaagagaggcaatggatgatatagtatgaccaaatcgaggttaccaactgttgttctacataaacaatgctgactacaccaaatccgagggcacagtgcgcatctaccacaacatataatttggtggagaaccctaaatcaaaatggggagaccacgataaagaaagggtggactcaccagctcgtgctgctccagttgcggtcgccccaaaccaccaccgcgctgcattccaccgctgtcgacgcgccccctagcgccacccgagccgtcgccctcttcgtcgccaagctcacagtaaacatgtctagggtttcggtcaatgaaaaaatgagcgggatggctacacgcgtgggcatttaccagtccggatctcactcagctaacgataacctagtgtcagctacctatttcccaccatcctcagctaagtcagcaatgttgaccacagtcaagttgccatgtcatcaaatactgcccataatactgccataggagtcggtctgtaccggttttaatattgagggttagggtcgttctatccgggttttcttaacattacgaattagatttttttaccattaaggaagtcaaggacttcttagccgatcgagacaaaggttatggaaagcccaaatcgacaacgacatcccagcgtaataatgggcctccggcccggtccccctccccttctctctctcaaacaaaaacaaaaggggagaaaccctcaacacccgtccgtcccgtctcgttctgcgccgtctcgccggtctccatctccatcaccggagaacagcgatgtcggcgacctactgcttccgccgcatacttttgcctttcactcctcgcgcccagtcaatctccccatctcctcggcctcggcaatagtatcctcgcgagttcgcccgccggcgccaatctccatcccgcgagcagccgtgccggcgtcctgctgcttccgcccccggtgagcacccgtgccctacactcatcgtctttattccccatcttctgttgtagatctgggatattttttcgctttgtctcaatcctagtactaataacaggtttcccccaaaaagaaatatatttggtgcccctggcatccggtagatcggcatgccagcggccttggtggcgtgcagcggcaagcgccggcggcggacggccaccactcatgctgctcgggactcatcgtcgtgggcttctctggcggaggatctggtgagcctgataggctggcgggtgctggctggagatgtgcgagactacatctgcttccgcgccgcgtgccaccactggcgctcctgcaccgccagcccgtgcggccgcggcgttgtggacccacgcttccacccgcggcggtggatgatgctccctgaggggaacggtctctacccgggccacggcatgctgcgtggcttcgttcgcttcttcaacctctccaccggcgctttcgtccgtctcaagctgcccatcgtccgcgaccaccgcatccttgactccgtcgacggaatcctcctcctgcagcggaaccgtgacaccgcggtccgtcttctccaccccttcaccggcgacatcgtcgacttcccgccgctggacaccttgctgccgtacatgggccgccggtcggaggaatatctcagagatgtcgctgctgcctccataacatcatcagctgatgatcaagccgtcttgcttatgatatggttattccgcacggtgcgcgtagccttcgccgcctctggggataagcagtggagggtgtcgagctggtccatgtaccaagcctatactccattgccattccaaggcaagctatacatattggatcaagccacggcttatggtggacctgaggtcttgcagatagacccacccctgcaactgcaactggaagggacgacggagctctcgctaccaccaccaaaatcaattgctaaatgtccagcaaggacacctgactcattctttctctaccatttggtagaatgtgactctgacattctgttggtcacctttggtgttagtgtgtatgcacaaatttcagtttacagactagctgatcttatttcgggaacaactgtcccggtgacttgcatcggcagcaattcccttttccttggtaataggaatctctgtgtcagctccaaggcgtttcctaccattgtgggtgatgccattgtgttttaccatcagaaggagaattatcttgcacaataccacctcagaagcggcacattgtcacccacatcagatggatgtatctttgcgactaatatgccaagtcctagtagcatcattcaccatatctacacctgttgctttcgtacacaatggttagtgacatgttttttatttttttcccgtcattgttctctttaataatagttattcctttcaatggagcattttgtgctctgcttggtaattaagctcattgtttcccctctctacctgtaggaccaagggacatttattgtttcaaagggagaacagggcatggcagatgaaacggaagtagggatagacggggtaagtcttgcctccggtgcaatgattctgcttgaatgtatgcatttttggcttctactatgcacccaactctcaatacaactgattgatcaatttattaattattgagtctttttcctagtattaaagtgaaagcaagatggctgcagagctttgcattttaattagatattatgcaactatctgggcacacatttctcaattggggtttgcaaatcttcgtgagaccctacaagtgtatatatttattactaacattgattgcttatttttgttgagatacactgaaaaagtaattgtcttctgatgaattgtgtcgtgtaaacaacttgctttcttctaattgtatgacatgcaatcttttgcatgtttgcgagaaaaaatacgctgtgcattttagttacaattattattatgcataagatgaattagtaggttatgctatttagagtttttgttttttgaaaagaaacatattcggtgaggaaaataagatgtaggttaagatttgcatttgcactttacagcacaaatggacagttagctgcacccatctgcatacaggactgaaaatggtctcacagctgcttgtatggagctactaaaggagtttgaacaagtaatgctggccattgaggttatgcaacctacaaaacatatgaaagtagtagtaatgaccttgatgtaacacaatttgaactgtacaatgtgcctgtagagtgtccatgttctctcttgtcttcttaggtaactcgccaagcatcacaaccacaattagcacagttgaatttgattatggttgtcatttacaattgcaatgttatcactgttacaaatcatacttgactagtttatttcttctgttagcactgaacttaattagcagagagaaagcaaatgcatttctgtgaggatgtgcatatgtatttgcaagttattgcattgtttgggagttgaacacacattgctcacatgttgattttccagaagctttaaaaggatagtcttaatatgttcagtggagatgctagtttgccattttcatatttaggatctaagacattctctatctaaatgctttatcatgcatgtgtttcctactattttatttgattagattggttcagttagtatagtgatgactaacttgtcgcctgtttttctacttgggtcctgctaggcgtaaacaactcttgttttgtgttggtggtggtgcctgcctgcctggttttccttcagggatatatttgttgatctacaggggaagtagttcccgggggctgtgaaagttttgctttggtacttataatcatgttactatttatgtgacaaagatgcttccctctgttgttgaatcaggcaactgtttcatgttgaaacaactaaattaattattgtaattggcatggtattttccaatggagttatgtaaccctggcttgtaaagttcttgtgacaattgatcaaacttccatcatcatagtagaattctaatatatccttatgagctagtcaaacttagctatcatgagcataactaattagagttgtttgatgaaaatattgtaaaattctatctaattctgggggttcctttggatttttggcaagaggtattctagcctagcctagccatgctttgtgtttggaactggtgaaaaaaaaatcctagctttttggagcaagctatcctccacgggccagaaaaaccgggctcgtcgagaaattcgtgagaaatgacgagcattcgagcaaccgttcggcgtagctgaaacaagctagtttgctagctcgagctatagctcaacttggctatgctaccaaattaccaaaacgatcgtcatacactaagctaaaatcatgcgctttgcaagcaaaatgtacaatcaaaatattactccctctgtctctcgatatttgacgctgttgacttttttaaacacatttgaccgtttatcttattcaaaaatttttgtgaaatatataaaactatatgtatatgtatacctaagtatatttaacactgaatcaaataatatgaaaagaattaatacttacttaaattttttaataaaacgaacaatccaatatgttttgaaaagtcaacagcgtcaaatatttagagacggagcgaatactatctaaaataactttcccctcccgtctctctcggtgcctcctctgagaggtgactttcagtgcgacgtagagttttcccctccggattccctctccgtctccggtggtctttggccgccggcgaggggatgaggggtccgagggatagtcgggctcatcccgtagtcaggtaaattctgtagtaggtttttttttttccttttgctgtgcagttcgaagaggatggtggcatcttcctccttcgtcctggaggtgtctggccatggatggaattgctggagctcgctctggcatatatcgtccggttgaagacctctgggttaatcacctacgtcctactcctctgtgtgtgcaggtcggagttctccagatccccataggagaggatgcgccggctgttctagaattctccagctagaaaatacacaagaatgtgttcttctccttcggcatcgatgtcggatttacaaggggcggctgtgatttatttgtttggccaaggtagcttcaacctccatcacggaggtcccgactgggtttgctcctcggctcaatcatttgtagcttgccatgctatcatctccgtcgttgtgggcagtgggcacaagttggatcattgctcttgtgaaagaggcagatgaaggacccgattgccttttcttttcttttcaagtccttttctgcaatctgcatcttctaaagttaatttcctcatcttacagggtactttccgcaaactggatctactcccagttcctatgttccctcgtgtaccatgtacttaagctcactaaagagtataagtgcatgctgggacacgccgcgcacagaaattggctcgaacaaaattaccatgaagcacaagcacatgctaaatattgttgactgaatgtttctagtttcacttaaccatagccatgggacttgaaaattgcaattagaatcatctaagtcaatatacatggaaaaccatgatttcaaacatttataatactaaattatcatgtgttaacctttttagactcat

SEQ ID NO: 22390 - DNA, 14183 bp, Oryza sativa
caagggacgaaggccgaggagacaacatgggcgaaggccacatggcgaaagccgtggcatgaagtacacaagcttcgccggggatggacctcatcggagagccattcggccgaagactacgaggcgaaagccttgccacgaagggcatgggtttcgccaactaccaaacttcaccaagaaaaggcccagcgggccaacatgccttccggaggcttcgccaacaattgggccgagctacttggcccattaggagcccatgcaagcaaaagacactgtatgcccataataatgtccctatcataaaagcaaccatgtaaattcccctgtaaagcctaaaccctagaggaggaatctgtaatagggttataagtagcccatgtaacaggggatctgaaaaatttttactaagcaatacaattgtctctttttccaaccactgttgagagaaccacttgaagcagttgtcgaatcgaaaccactgagagtgaacgaaaccactgatgccattgaagaagatcgttaaggagagagttgccaagcgaaaggagggtagcagcgagggggagatggctggggaagaaggagcagagcctttggcttccaaggccgaagcaagagccacgccacctccggcggtgtcgccatctctcccaccttcggcaccgactacttcgacagaccaggaggcggcgaaggcagcggccgcggcgaaagcgctccagatcagggacgtaatcctttcgtctcaaataccgggggcgtctcaagctgccgcctcgtcgcaacaagctacaacttcgacaacactcaccaactcgcaagccaacgctagccttgaagctcaagccgaagctgacatgggcgctatgcgtcagaacatggccaagttgcaagatacgcttcgccagatgcaagagcagcagcaagcgtacgaagcggcaaggcaagccaaggcctacgcctagcagtttttgacagtcttaacccagccccaagcttttcctccgcatgctgcacaagtcgtacaagctcgctgccgccttcatcctccacacctgccgccgtgctcaccggtgaggatcccttcctctttttctcctctccctcctagcaccgagccgcgccgccgccttccgcaacgccgattgccgtcgccggtgaccgcgtgccgccgccgcactaccatagccgtccggccggcttgaagctgagccgagcccggcagccgccgcccgcgccgtccgatcggctcccggccaatctggaccatcggtctcgaggaccggctgtgggccacccgcacggtcccggtccacggtggatcggcccatttgagccgctgccaggtggggcccacttgccggcgccgcccccctgtgctgacatcatcacctgggtttattgcgcaataaaacctcttaaggcttttctttttatagtaaaaacacagataatcttctaaaaatcataactacttcatccgagctccgtttaagtccattcaagtctaagtaaattcataaaaatccctagaatccattaaaaatggttttgtttcctgtttcaatagacttatagcatgttttgcttgtgtgctttgtttgtcgcgtagttttcagccatttcgtcgctccgtggtgcgtcaaagtctttgcaaatgtctcatcagtgcgagagcaaggcaagtcatgcttgttaattgatcatattgctcccatattgtaaatgctctacttttccataaatactgcatggttttataatgtcatggtatgggctatttacctactgttctcagccttattatttgtatgtcctattcctttgctaacctgggatttaacatgattagatgttggattaggaatttcttagccatgtttagttcaactagtacacaaagggggattcacattaatacatagatattggcttttagcataaaccatggttgttcgactggctcaaactctgcgacggacgcgggtgtccattcggccacaaaatcagcgaggacttgggacttaattgcagtgcgagcgacaaagtgtaggtcgaaaggtgatagctcagcggcccatttgcttaggcgccccgtgatttcttttcctcgaagcacttcgcccaaagggtactgcgaaggtactacgattatgtggacttggaagtagtgtttaagcattcttgaagccatcactagggcgtaagcaagtttttccatttcaatgtatctaactttcgcccctggagcgcttcggagatgaaatatactggcttctggcctgcttcggtttcttgtaccaaagctgcgctgacagcgacaggcgaagctgctagatagagccacaactctctctctctggcactgggctgaccaaagctggagggctttggagatactgcttaagctcatcgaaggctgcttggcactcgagcgtccaactgaactttcctacccctcgaagggtcttgaagaatggcaagcccctttcggacgcctttgataggaatcaactaagtgccgcaatttgccccgcgagcttttgtacttgtcgtacgctcgatggtggcttcatttgctgaatggcatcgattttttcggggttcgcttcgatcccccgttcggacacaaggaatcccaataacttaccagcacgaacgccgaacacacacttctctggatttagcttcatgccggatgcacggagattgtcgaaagtctcttgcaagtctgacgcatggtcgaaggccttgcgactttttacgacaatgtcatcaacgtaggcttcgatatttcgccccaattgtgaccccaagactttgtacaccagcctggcaaacgtagcccccgcgtttctcaggccgaagggcattctgagatggcagaaggtgctgaagggcgtgataaaggctgtcttggggatatttgccgggttcatgtgaatttggtgatatccagagtatgcatccaagaagctcatgagctcacatccggcagtcgaatcaactagctgatcgatccgaggcaaggggaaatcatccttcgggcacatcttgttgaggtccatgaaatcaacacacattcgccacttgccgtttgacttttttaccaatactggatttgctaacgactctgggtggtcaatctcttgtattactcctgcttttagcagcttgttcacttccgctttcgctgcctcctggcaatctaccgatattttccttagcttctgctttttcggctttgcgttaggcttgactgcgagatggtgcatgatgagatctggcaaaacacctcccacctcgtctggaccccaggcgaagatatcaatgtttttcttgaggacaaccaggatgctattcacttgttgctcatccaggtctccgccgagcgatatgactttcgctggatcggattcatctatctgcaattggacaactttgctgtggggggcgggtttcggtgttggttttgcgttttcttgcccttcgacttctaaggtatgaacttccctgttgaaaggagccaccgtggcagccgaaggctgggactccttgacaactatcacaccagctgggccaggcatcttgagcttgaggtagttgtgatgagagactgcttcaaactttgtcaaagtgccccggccgaagatggcgttgtaattgtatgggatgtcaacaacgttgaagagtatctcttcttctcttctgttatctttcgtgccgaaggcgactttgatgagggcctgccccagtacttgcactgcttcacctccgaacccccggagcgaagttggtgcttgggataacgccaaagttggcaaacccatcttggtatatgtcccgacgaatatgacatcagtcgaacttcccccatcgatcaagatgtgccggacttcaaaaccagccatctctgccgaaactaccaacgggtcttggtgtgggaaaagaaccccatcggcatcctttagcccgaaggatattggctgcgacaagtatcttgggaccccatcaccttctgagacaatgttgtgcactactcgaagttgcatcttcttctgtcgttttgacacttgtgaggggggatcggatcttgtgatgacctgaatcactcttcgctgcgcgtcttggtgttattctgcttgaggtgcttggttgaggaccgcttcacgcggtgcctcttcggcccttgcttgctgctgcctcggcgcttgagcgttcccttgctgccgaatatttcgacattgctcggtcgtgtgtgaagagcgtccatgaaaagcgcagtacaggtccttgattttcttgcgaaaaggttgttgttgtccgcccgcttgttgggcgtcgaactccttgcggagggcctgcacttcttcaaccgccatcactgccttgctagttcgctcagtcctgaatttcttccatgtcattggggcttggttcggccttggatgctgtccttggttcgccggagcggtagggtgaaccaagacgggcgctgaacttacaacttgggcttggacctgagcttgggcgttggcctgtgcagtggccgctgcggctgaagctgccttgtcatattcggcttgtatctcttgtcttcgcttggtgtcctcttcacctcgagcatatcaatcaattatgcgaaagaggtgttcgatcgtcctcagctccttgcgttcaagctttcttgtgagttcgccctcgagtaagctggctgaagcagcattgatgacggaagcttcggttatgtcttgcacttggcaccgtgcttgcaagaagcgacgtatgttttcccttgttgattatcctggcctttggcaaatgccgagaaggtcatgctgaattttcggctcctcataggtgcctcgaaagttaaggacaaagacatcgcgcaattgctcccatgagtaaatgctgctagtaggcaaattaaagtaccaagacctggcaatgccatcgagcgcgaggtgaattaccttcgccttcgtattttcgtcaccatgggtagcttcgattgcggatttgtagatggaaaggaactccttcgagtccgtttctcccgaataccttaataggaggaacttgagctggggggatggggtgattcttgatccccgaactgagggtcaaacccttttcgccacccgtcttgaccatggtcccttgctgagagggccaattcaactgtgggtatcagggcgcgaacggcaaagccacagcttgtacatgaggttggactgcgggtgtcgattgatgccccgtgccgaacatcattgcctggttttgctggtctgacgaagtagcttgcattgccactgcagggtcgaacatggcttgattccaggcttgatttggtggtggggctgctccgtacccagggggtacggcttgtgcgaaagtcatgggtgcttgggccgctgtgcttgggtcaaactatggcggttggcctttaggcgaagccccttgagcttgacttggtatggcgaactagcccaacagctgtcccaccggtgcaccctgatttgggcttccctcggcctaggccggaggcgaagttcttggtaaattgttgtggggttgattgagttgttgcaagaaggcttgaaactgtgcttgtaaggtcgaagttgcttccatcattgcttgtggcgtgtgaacaggcttcgcgtactaggcttgaggtgccgtcaggcgaacaggtgccgaggccacttgcggtgtcggacgcgcggcaacggctggggcgggcttggcgaagtacaccggtgcttgcacagcgtgtggaagaagaacttggggctgagcgtagaagtgcagggtgtgggccttggcttgtcttgctgcttcgtacgcttgttgctgctcttgcatctggcgaagcgtgtcttgaagtttagccatattctgacgcatggcccccatgtcagcttcggcttgtgctttgaggttggcgttgccttgtgaggtggtgattgctgtcgatgtcgtggccggttgggcgaaggcggcggtcgaaggcgcccccggtgcttgggatgacaagatcgcgtcgggcgccgaaggcgggagagcagacggcaacaccagtggcagtgccgctctagcttcgccctcaagaagccgaaggctccgctccctcttcggctaccatctcgccttcgctgccaccttcctttcgcttagcaactctctccttggcgatcttcttcggtggcatcagtggtttcgctcggagctccccacggtcggcgccagctgttgtcgaatggacaactgcgtcacgtcgaaaggcgtggatttctcaacaatagttggaagttaaaacaattgtattgcttagtaaaaatttttggatccccctattacatggccttagggagctatttatagccctattacaggttcccctttagggtttaggttttacagaggaatttacatggctacccttatgatagggatattattgggggcacacggtgtccttgtatgggccactattgggctaaatggctcggcctatttatttggcgaagtcctccgaaagcacaacggcccgctaggcctccttacggtggggttcggtacttggcgaagcccgtgccttcgtgccaaggctttcgcctcaccgtcttcgcccgtgcggccttctgacgaggcctttgcctggcgaagtccgcgtattccgagccacggctttcgccatgtggctttcgcccatatggttcttttctcgacctttgccgcttgcctccggtctgagcctttcacctatgttcttggtttcggtaggtccggccgaaggcccttcgtggtgtacctccaacaccatgcatcatgtccacggtaacaggtaatccctgggtcaaaagagatggtcattttcgggatcaatgtggtacagcctttcctaacagttggcataatctcaggtcatctactttcataatttcattgtcttctgctacatctcctgaataaaaatggggtcatatgcttaactccataaacatcacagaggatagagaaaaacttaaacaaaaggttggtctcaagctagacagatgcacatattgtcatgaaattggggtcacggggacgtaagtttcttgcctacagctagctatatttgtttttatggctgctcttctgatttcattagatatttagatgcatgtaaaattttgctcttatttcaaatagtatatttatttaatttcaagaaatggaatatactaaacagcaccatttcccatagactgatgcacaagaaaacaatcaatcctggtcgcttcttgaggattcttaatttttatttgtttccaacagggaattgttaagtaaaaaatagcaattttattgtgaagaacagaagaatggtgtcttatgaactagattagagccaactggaagttagtagaaaaccatcatattcgttctttttcatgatatgaagtacactaattttgtctggtttactgtcatttacaaatttcttaaacattacacagaaataaaacaacaatgtcttaactcacatgggatggacatggactccataaaatttattagaatttgaaatacaaagcattattaatccctaaatgatatatatatggaataacaaaatccatggatcccagtaatggtagcaaccagctgagttgctctgctactaactgtaggattgagaactcacattctaactgtgcctaattcaatgcttgcaattagtcatcagctcggttaatatttgtctagcagttgttctattgaactgtacagaataaccaaaaaattaatatattcatttcttactatgccacataaaataagctataacttcattaaagtcaaaacagttctattaaagtcaagttctcttgaagctccacttttcttatataaaagtaaagtggacctaaaaactttcaaatatgcatgaacacaatagcgttaatagggtgtaatgaattttctagaaatagcaacaccaattagacaaattagtgaaatctaatatcctcaatgattgcaggtacaacatcatcatagattcaccacttaccgtcaacccaactaggatgctaagaggggctccgtaagtacttggtatagttaataccaaaaatctaaaaatattctcataaatcgaatttatcctttttcatccctcatatagagtgcttgagtttaaagaggaaagctattcaacaattggggttatgcccccgttatggtggtgcagactcagtaatatggggccagtttggtttgagatctaaattaggcttgccaattttttggcaatctcaacaataattgtgtatgtttggattgaagccaaattttggcatgcctatataacataggccatttcaatagccaaattagtttaatttggcttcaatccaaacacatgttggccttcccaaaaattagcatgccaaaacttgccaaaatttggcatggtaaggccaacattggtcacaaaccaaactggcccatggttttatgtagaaccattctgcacattccatcttgtcaattgcttcgaggaaggtgatctcggttagacacaggtccactgcaattttgaactacagtaaatatgtgttcaaaggaaggagcatctatctaccataccctatagttcaacaaataattaccctcattctttcattcatcactcaagggttcagatcatccgtgtaaaatccaacgcatcagatcatctccacctccccacctctgcattccccagccccacgcacatcgatctccccctcatcccgcaatccgcacgccctctcaccttcctccctccctcccctaaccgcgtcgccgccctgatcgccgcacccgcgatctccgcacaaatcccgcaaggccgccaccccttccaggccgctctagaccggcgtcgtcgcccgcatcgccccctccgctccgatccccatatcgcgagttgcaagcagagcatgggaggggaggggaggggcgccgtcgtcccactgcagaccggcccgttcctcgcgctctcctctcttggccccctccgcggccaggaagacgtcgccaccaccccctctatccgcgacgacgccacaacctccgtccgcgccgaccccacgctgcccatgccgccggtccttcgtccacgcaccgccgccgccgatcctcctttcgcgcgccgctatcgctgcctccaccgccgtccgcgtcgaccccacgctacccatgccggcggcctgctgccccacatcgtgttaacaccgggatcaggattctggccatcgtctccacgcagatataggagttgtgaatttcccccttttatctttcttggtttttctgctctcagttctaataggcctacagattgtctgaatccatttgaacaaggttctgcacaaatcttctgatagaattctgattttcacaaaattaaccgtggtggtattttacgcatgtggcaatttaattaccaaaataataactatttctatcactcttaatgtttaggtaacctgcccaagtgaattgtattaactaattgatgtttttttggggggtctctgttgctgttcctggatgattctcttctgtttcatggtctgcagtgcatggacagtgtttacaaggtagccctatactcctatattcatcacaacatagtaggtaggtgcgtatccatttgctttaattcacatagaaaactccctacaattgaaattcacgaataaggtgcatattttgttctcagccgcatcaccgtctgtttccgccatggcagcgtgactccgcgcgacggctggaggaggcgaggtcgggcctgccctccatagacggcagactccgcgtgacggctggaggaggcgaggtcgggcctgccctccatcgacactccacgccgccgcagcccgcagccccatcagcgccgtcgctccatcgccgtcccgacctcgaaggcgaaccggtttcgagtccctcgcgctgccactgatcccagggctcctcaaccctgcaagccgtcgatcctgcctgcgaacaaggtaagagtgcttctcgatcccgttcctgtacaataggaggcatacgtggcatgttatggttcattcatagagatgcataatggctttatcccctttgttgaccaaatccccattgttcattattaaacattgttcactgtgcatggatatctgtgatgcaaaactctaatccaaaatctgaagtccttagtggtttactgtacctgacaagcaaacatctcaaacatgtttgtaaaaacctctcgaaagtagagtagcacgttcctcgaccctgttcattgaggtaagtattgtttaatgatgctaatgtatggtactgttaagctgatatttgatgctactgaaatatgtaacatatggacatgaatgttcacttcttttttatgtaaaatgtatattacctcattaatatgagtgctttcaaacctgacaccatcataattggaatatttgattatgagaaaacccttataatttatctctactgttcttgagagttagaaaaatctttcaatacattttagtagttttagatgctaaaattccagaagttgaaggcttatccatgcagttttagatttttggttggatggaatttggattcattgaacattcttaaactatggctcttttaccatcaaaactttacattttccatatcatcttcgactgcttgtagacaaacaactacagaagaatatctcatgctttttatgaaaccggctaatgtgacagtatcgaggggggtcttggccggatcagttgctcatggccggtaggagtgaggagtacacaggcttccacactacgaggtaatctgcgtgcatgattcatgtgcctgttggtttctctatctaaatgatagttcattttggtatacctccatcattccaggaaacttcaatgctcgagttgtcgagctaggttggggatatttgattctttaatctatatagggtttggtagcgtgcactcagcccttaggacttaacatgacagtaagtgagaaaaagggaaaacagtgagtttttgcatcaggctggctcaactaaatgatttttatgtccctttggtaatgaaaagagatttttctgttgtataccatctcatatgctcttaagatacattttgatttacataacaattatgtttctatgtgaaagaaactaaatatatatttggtcattttggtaactgttcgtttaacttgcatggcatgttgactaaacgagaattggcaactggaggggacagttgcagttcagtgcctgacttggctggctgtaggtacaagtattcatagtcaactaataaacggaatacatctcctcgtgctaattgcaggtccttttcatgacagaacttactcaagaacgaaatgaaatctgcatatagtcagtagcaactaaatttacattttctgtatgtaaatttacatttagtgtaggatttatgggcaatggctgagttcgacaatacgagggacttataataggtgtctccccaagctgaaaactgagcagatttttgtagtgcttctgtaattaaaaatgccaactgacctattgattttttttaaaaaaaaaaactttcctattgattaattagtggagatattaccttactaacattctctttacctttattatttttgacataatcaatgagaagatatgtcttgacataatcaaaaggggttgagatttcatgagcaaacaattagataatattttctcagcccaggtttagtcctattcccatgcttcactgcttgctccactcctttttgtgacttggcaggtaccatctcatgaggttcgtggtggttttcgattctatttatgtacaggtgatcactttatgaacaataatcatcttgattttcctccatcaatgttcatgttacttgctgttggtattgctaactagacttcgtttaagagaaatttcttctgttgtttagctacctttggtagggttatttcacttctgaaatttattcatttatttaccccatatttgctatttagacaaaatagcatgatctctcttttgtgtcacaaggtaatatcccagccatcaaggggtctttgatctgttagtaatccaggtcatggcctatattacatggccacagatcctatgaggtgggctgtattacattgccagacatcctatattacattgccactggtaggggtgaaaacggtacggaaacggacggaaacaacctttatcgttttcgtttccatatttttttcggaatcggaatcggaatcggaaaccccggaaacgaaaacggaaacgaatattatcgaaatcgaaaacagagcgaaaacgaaccggtgcggatacggtaacgaaaatttatcggaatacagaaacccctcaaactgagcttcaaacttttgtgaagttcaattctcaagttttaacagtcaacaattcattataaaacacaattatatgaagtctaattggtaagtctcaacagcaaaatatattcttctataacttcatataatttgtataacaaatattctaaaaaaattacagcaaaataccatggtataaggtataaagtatacactattagcccgcagcccgcagcctctctctccctccacgggccggcttccccttcccctcctccctcttcgggccgccggcccagcccttttgctcctccctcgccgagaagtctataatgcctccttcctctcaattcaaatattttttagggtagtaaatgatttcaaatgaaaaaaaagtcaataacaaagttgtataacttatcaagatcaacaacttttgttttggtcattttgctatatgactttgtttcaataatttgaatttgaatttcaaattatgacaacttcaaacaacatttttaaatactaaatgatttcaaatgaaaaagtcatcaacaacaaagttgtataactcatcaatatctacaacttttgttttgatcattttgctatatgactttgtttctataatttgaatttgaatttcaaattataacaacttcagacaatattttcaagtactaaatgatttcaactgaaaaagtcatcaacaataaagttgtataactcatcaatatctataacttttattttggtcatttcttcatccgataaagtgatagtaatatcattcacaaaatttacatatatctccaatagtctataaactatataagagatatgtatattttgtgaacgatcttataaatcactttatcggatgaagaaatgacccaaataaaagttatagatcttgatgagttataccactttgttattgatgactttttcagttgaaatcatttaatacttaaaaatgttattcgaagttatcataatttgaaattcaaattcaaactgttcaaacaaagtcatatagaaaaataaccaatactaaagttgtagatcttgatgagttatacaactttgttgttgacaactttcccatttgaaatcatttactacccgaaaaattatttgaatttcttatattttaaaattcaaactttatatagtccaatcaaactcggatggagaaatgaccaaaagaaaattggtagatcttaacgagttctacaactttatttttgataactttttcacacaagttcatttaatatcataaaattcgattcaaagttttaatattttaaaattaattgtttttccctcctcctcgcttcaaattttttcatctcctcttctctctccctatccagatatttttacctccactctctctctttctatcctctcccctcactctctttctttccttaactctctttctctcctctccactcctcctagggcggcggtggcggtggcgggagctggcggcggcggcggcggcactgctcggccgccttgggctccggcctggagctggcggtggcgggggcggcgacctcggtcgaagagtgggcggcaacctcgggcggcggcaccaccgccatctcctcctcaccgtcgccgccgacgacgacgaggagccgacgggccagatccggcggcgacggttctcgtcccgcccggatccggcggcggcggacctcgtcccgcccgaatccgacggcggccttgggtgaagagt

SEQ ID NO: 22391 - DNA, 2244 bp, Oryza sativa
gccgacgacgacgaggaggcgggggcaggtggcggcgagcttgggcgacggctagggtttctttttttgaattctttttggaattttatttttttccgtgatttagtgggtagccggcatcgacggtgtggccagtggccggcgtcgtccgcgtcggcggcgtcgtctgtggtggtggcggcggcgaaaatggtgggggcgaggacggagcgagagagccgactagccgaggacggcggccaggcggccagcggtggcgctctcgacccctggatgcgccgctccgccgccgcctctctcgatctctgatgcgccgcctctctcgatctctctctctctctctcctctctagggttagccagttagggacttgggttgggctgggaacttggggaggaattatggactatttggatgggcctttttaacttcggaaattccgacaaactttccggaatttttccgaccgattccgagttccgacggaaactggtattatcatattcgattccgtttccgaaaaaatatttccgttttcgattccgtttccgcgaaattccgaaaaaattccgaccggctgattccgtttccgaaaacaggtccggaatccggaaaaattccgaaccgttttcacccctagccactggcaatgcagcttaacgagatatgggaattaatctgggaatttcactgtaatttacgcatctctgcatgtggatttactgttatgaaagatgcttgtgattttctatactgattcgtttagttgtttctcatatacaatggatagagtgattggggagctaaagctgtgtcaccttctctccagttgtatcgagagataaattagtgagataggtactgtcattaagaattttgctattttgatgtcatgaccacttataaagagcatgccctgtacttgccatttcttttgtttatggtacatttttcagtgtcatttaacattcaagtacttccaaattgattccttcctagcttctgaacatacaagactcagagctcatatttccaatttgtttgtataatcaatattttttagcatcatggatgcatatttagtgttttctgcacttgaatctgtaaataaactatatggtgtcagatattactatggtgtttaatatagagcacatgttaataagcaattgtgaggtgggcttatctatgcatattttattaagaatccgttacatggttgccggtgtgctgtatagttcatttattttgatccatatttgtacctaaatggtgcatctggaagtatttgtaaatatgagttggattactaatcttatatgttgtcgattaggtaagtatggataaaaatcagtttggtggtggaccgagaattgtatttggagatataaccaataaccaaacggtgtagtgaaatggaaagatatcatatatattagtgcttaccccttagtacatatataagtgatatatgaatcgttcttctctgtttcattttgcaaaaaaaaccacaggtaaaattaatgatgaagattgacagttgaggaatagaaaacaacatgaataccgtgcaaggaaacaaatttacgtgaaatatatttgatgtacggcattaattgatttaaagctcacatgcacatcacagaccatataaaaatatttttttgctaacaagaaattctaaaaattattaaaaacaaatataattgcaccatagcgtttagcacgggcatattactagtaagcaatagttgagtaactcagatagtcagatagagatcaaatagctaaagcagcagctcgatgactacctgtttctcttgtgcctagcaaaatgcccgtgtgctgttacggaattaaaaatatcacatcggcacattgcaaagaagaaatctattttgaattttagaacttaattttagaattagtgagagatttttcatctttttatattttagccgtaaaaaatttcaagcggactcaattgacttgtaccttggactttatacaagtagtggacagtggtcccacatcagaaatttagggaatttggtgatggggaccacaactatcttttaaaggaatatagatttatcttttaaaggaatatagatttatattttagccgtaaaaattttcaagcggactcaattgttttgtacattagactctatacaactatttgaagagggggtggacagtggtcccacgtatcagagatttggagagtttggtggtggggtg

SEQ ID NO: 22392 - DNA, 10874 bp, Oryza sativa
ccactcaccaccactactactctcttttaaagcagtatagaaactcaatgtcaatttctcacccacatcaagcactcaaatcttttacatatataaagaattgtaaaccttcctaaaagttgtcacttgtaaatggttccaatgtatctccaatctatgtgtatttcactgtttgtgggttatccttgcatactctaagttctgcgattatgggtccaaggcggaagaacatggttaaggatacttccagtccagaaccaaatgaagagaatttttctcgattgtatgaatggaaattgaacctaaaaacaaggactgttgcaggcaaatacttaactagcttagatgttgccttggaatttccagttatcaatgataaattttctggcccacggcataggtatgtgttgtcgaatggacaactgagtcacgtcgaaagacgtggctctctcaacagtagttggaagtaaagacaattgtattgcttagtaaaaatttttttggatccccctgttacattgtcctagggggctacttatagccctattacagactccctcttttagggtctagggtttacaggggaatttacatagttacccttgtgatagggatatcttcatgggtatacagtgtcttttgcttatatgggcccttagcgggccaagtgtttcagcccagcaactggcgaaaacttcggaaggtgtgtcggcctgctgagcctccttctagtgagacccgatgcctggcaaaagctgtgcccttcgtggcaaggctttcgccttagaccttcgaccgagtctcccatggtgaggtctgtctttggcgaggcttgtaggctccacgctacgtctttcgccatgtggccttcgcccacgccgtctctccgatcttcgccgcttgcttccagctcgtgctttcgatcatctttggtttcggtaggcccggtcgaaggtcctcgtggtatgcttccaacaagcccatcacgggcaagggtgagtaaggagctttggccaagactgtgcaagtcgtgtggtgtaccatcagacaccccctttcggccgatgttcctgccgaaacctatgttatgtacctatgaaaggaaaaaacttgtcctcttgtgttaacaaaaaaattttgagggaagtttccttcttgtttcgccaatgagtggcgaagtggttaggttacagtttgtactactatgaatagtgacgggccctgtgggccgcgctatcgttgctttcggccctttactgtttgaccccggcccgatgggaatttaccgtttcgtctacccctagacacgtgtcaagctctgattgggtgggagccgaaccgtcgcgcgatggggttacataaccctaccccaggtctccgctcccccccccccacgcgcttttcacttttaccaccgtcacgctcccgtgctctcagccctagctcctgctctagcctttttccaccgctgtgcgctcacgctggctgcttcgaccttctcatactctttcaccctcgacctcctttttgccacggactcgatggctccacgcaagcctaccaaggccgggtcgaccggcgaagaccccggtactcagcgaagggtggtcgtgctaccttggcaagtcccttgtcaaggagtctgacctaaccgagttcgtccttactggcgtccttgcagagcgtctggcaacttacgggggtgaagctgttgtcccttcgcccggcgacagacgaacggttgtctttactactttcttcgccgttgggcttcgccttccatgtgacgactttctgccgtccgtgctggagatatacgaagttaagctcccccagcttagcccattggcgttcccgaagttagccgtcttcgcgtggatgtgccaaacttgcgggttcgctcctaccgcgaagctgttcgccgttctattcacggcgtgcgcaacgaccaaagacgtgaacatgccggccgggccgaaaaagaccgttttcggctgcgtgaacttcatgctacggctggagcattcggatgcctggccggttccttcgtcgatggtgatgcagaagtggttctacgtcgataacccataccccgccgacgatgataaggcgaactggctccggtttcagtgccttcctgtgaagatatgcttcgactcacttcatttttttctcgccccattttatctagtccacacttggaagatgctgaggcggaggaggtgaggatagtcggaggtttgaccaccgccgaattcagtcgcctgctttaacgtcaagccgacggaagggtgaaccgtgttcatgccggcgagctagctagtcgatcgatcccctcaaaggccgccgccaacgacactgggacgtcgaagaagcgcaagcgagccgtcactaagggtgactaggcgcgaacccgtcatgccaccaaggacgcgccgacacggatgcggatgaggaggatgacgatgaaagagaggccgggtctgacgaagacggcggatcgcgcggctacacccccaatgtggtttgggtgaaggctggagcgggttctaatgctttgcccgtgcgtccgcaggatgttgccggtgcgaacgcgctcctggcgatctccagctccacggcgaaaataggggcgatagccagaaagaagaagaaaggggtggtgcaaattgccggcggcttttccgctagcgaggaatcttccgacgggacgcctacttcgccggcgctgcgacgcgttgtcccccgaaggagatgcctgtcgccaccgcctaccagcgatgccgaagcgccaacggggggtagcgcttcggccccggccgctgctccggtcagagcaatcgagtcggcggaggcgaacatctctggtgccgacagagtcgacaaggctccttcgtcaagccaccagcgggacgggaaggcgccggcgattgagatgatagtgtccgacatgacactcaacgccccgcacttcgtgtccgtggatttcgcctcccgactggagtcgcccccttcgtggatggggtttgttagatggtttcgccgtccgacggccttagtctcttcaccgtgctcaacgagttcggcgagagttgcgcagctgcggagagcttattcgtgcaggtaaaaatttttcctttcgcccacatagtttttctgtccttttcgctcttgttgtactcaaacagcttcggtttctcttacccagggtctcgcggcgcacctgagtgcgaagcggtccggcctatagaggctggatgggtaccggcttcaccttcggaaggccgaagaggacctccaccacaaagaagacgaacgtcaggtcgtggcggatgccctgaagaaggcgagcgcggagaacaaatcccttgtgggggaaaacaaatctctccgcgccgacttggagggggcgaacaagagggctgccgagcgggaacgtcagcttgctgcggccgaggaaaaaataaagtctcttgagacccggctcggctcgaccgaagcagctgttgaggctttggcgccagtgacagagtccgccaaataggcctgctatacccttcggctggccctcaacgaccttggggcgtgtgcggaaggcgctccgggcgaagacgggtcagtgttcgacttctctgagtggacgcaggatgcggttggttcagttgtcgaagtgtctggcgcgtacagtgactgctgtgcgcgagttgccgcggattcgtgctcagcctgcttcacgaacatggttgtgaccatgttgaggatttccctcagaccatgaagaaggattggcctgaaaatgcccaatccgccgcgtcggctttgaaggcctttcggaagggcttctgggaaaacggcagcagggatggcgcgaagacccggcttcgcgagcagctggagaggatagcgagggccgaagacgccgctgccgccaatactggcgaagaccccgggccgtcggagacagctactgatcgtgagggcgaaggcaacgaaagccgagaccaccctgaggtgtgagtcccttcgccctcatgttctttgctttttaggcttttgtagctgtagtttgtctatatacaagtattttgcatgttcggctagtggccgttaccatcttgtagctgttatggccttatgtttattaatgaaaagttagtgtttcgccaattgtgcgcctttatcgcaatgtgtgattgatttcgttagcatttttcccttttcgctgtactttatgccttgttggcagggttttagccgaaagtcgagcgttcggcccccctttgggaattggcgaaataaaaacgagaagttcgtggcggtgaaggtgaaagtgtcaattaggcctagagggggggtgaataggctaattcaaaaaacaattaaaagcggaagcagtaattttcggatatttccgaaattttcggatatatccaaaaattttcggaatcagcacaaacacaaagtaaatcctagatctagctacctataacaagaatatgctagcacaaacagcaactagacctatagcagctcaaacaagcaaagctagtggagagggaggaagtaaagtcaccaaagatgaagctcacgaagttgttcccgaagttcgaatccttgaagggattctactctccgttgaggatctcactaagagccgggtcttagctatccctttcctcaagaggttgcactaagcactcctccttccactaagggtatctcttccctttcagaggtgagatccgaccttcacaaacttctcccggccaaccacaagtagatcggtggctcaggagcaacacctagccgcctaggagtcctcaacctccaagagtaacaaatgatgcaacgaactcccggagatgatgcaagtgctcacaaatcttcacgaagtcaacaacaagcactcacacaaactcgaattcacaactctcacacacacaccaaatccgaatcgaatacgggtgagaggggaaacaagaaagcaaggctcaaaagtgaatctcaacaagagcaagccaagggcatagaatgtccaatgtgaccagcagccctcacaggtgaggggagggggctatttatagcaacagcccaaaatctgcccgttatgcacaataattgtgattttcggatattccgaaagattttcggatatatccgaaaattccaactaaagatttttcgaacattccgaaaacttttcggacaagtccgaaaatttccagacccaaaaacacccttctggactgatctactatccaactgccattttcggaaagtccgaaaattcctttcggaaaactccaaaaatttacagaagtgagaaagactctattgatgatttttggaaaatcgaaccatttttgccttttcagtcattttcggaaagtccgaaaatacctttcggatatatccgaaaattttcagaacacatcaaactgaggagaaacacttttaaaaattgattttgagcactttgatcactcctcatatgtcaatgcatcatccctcttaatagtgcggctttcctattgactctaagaaaagaaaaggtacaatataccaattgctcatttgccgcatctcatcatgtcaacgcatttggcgggatatgcattactttaactcattgaggacataacaaccttcacatttgcttaaataaaaatgttagtcctctctaatcgcattgtaattaatcaccaaaatcattaggggcctagatgcacttttaatctccccatttttggtgattgatgacaatacgattagatcacaagagagaatgaatataattaatggatttggtgcaaaggtttagtgaaaactccccctaaaagtgtgcattaaagcaagtggagagctccccctaaatctttgcatccacattgaagctcacaagacaataaatatatcacaatttactcatcacatacaacacatcacatgcataataactattacatctcatcacaagcaccttataaagaagataagacattgcatcacattaaacataataagatccattacatctcaagcatccataattaaacaataatgtcttacaaagcattaaactcacttaggaaccacacatagtctcatacaaataaaagccaaatgtgctcgacccaaaagacatgatagataatctccccctttggcatcaagacaccaaaaagagaggacgatgagacgaagactcaaacaaagggcgcctgagggggatcctctggaggaggaggaggatagccatagccatggccgaacccaaagaagtcgaagtccggaggcagcccaacaaatggatcctcgagctgttcctcctcaggctcatcgggctcagcctcaaagcccggaggggaaggcgggacatcgatgtggtggtcctcatgataccgcgccttgagatacttgacgtcgcgagccgttttcttcgccgcattccgcaatcggcggttctttttggcctccgcggagcaaagaccaaaaagactccgcaaaatgcggaacaagggagatggctcacgacgagccacaggagatggacgatcacaagcaggaggcggctgagtggaagaggaggggatgtccccagctgcagaggtgcctgcctgagaagagcgggaggccttaacaaggcgcaaatgaagctgggaatgagacacatcatgacgaaactgaagctgagtgacggtctcgatcatccgcataatgtgaggggcatagaccaaccccttccagtactgaatggaggccatgcggatttccgcccaaacgaagtgataaacatgaaagcgatgaggagggggatcgaacctgagaagcacagtcctggagaggtggttaatgctgctagcatcaccatctttaggcacaaaggaccggcgaaacatccggttcaaatagaaaaagtatggcttgagaccgtcgaccttgcccaacaccacatttggatcattaggaatgtagagagggagcaaatcagtgttggcaggaatttaaagattatgcaggtcatcaaggttgaacaaggaatctaagtcaaagccccaaatctcagccaatcgccgataggagacagaataccaggacccatgagtcatccagtgaatggcgcgaaaaccatcaaagaaggcggttgcataaaattgagcaatgacttcgttgcaccaatcctgctgtaaagtcatgaaggagcgaagtcccatgagctcacaattggaaatcacatagttgagcaccggatcatcatgagcctgcagctgctccagttgatccattgcatagggaccgtggggtgagctttggacttaatcacagactcgtaaaagtcttgttgaaagagagtccaaaaccgtgaatccgtggcggtgcggcgaagggggcgcggatcctcatcccggcgaggagcaacaacctcagtcttccgcctccaatcatacacttggcgaatcaccgccgggtccctctcgggggtatgaaagcggagaggaccaatggggacattgggttggtgtggcggcgtttgcggttgatgagaggagccctcaccaccgccaccaagagcttgagtggaccaccgaggagggagagtgccgccccgagccacccacgcaacctgaggaaccgcatcctcttccccggaccaatcactgtccgtatcatcacgagaggatggggtgggagaatggttcctttggcgcttggacgagtgggacgagcggggaggcatcttcaagaacgcgaagaactttggagaacgcggtgaagattaacaatgtaggtcccaagtagtgccccaaacgtgctcccacaaggttggagagaagggaagccgcggggggtcaccagagtaggggtggtcgccggtggggaggggaggagggagtcaagctcgtgggggaaaaagagtggaaaggagacagagaagaccacgggtgaagggttatatatgagccccgaaattttcggatatttccaaaaattttcggatatgtccgaaaagatacaggaggtttcgaacggatctggagtttttcggatatatccgaaaatttttcggaaagtccaaaaaatcctgggattgcttggaagaaaggcgacaggacaggagattttcgcaatgtccgaaaaattttcgaaatatccaaaaattcctggaaaactcagatttgcaaagggatttcactgggaattttgatgaaactattttgcaaacatttttaaaggaattttgcaagggactagcaccgggaaattttgacaaaacacatttcacaaggatttttgataggattaaaggaatggagggatggtcgagcactatagactccatttgaacttgaggctagcacacacaagcatacgaaacaatagccacaagtcaaatggacgatccgagggatcaaaagagagggaattaccatgagacaagataattcaccctcgagagagggaatgtgtgaatctatctcaaattgtgttaggaccaaaattcattgaaaaatgagatccccaaacacatagattcaagttatccacaaaagtgactagtgtccattttgtcacaaagtggtatgcaaacctatgctagcaaacaaacatgcatgcaaaagatcaagccacattccaagaatccaagatatttagttcacttctcaactcacaaaacctagcttcatctagaggcttggtaaagatatccgccaattgtttgtcggttctcacatgttggatgtctatgtcgcctcttgtggaatggtctctcaagaaatgatggcgaatatctatatgtttggttcgggaatgttggacggggttgtatgctatcttaatggcgctctcattgtcacataggagtgggattttggacacatttaggccatagtctctcaaggtttgcttcatccaaagaagttgagcacaacaactccccgccgaaacgtattccacttcggcggtggatagggcgacggagttttgtttcttggaagaccaagaaacaagggacctacccaagaattggcaaatgcccgatgtgcttttcctatctactttgcacccggcataatccgcataggcatagccaatgagatcaaacctcgctcccttaggataccaaagaccaaggttaggtgtgtgcactaaatatctaataattctcttcacggccacaaggtgacactccttcggagcggcttgaaatcttgcacacatgcacacactaagcataatatcgggcctagatgcacaaaggtaaaggagtgagccaatgatggaacgatataccttttggtcgacatctttaccttgctcgttgaagtcgaggtggttatttgatggcatgggagtgtggattggcttggcattctccatcccaaacttcttaagcatgtccttcaaatactttgtttggcaaatgaaagttccttccttgagttgcttgatttgaaggccgaggaagaacttcaattcacccatcatggacatctcaaaacgtttggtcatcatcctactaaactcttcactaaaagacttgttagtagaaccaaatataatgtcatcgacatatatttggcacacaaaaatatcattatcatgtcttttagtaaaaagagttgaatcggctttcccgatttcaaagccgtttttcacaagaaaattgcgaagacactcataccaagctctaggggcttgcttaagcccgtagagtgccttgtggagcttgtacatgtggttgggacacttcggatccttgaagcccggtggttgctccacgtataccactcgttgataggcccgttgaggaagacgcttttgacatccatttgatatagcttaaaattgaggttagtagcaaaagcaagcaatatgcgaatcgactcaagtctagctaccggcgcaaaagtttcaccaaaatctaatccttcgatttgggtgaacccttacgccactaacctcgccttgttccttactacgactccggcttcgtcttgcttgttccggaagatccacttcgtgccaatcacattttgctgaggtcgctccaccaaagtccacacttcattccgggtgaagttgttcaactcctcttgcatcgccatcacccaatccggatcattaagagcttcttccacccttagaggctcaagagaagacacaaacgagtaatgctcacaaaaatttgcaatacgagaatgagtggatactcccttgttgatgtctcctaagatgttgtcggtggggtgatctctttgaatactttggtggattcttgggcgagctagattgatcggtgagggtggcacatgctcaccttcttcaccttgatccaagcttgaagtagagagatcgtcggcttgggtcgatgtaggtggctctactttgtgtgaggaagaggccccttcttgtggctccctaggacgtacgtccccaagagccaacctcttgattgcttcgctcgggtcctcctcatcacctaacacatgtgagtcaacttgctctacttgagagccgttagtttcgtcaaatgtcacatcaagcgcgatctcaacaataccggaggttttgttgaaaacgcggtatgcgcattcatttgacccatacccaagcaagaacccctcatccactttaggagcgaacttagaggatctagccttcttattaagaatgtaacacttactaccgaaaacacgaaagtaagagacatttggtttgttaccggtaagaagctcatagggagtcttcttaagaaggcggtgaagatagaggcggttgatggcgtggcatgcggtgttgacggcttcggcccaaaagcggtccgatgtcttgtattcatccaacattgtcctcgcatctcgatgagagtc

SEQ ID NO: 22393 - DNA, 15850 bp, Oryza sativa
ctttgcttgaccttattgagattagatatatatttgccaataattaactaatcgcatgattgagtttgtcctacatggctcattgaagagtcgttcacactggaacagagcttagcgtgctggttatagatagagatccaacaaaataaagttgttaagttctcaaaataaaaaggctgaaaagaggcatatctttcgtgctctcttttcctatagacattgggttgtccccaaggaagcaaatggttggtgcagattcaatgcaaatataggaacaagacggaaattctgttcaaacagctcttggctcatttttatgggttttttcgctttgaactaacattgagttaaattgaccttagttaagccgcaaaacaggtctaatttattagtttgaatgtcatgttagcatttgaccaaaaatacctctaaaatccagtgaattcaggaccgtaggactgctttgagattcgtgcaacaacatccaatcctaatacatcttttcctctccccccagtcccgattcccgtcgccgccatagcttcgcttcctcgcgcacgcagccgaaagacgtcaacgatacccctcgaccttgatagctagctgaaaaacatcaacagctccagcgcggctccccttctccccttctcccctctcctcctcctaaagctgccctcacccccatcctcctcaagccagtggcggcaaagtgccccccatcccaccgtctttctcatctttgacaactctccccaccgtcagatccatcatcaccagtcaccgcctcctaaccacaagctcactttgccccgccaccatgctggcccaccgcacaccttcatccccacggtcccagcacctcaccacccacagtgcgtgtccaccaccgattgccttccgcggctatccctttctatcccttgatctgggaccctaaactctaacttcactgtttttcgtcggcccaccgccggtcaccgaaccttcatctgagttagacgaggaattaggtgcacaaatattcaagcagatagggtgtttcaaaatatataagaaattctcttcattttctgtcgaatgttatttaacagttgtctggaaccaagaataaagccaagcagtactactagtactagtgtacttcgatgacattggcagctaaccgtgtcaccggtagtttgattctttaagataatgaaaaatcacagcctttgcttccacagttacagcttattattaattaatactacaatgctcacagcataaaaaactgaaagtgccaaagtattaagatgacaagataacataccaaaacactgaggtaaaaatttgtatgaacgtcgagatccgtcatgcaagctggatattgtccatatatatattcttaatgcttagagatattatagcaatataagatgggacccatagtcctatattcttttatgtatagcacaatatataatgtatatggttttcttttgatcttaagttagggctcactaagaaaagggaactctatttagcaggattaaaagagcaatatgttgcaaaggcttaaatttttttttatggtctagctttaagtttaaggttcgtcatagcaatattctctcatttgcttctctcccaatgtataaaggtagaaaaaatattactttattgcttgaggtactttttatgcaactagaaaggtagcccgcgcattcgcgcgggcatgtttttatttcgtttcgaaaacagatctatcaaaataagtttaaattaaagtgaggtattttgcttcttaactgaatgttcattgtattttttctttaaaagtcttgagaaactttcattgctcataaatatataatttttaccatcctactatctcctttttagttgatcaaatatacatatcttagatagtgcttcttatacataggaccctacaatatttttaagaaaaatacctagtccatatgagtcttaaaataaaaattagtaggaaatttataatcatatcgttatacgaaatgctattgattttgtattgacaccttagaggcatttacatgcaagtcgtggaatttagtgtattcatttaattattattgacctttgtctcttgatgtgtcaaagggaaatatgacttgtatgactaaaatagttcactgtgtaaaagcttcaacactatcttgtgggttaagtgctccactaaaatagttctgtgtaaaaacattacaaaagttatttctacaggtagcccatgagtccgaggcaaaaggcttatcacataggaggctgcacatttgaggaacatgtaaaaagtcttctcgtggaaatcatttgtttaggagtgtgctgaacataattgtatattcaattaaaaaagttggaaaagtggcttaaagttgtcatttcacattgattggttatgaaaataatggtatatacaaatctttgtgcccatatcattgtttcgcaacaatcaatagaacttgatagttacttttggtattccttttggtatgtagcaaattggctaaatattttacaacttattgtatcgtttacaaagatgcacctgctttatttctctgtatactggattgtctcattgtttattaatggatgccttgggcgcatgcgacactatatatatttggaaaaagtacgaagcttgcgcccgccccctgcaccgccctgcctcgccaccgctgccgcctcgcctcactactgcctctgccgtcgcctatgttggagagaagagagagagtgtgtgtgtgtgtgatagattgggaaagagatagaatagagactgacaggtggggtctatctatttttttataaaagaattgctgactggactgccacgtagaccaaaaccaccgtggattgggtcgaggggggtatttcgtcctgtttgcataattgggggtgaagaatgtccggttttcggattcaagggggtaatttcggtcgaccgcgatagttcggggggaggggggtaattcgtactttttcctatatatttcaaataaaaagccttctcgagtctaaattgatttcgcagtgtgggaaactccacgtagcttagcaggaacataatttcatagctaaaaatactccacatgtgtgattataatgtagtgtggtttgattgttgtcatgatttaaatattttttactctaaaatttatgattaaacattaggaatttacataatgcaaacgatcacttgtgtgattttattttagctaacatgcattgggcctttagttattatatttatattgcataatcctaaatacgaagcatacaatgcttatcctattttatctttcttgtttgaaagaattagccatttatacaaccatggtagtttaaatactaaataacttttaacttttaagtttctaaaataattggtacaaaaaggttttagctcggtcatctgtggtacacatatagtcccaagcaaatttgccccctcacgctgacagtgtcccgggtaatgtcgatggggataaaactgtgaccgattaggagtattaattttttcagttccagaaagaaaaatgaatctcagttttttagaccactgtctaatgttttcttccgtaagtgtacaaatgaagctatagccgatctcatatcctttacattagatcgatgtatatggtccacatcattatattattttatatagatctaatggttaaaattaattggtccatcgatttaaatatttttattttttcttagaatttgcaggattttttctaatttatcagagagccacgtgacgatttagtagcgtttgtagtatataatataagacacgtataattatattattttgacttatgggggagtaatttcttttggaacatttaggtttattctaatttaattattgtgaaattatgtttgatgataaaatctatatcattatttttttcataatattttagaactatttaaatggcacgtaaaagtcagaaattataaccataatgtgacattctttttgaaagtttaaatacaagcagtttagatgttatattttttttaatcatcaactgtgcttgtctattcttctgtctaactaatatattaaataaaaataggaataagaaataagagagggaacaaagaaggagagagagagaggaggcataccggctgtcaagtacgtacgtacctacaacttcacgtatagtcggataggaggattgcttttttttttaatagattgatctaatggctaaaattgctgggtccaccgaattaaataaaattttaatagattgatctaatggctaaaaatactgggtcctccgaattaaataaaaatcaatggtcagatgttttgcttttttcctagaatttttaagaatttctctaatttattagagtgacatgtggcagtttaagagtgtttgtagggtacacgtggcagcttaggagcgtttgtaggaagtttaatggacttctagtatataatagatattgtggatgtccttatacttttgcaactaagtttagattgaactatggtactttttgtacaaaatgtggatgaccttatatttttcccttatgtattaatagtggtgtatcaacattttgttcctcggggtcactggatcacagctaactaaattaattatatcatgctaactagtactccctctatcccaaaataaatgcggttttgcactatttatgtccaacgttcgatcgttcatcttatttgaatatttttatgattaatattttttattgttattaaatgataaaacatgaataacactttatgtgtgactattttttttaatcttttataaatttttcaaataagacggacaatcaaacgttggacacggatacccacggctgcacttattttgggacagaggtagtactccctccatctacttttaatagtcatatttcatcttggcacacagaccaatgataagtaattctacttatcatccatttaaatatactattagttattcctcgtaaacaagcgatttattaatatttacatttctcgatgcccatgtagccaatcttgtgtggaagaatggagagtcacgcattaaatccgagaaagtcattaagaagataggttgttggattgaaatatgcctatcaaaaataaatttttcagatttggaaatatgactatcaaaattagatgcagggattataagttaataattactccctccgtcccaaaatataaaaatctagtactggataggatatttcctagtacaacgaatctggtattaggaaatgtcccatcatattataggttcttatattttgggatggagggagtagataatttggttgtgttctagtatcaagttttcaacctctgtttttttttcacgtgtatgcttcccgaactgctaaatggtgtgtatatttttaaaaatccataagaaagttgctgtaaaaaaatcatattaatctattttttaaaaataacatacttatttaatcatatgttaataatcgatcccgttttccatacgcaggttctcaaactcttctaccgaaaaagccttagtacatattgtacacttcgataattcttgctcaccactatatgtatatatatgtgactgttagaaacttagaataattagtgacgccacacaggtagttgccgtagtggagcggatgtgaattgtattatccgtgcggatgaaaaaggaagcattgaagcaagatgatggccagcagaaccggttggtttatttgccacgtaggacgatctgtctgacaccacttgcaagtgtgtgtgacgtgcagccttccacaaacgtacagtgccagcagctagcaaacaagtaaccaaggaacactgagacccggctgttcacactagctggctcggtcactataaaacttactcctatatcgcacgtgcgagctagctatttgttgcttcttttttttttttgcttcgatcgacatggtagatcgaggtagcgctggattcaattttattatcgaaaaaaaactagcttcattctgagtacgcaccatatatatatatttcaaatacacctactcacacgcgcgcacatccatataagtatgtcataacacacgtctaaataagattaaagacctgatatcatgtactccctctatattaaaaaaaaactttattatgtcgagattcaaacctagaattagattttttttcggacggaagaagtagcacacaagcatgcacgcgctttaatggttgaacatactaccatatctcaaaatgtacaaatttattctactcactccatttctacatatgattatttctgagttgtttaaaaaaatataaacatttatatattgttttattttttttcctcttcagctatcttattggttaatttttaaatcgcttgcatttcactccaaccatttgatatgttggaatgcttagatttccatgtgatggatttagtattaaaaaatgtttatattttgtacaaaatttgaatactttaaatgtttagatttccatgtattggaattagtataaaaaatccttatattgtgtaaaaattggagtacctggatttaaactctgaaagaaaatacgagcagcctgtcgagcagatatcatacgtttaatcgatctgatgtctgaaaggaaaatacgagcaacgtcgtaactcgtacgtgtatagccgggcagatgctggtggacatgttccatatataaaagaaaagactccagctatcttaaaaagtactccctcgtaaaggaaatcgtttaggataatgtttaagtcaaaccttgaaaatataaattatgaataactcttaagttgttgagtttgaaaatgtaaaaattatgtgaatagatttgtcttgaaaaatactttcataaaagtatacatatatcacttttcaataaatttttttatagaaacaagaagtcaaagttgtgttttgtagaccatgtcgctgtccaaaacggcttcctttatgagtatggagggagtatgctaactactctcgttttggtttcatatcgttttggtttcatatttcaagacggtttgattttctttgtttcatcaagtacataaaaaaaaatctaataactgaataatttaattctgacagtaggtttgttttgcgttggaaatgttacaatgtttttctataaacttgattaatttttttagaaaacaacctaaaacggggaagagagtatgtcgttagttttctctatacttctgtaaaatcaaagtgtttttcattgttattctatgatgaacaattggcattgaagattattggttttgatatttgaagattattggcaaagtgattttggagatgattgattttcaggtgatgaacagggttactgtttttatcgggaccgggatgaacagggttactgttggaccggtcagaccggcggaacaacggcggtcagaccggcgacagcaacaggaggcggcgacaggttttggtgattagaccggtgatctataccggtcagaccgatagcttctagacagtcagaccggcgcttcaccttcggtcggaccatgatccgtcgaatttgagagtaacttttaatttcgcaaaaagtttaggttttgggtataccaaccattcacacctccctctggttaacttagttattgtgtttcgatccaacgagttcctctcctccacacatgtgagttacataaatccttttatgacaaacccatgtcaacaaccttcattgtaagaaatggctgttgagggagacatgagatatattctaaaaaaaatgaaagaaaaataaaaaaaagaaagaaaggaagggagacatcagacatgagatgcccaggtggattagggtcggccggcggccgtgatcgaccaacaacggcatgcatgcatgcaaggggtgacgtcatgacgagatacggagggtggggatccacggcgggccgcccccgttcacactatcgccatttactaatccgcatagggttggcggtgggcccaccctccccgccttagcgttcacacctgttcctttcccgcgcttcggattcgtagtttttttatataaaaaaaaagaatagaaatgttggagctgtgctgaactagtcgtcgtcttcgtcgggctagctagcgtatataagagtcgacgagggcgagcgaattcattccatcatccgcaccaacaccattagttatattacccacacatcgccacgcattgccggccatgtctgccgccgcctgcatctcctccttccctccaccgccaatggccgccgcggcggcgccggcgccggagaccaccatcgacgtcttcgtcgtcgccaaccacacgccggtgaccgccgccgccgacaaaaggtacagcatcgttcggtgtactgtgtctcgatcgagatctttaatttctcctcgtttgagtttgcttgaattcttggtggtttttgtgatcgatcctggccgcatgcagcagctgcgagggggacgtcgtcgccggcggcgggaggacggtgaggaggccgcgggcggtggcgcggacgctggagtgcgagcggcgggtggtcggcgaggggttcgcggtgaggaggggcatcgggaggaaggagctcgacagcctcgatcctttcatctccctcgacgagttcgagtgtacgtactgtaccaccacccatctaccttctcttctctcgctcatctcgcctccctctcttcccctctagtagtgtacacaagttgaaaacgtacgtctttgactgaatcccaaaaaataaatttgtcccttacaagatgaggatttttggattaattaaacggctggacggttttatagcattgagcacatactaatacatgttcttttaagtaagtgatgtcattaacttttttatgatgtttgatcatcttatttttttaaaaaaaatgattcagtatcatttattttgttgttatttgttttatcattaacggaattcaagaatgactttttttaatggctgtagtaaatttttgaataactgaataagacaaatatttaaatttcaatcaaaagttaacaacgtcatctattaaaaatgagatggagtatcaatgacgtacctacatgtaactacccgatgtccttagacaccaggtagcttgtctatttctagctattttatatcatattaatcatcatataactcaaaaattagactataagtaatttttattttgagttcaccaacggaggatattatgtaggcacacgaattaattagttggagtaaccagtgatcaagaaaaatggtttccaaacggatatatgttgagtatcgtgtaatgtcccttcaggtcaccaactagctctcatatgattattcaacagagtattcacaccttgttaacgttccctttctgtttctattttacagtttctccaccagccggcttccatgatcatccccacagaggtttgtgatttcttaatccccgttgatacagctgtgcatagttttatatttacacgctaatctcatgaacaattaatttagcttaagttttaataaagtatagttattatatgttattcctgaattctgatcttacaattttcttccattttgtatgtggcacctgttccttcaggattcgagaatgttacctacatgctcgaggtaactaattaacagtttgattcatttccatcaacaatattgtagtattggcgtatcagttgtaataggaaaaccaccaagaatatatttaatctgtcacacaattccatctcattctttctaaaagaatatttagtgacaaattaactgttgttcttaactaattttaatctgttgttttcagggaggcttcagttaccatgacttttcaggccacaagggcaccatcaacacaggagatgttcaggttaggtctccaactgtaccattaaacttagagttggactactcagagcaatatcctttataacttgtccctgttttcctttttccttattttcgttgaaattaacagcctaacaacaactatgaatagtgttatagtactgttcttcaagtaattacttctccatttcaaattacttgtcgttctaactttatctaaagccaaacatttatatcattgacatttactttctaaaagttcatataatttaacatcataagtttattttttagattcaccataaaaaagactttcataatatataattcacttgtagttataatagctagacgaatttttagaaatatatattaatggctaaagctgatacaggtgtttgaactatgacaaaagatataacgacaataataatttgaaagagtaatataatcgggtacagagatgtaggggtagtacttattaaagacattaattcctcgagaacgacttgtctgaaaactgagttaattgtatttactttctgaaaacttgaaatgactatgacatagtgtcagcgtgtgatcactagtggagtaggtactctaaacatgcaaaatgttgctatctactttttttaatagtgaagtacaactcgtggcatctattcatctggaatatacacaaccattgcatattgccgtcacgccgaagaaaaaggaacaaaaggttactatcgaacaaataagaaagaacactatgtttgattgttctaggggataaagctggagttctactccaagtagtttgagatttatacacctggaaattatttatggctctttgaaacgtaggaatcttacaggagaagtcctctaaaactcctccattccgaatgcgacctgaacttaaacttccactggataccttttgattgactataagactattttctgtgcattttgcagtgcatgagatgcaactttgcttgttacttttgataaccacaaaaggatttttgacaacaaacagtaggggtcatttttaaaataaattgatcaaacgaattcatgtgcagattaattggaaaggaaaagagggaatattggttatgttcttccctcttctttcgcaacttacctccattgttttccgtgcatgttttttaaaatgttaaatgtatgtcttttcaaaaaaaatattacagaaaaattgctttaaaaatcatattaatctatttttcaagtttttttagtttaataattaattaatctcgctctgatcacttgctttgttttccatgtaacttgcctcccgaactcagcccggtaaagagagctaacttggtgtatgcatggttgtcgttggcagtggatgacggcggggcgcggcgtggtgcacgcggagatgcccggcggccatggcgtccagaggggcatcaacctctggatcaacctctcctccaaggacaaaatgtactcttcttcctgtgcctctctcatcagccgcagcaatggcggctactacgtaacagttgctgaccactcgctgtgccgtgccgtgccgtggccatgatgcgtgcgtgcgtgcagggtggagccgaggtaccaggagctggcgagccacgacatccccgccgcggagcgcgacggcgtgtccgtcaaggtgatcgccggcgaggccctgggcgcgcgctcgccgctccagacgcgcaccccggcgctctgcctcgacgtcgccatgcggcccggcgcgcgcctgcgagcgcccgtcccgcccgggtggagcgcgtgctcgtacgtcatcgacggcgaggccgtcttcggggacgaggccgcggcggcgggcgcgcacacctgcgtcgtgttcggcggcggcggcgacggcgtggccgcgcgggcgacggagcgctccgcggcgaggttcctgctggtggcggcgcggccgcacggcgaggccgtggtgaaggacgggccgttcgtgatgaacacccgggaggaggtggagcaggccagggaagactaccggaaccgccgcaacggcttcgagatggccgccggctggagctccgaccacgttgccaccgccgccgcggcgcactgatggtcaccggcgacggcgaggccggtgaccatggtgtcatcagctcatccaggtcgcaggtgaacgctgcgtttgcgcgggaggataggaattttagggaatttcgttgcaaagttgatgtaagataaaatggaggattaggtgtgccgtgtgaaactcctgtaaaataaccttatgcgaatattgaatttcgttcaatttttgtgtttgaaacgatgttaaaacttactgatcaaatttatgggtggtcatcttgtgtgagaatcaaatttatgccattgaatcatcttgcagaatatctacttcagctgctacattgctaatctgaatttcattgtataaaatacaaatggagaacgaagtgttttttttttctttttgttgttctgggtggtcatcttgtttatgtttccatggaacgtcaaacatgcctttgtgccaaaatgccattttagaaaacagagctagtttgttctctccatggtatatcctttgtagtgtcttgttaaatgcagaacataatgtatatcagtttgatgaaaaactaggcgataaacctgccgattgtgaataggattaaacaaacaatttaaggtgcaacacagctgcatggtcaaactatttttcacctgtttcagtgatatcctctctacagctccccataaattttgatacaaaatttgaacttgaatattaaaatcagttaaagcagaaaaaaataacaggccaaaaatatttggattcgtcatacttgagaagttctggagatgggcaccaacatttcaagaaactggtggtaccagccgttacactggtttcctgaactctgcttctgaatttgtaagataaggtcataagggaatttcacgatcaactgaactttggaacaataacttactgtttacttccagtcgaatgtcagttcgtttcagttttttccacctgttacatctgttgtttcgttctttgattgcctgcctccagatttttctttttttttttgcaactaggaaggtagcccgtgcgatgcgcgggcatgtatattaattcgttaaaatcatgcttgacaagttaaattaatatgttttttcctttctttttaattgaatgttcatcgtctcgctcttttcttatgaaatattaagaatttattaattaatgaatatattttatgtgtatccagctatccttacctctaattcatatgcatgcaagtatattcttgcacaagatctatctatctatgatatgtggcacccatatgatatttttctaaaaatacctagtcaacaggagtaataaaatgtaaatttaatatgaaaaatataacttttaaatatgaaaggccatcaattatgtaatgctattagtggcttatatacacgcaagagtaaaaaacccatgacacattggaatttaggatagcacatatttatcattggcttttgtgtctttatatgtgtgaaagcaaatatgactcgtttgaaatatatataaaaaagtaaataaaaaaatattgttgggacataaaatgagatattttgtatagttaagggagtacactgattcaaactcggtgtaagtgatctatataattgtatgagtaaaagcactgcgatgaatataattgtttaaacgattaaaaaagttggataagagacttaaaattatttgtgccaatattcgatagttcgtatgtgaaataacattagcaatgcatgctagatattataactcattcattgtgtcctgctctgatactgttaattttctatttcttttctcaaagtattggattttttccattgctaaaataaaaagtttcgtgaggtccaatttaattgtgcgatgtggaatacaacccatatgccatttcataaagattgtgcgaggctccacgtagttcgatggaaatatgatttgatgtctaaacataaccgctcacgtgtcattgcttttacaatgtgaaatttttgttgatatcatagattgaatatttttctgtaaaattatattagagttataatttatttactacaaattgacattttttttaattttttagctagcttgtagtgggcataaattagtgcctatcatctttccacttctaaatttttgttacatagttaggctttttttttatgttcgtgccaatttattatatctgctacaatcatatatataattatacatttaactctcactaagtatagttaatgttatttttctaatctctatatttctagcacctcgatgatttgtctggtcgaaaactctctcttttgtttcttctttcataaagccataccaccttagttttgtcttatgatgttgaatctatatttgatctaaattttcaaagcacataatcttaactgtgtttatagcttttttggatgattaactaaagatgcaaactgtacaaagtaacatataagattacgttgtttagctacgaaataaatttattttgtactatgtttctgtcattatcattcatcatttctgcagcaacgtttccttatacagggttttatctaattaggttagttgtgacttatttttcttgattgtcatctcatgctatgttaagccatacttcctccatgcatgatacgatcaaatttccttgttctgttcatttaggtcacgtcaaactttgtttgtgcttattctttgatgtttcgtatcttaatttatatgcagtgaacatatacaaaaattaattttgatggactgcaacactgcattacgattaggctggaagattttatcatatgaatgatgcctctctctctctctcgttaacggaacatatgcgcggagtatgtgtggttgactcatggatagcgtcatcaagcgacagaacacgcgtgccatcttgaattttttaagtaggttaagattaagattagatctagtgattgaaaatatttgccctaccaatttaaagaaaaaaatcaatggtgagatgtttttcttttttttcttataatttctgtgtttttttcataatttattagagtatcatatggtggtttaggagcatttgtaggattgccacgtggtgacttaggagcgtttatcgaatctaaatttaatatttgtgtaatatggtgcttaaaaatttgctcttaaaacatttatattagaaatctaagctatttatatgtatatggattcatcaattaaagttgaatagttaagttagagaaagaaatgaaggaaagtgggagggatgaatgtacgtagtcaccgtgaggggaggaggtccaggagaaaagggcggtggagatgatttttgatgggttttgggatttttttaaaagatagatctgacggtgtaaaatattgggtccaccgtattaacttaaaattgatggctatatgtatttcttttttcttataatttcttcgatttctctgatttattgagtgctggttgttgtaaataatggacacatacaaggccagccacgtggcatattgatggtccataattggcacctataagtcggtataggtgtcgattattggtacaaaacaggcacctacacacattataggtgccgattctaccaccaacaccgatgactaaagtcatccgtgctattatctgggtatcggttagaaaaaccggcatgtaaaagggtttcttgttacctatggtgtagttgaatgtgctcccagtaaattattgatttaaccccagtccacctggtccatcttgtatgagcacagctactaattaaaatttttgtgattagctggctggtttgcaagctcattggatgattttctagcaacagtgtagaagaaaaaaaaaatatcggtgttg

SEQ ID NO: 22394 - DNA, 868 bp, Oryza sativa
cattccaccatcgatcaaacatccttcctaatcacaaacatctatgctccccatgccaactccgagagacaagaagtgtttgatctgctcactgccttgaggaccacacgccttgagccctggatgcgcatcggcgatttcaacatatacagattcccacatgagaagacaatgacagcataaatacaagaggaatggaagagttcaacagttggattaatggtgaggggttgtttgacatagacatccctagtagaaagttcacttggtcaaacaagagaagatgcccgacttcggtaaaacttgacagagttctgatcgacaccgcctggaaccaaactttcgccaacgcctccgccaaagcactaatagcaacaacttcagaccacatccccatcctcgctgagttctcggacaactgttcaaaatcagacatttttcgtttagaaaattactggttgcagatgcctgatttcatcgcgatgacagaaacaaactggagcagaggaaccagacccctgacagcaatctccaagctcaaccacaaactcagacggcttcgagccagcacgaaagcctggaacagaaataagcgcagcattccaaccctcctgtcagccaacaaagacacattggaatacctagacaaaattgaggagtggcgtcaactgactgatttggaatactacctgagacagaggattcaaaaacactgcaatgagctaaatgatttcatcacgcaaaaatggaagagaagagctcgtatcagattctgcacactaggtgatgaaaacacaagattttatcacactctggcttcagtaagtagacaaaaaaattccatcagactttttattgaagatggtgt

SEQ ID NO: 22395 - DNA, 1360 bp, Oryza sativa
ccttataaagagaaagtatctttataatcagtctataacccaagttaataggaaacaaggggattcacaattttggtcagggctcatgaaggtcaaaaataccttcttaaatatgggttcttggattgtaaataatggaagacaaataaggttctgggaagataaatggctgggtaacttggcttttaaagacaaatatccatctttatattctattgttcgaaggaaaagttctactattgctagtgttatgagttctgttccacttaatgtttcctttaggagagccttagttggccataatcttacatattggcatgaattgtgtacttctattatacatattcaatcgaaccattcttctgattgctttagatggaattatcatcagagtggtagtttttttgttaggtcaatgtatctagctttaattaataatggatatatcgaaagaaataagattatttggaagcttaagatgccactcaagattaagatctttatgtggtacttgcttaaaggggttgtgctgactaaggacaatttggcaagacgaaattggaatggcaatttaagatgttgtttctgcatgaaaaatgagaccatacaacatctttttcttgactgtcattatgcaagatttgtttggagagcagtacaattctcttttggtttaaaccttccaagtatcatatctaatatgtttgatgggtggcttatgggggttaataagaagaaatgtaatctcatacttgtaggagcatctgccatatgttgggccctatggttgagtaggaatgatttagtgtttaacaaatcaccatatactttatatatgcaggtaatattcaaggtaatatattggctccggttttgggcaaagctgcaaaagtgtgaagaggatggtgaacttatgaaggttgcatgtcgcaaactcgagacgacggtgacgtaactctttgcaaactatggatggagattcacaaatagacttgaataaatgtgtactctttatcttggtttgctttttattttgttgagtgtgtttgattacatttgaactacactctttgtatgagtgatactttgtaataattggttgtaactctgttgagtcaaggccgggatataaattccattatctaaaaatataaatgatgttgatatatatgctagttgaagctgaagttaacaagcattttactccaattgtctttccttttccctcctcttttcacacagtgccaccaaagatgttgatacaaagctaccaaggtgaaaaatagcatgctaacacatgtggattaaatcatagtaagacacgtcaaagccattgccatcagcacctgaaaacaggaca

SEQ ID NO: 22396 - DNA, 4443 bp, Oryza sativa
atggagaatgtggtaaggtggttgtcaattgtcctcctgaagatcctgccccagtgtcatcttctgacaaccgccgtagaattttaagagcactgagttctggatcatacgccacaaagataaagaacacaagagcaaccatagtagcattcaccggagcaacctccaggtcatgcaaggcgatgagtcatgattcaagtggttcaaccaagcagcatgttgagtcgtccgcaggtaagaggaaatggcaaaaagaaagtgttgaggtaaatagagatgattaacaagatatctgtgatcccgtatatcatggttatccttcgtattttctgaatggactgcttgacatcatgggccatgagaagttcagtccaaaactcctaatatcttgttctgaaagatgacgactgaaaaattgctatcgctacttgtttataatcaagctaattttcatttgtgtatgtttctaaaatatagcggttgctcacatttgtctgtattgcatggcatttgaacacatgttttgcaaccataatgtaaatagacaacccaccaatggagaaaactgttgagaattactacaattagtcacacaatagtattatgtttcagtagcatgtggcaatggacttcacttactagttagaaggtacagtaccgctgttgattcctcatttagggcatacaaaagattcctcagatgctatatttgtttaatcctaagttgaatcaaatcctttcgaccacagggcagagaataatccaaattatataagacatgggtatgcattgaataccacatattcaaatctctttaaaagcctaatttgctactgggagtggcacttgttgactgcatgtatcatataatctagtgttaaacaactaagaatgggttcatacgtaaccgtattgaatgttcaaattaaaaatgagtatagcaaactacatttgacagcaaaaatgcactgttttcagtttcacatatatggacaatatgggcaaaagtattcatatgaaagaatagtaggatcacaatgcagacatgagaaggtattcagtcatcatatgaacagtgaggagaagcagtacagccaacatcaaaaggatcttccgatccacaacaatgccaatactggaacactttgcctgaatctggagtatccagagtcccacccgcatagacactttcaaattttctcttcgtttctcctggatagacagagattggccattcagatattagactaacacaagcagacaatgttaactagttcaaaataaacaactcagtcagaatttctgtctaggtcatatgccaatagcccctcggatgtttggattttccataggaacattggactataaaatatccttaacacaatttttcccctcaggattatgttgggagaaaacgttatgcacccaattctactgaaatctcttgctaaatctcgaattcgtttctctcaaagaagccctcagctacacatatgaatagctcgagcaatcaaatgaatctgaaagaaactactccagcttccttccatttctccgacgagttcctcacctccgaagtgggcggtgtggtggcggcacgccgaggggtggttcgccgccgggtcgtaatgcttcttgcagttcttgcacgtgcgcagctcgggccctcctccgccgccgactccggccgaggcggccacgggtagccggactagccgacggcgcgtggcgagctgggcggcggggcacgcccggggcggagcccgtagcaacggcggcgcgcgcgcttgcggcgtcgccattgggagggatgagcaagtgcggcggagagggagaaggggttggtgggatcgggtcgagaggcggaaccgagagcgacaaatgcgggtgggccgctagtctgtagttgggctcaaatgcgggtaaggatcagaagcagcccatgaagcccacgttggaatcgtggtagaggtagcccatatgcaagcctagggattgggtgctcggcctaaaattcagactatcaaaattgataaaatttgctatataacacttaaagtcaccgaaacaacgcgtatcttcttgtgaacagcataaaaatattataattagctagatactcaccgcattattttattattttgggtggaaacggagagagaaactttcataaaagacgacgagtttgcccgtggggtcattgtgtataaccctcacgccggtgaagacgttgacggccggccgcgaatcctcgccacggcgcacgggtcgacggcgacggtgacccagccgccgtcatgagcgccgcacaagcacgtgtcccagacgccttccaggaggctgaggtggcgggtgaagccggagagtcggagtagaggctgaagtaggacgatgtgtcgtgggacgggaggagcagccacgggagcccgcagtgcagggcgttgacgaaggccgcggcagtgcgccatgggcggtagacggccgtgaagccaatgcggtcgacgaggcagttcagttgcttgaagatgacgccgagtagcttgggcaggaggccatctgaccacggcagccgtgacgaatgcctcggatctgccctagctcctccgtcgcgcgtcgccggctgacggcgaaatttggcactggtcgtcgacggtgagcggcgagctctgaccctgcgcgtctctggcggggatcaaccgaccctgtgaccagcgtttcggctatcgccggtcaattcggtacatttatcgttctttctctctctccgtttccaccaaaaataataaaataatttagcgagtgtcgggcaactaattttcacatttttgcgatgtctacaagaagatatgtgttctttggtgtcttacaacaaaaaccacaattttttagtgtcctgtaacaaattctgccatcatccccgaaaaaaaaattctggcatcaatttgacggattaagttataaaaaggtgtttagtcattgagacatctgaaacaagatatatgagaaattatcacaccacaaagctagaatacatagttaaaacatctttaaaaataaattcattaattggaacattataacattttctgcaggtatggaacatacaaaccaaagatgtaaaacacggttccaaacatatctctctcgtgcttgaagtatatttatttcaaaagtagaataatgtgaattgttgtttcaaatatttaatttaatacacgacataattagatcgcatatcaaaataatcccccatccctacttctaacccacccaacaacgttgcgcctccctctcgacctcgcacctgtactgctagctacctactcatctgtggtgcaccgtctcaggtgaaggccgccgactgctctctccacgctaaatccgtcccactgatctcctctgtttccaatggttcacacccacccactccaccttctaatcactctgcccaccacggccgccgccgggcacggccccgccgcccgcccgcccgccgccagatgggaagggaggagggggggagaggggaggaggaaggggagggggaggaggagagggatctgtgaagaggataagtgcgacgaaggggaggaggaagagaaagggatttgtgaggatgtggttgcgattgtggaggagaggataagtgctaggaattacatactacgcattgaattttagtcccgattagtattaccaatcgggattaaagtggtgatctttagatccggttggtgtcaccaaccgggactaaagatcctcggtcccctgacaggggatgaactgggactaaagattgtattaccaacagtaacctcaaacagtatttacgtcagaggtactgttttacactgtagtgctaacttaaaaaaactgtgcgcctctgacgttaccgtccaaagtcagaggagccggttcccgaccagtgtatctatgggtggaagtgcaactaccaggataccattccctactttattttattaactggcgtaatacaaagcaacaattaatatatccaaggtaacacacggtagtctatagctaggcgcacttgaaaccctctggcacgttgcggccgcagtagttgacgaggagcgggaggtcgacagcgacatcctcgagcttgacgccatcgccgagcacgctggccttgatggcgaggcagaggcacacggcagcacactgctagaaaaagcattttcatcaatattgggtatttattttcacatacgaacatgacccttagagccaaacagccacctacaaaaatataaatcgggcgtgcctacgaaaatgattttcgtagacggaccacatgaggtgcgcctgcaaaaattagcgtggtatatatatatgacacatcagttgatatttttctaagtgtccttacctctccccttcaccctcctctcccctccccttcacctctcccctcccctcccg

SEQ ID NO: 22397 - DNA, 2807 bp, Oryza sativa
aggcccagcgccgccggcggccgctcccctccttccctccctcccctccagatctggctagagggggaggggggaggggggaggccggtggcggctcccctccctcccttcctcctagatctggccggaggggagaggctggcggcggggcacggcatcgcgcgtgggcagggtgtggatcagccggaggcagcggggtgcgtccgtgcgatggcgacgatgacgtccgtgcgaaaatttgtgatttgatttgatttgatttgatttgattgtgaaccactatgatgtctgttaatctgtgatgtttttgtgtatttgatttggtttgatgttgaatctagatgggggaaatgggaggagaatgagaagctactgctaccggccgaaacggcggtgggcggtggctgcctattttttttaatgccaggtgctattttcgcaggcggaccagttgtccgtctacgaaaatcaactattttaacagtcgttcagttgcagacggacaattggcccgcctgtgaaatcctgtttaggccgcctgcgaatttctagtagtggcgtcgacgtcggcgagcacggcgatgagcgggcagcacggctccctgctgggcggcggcgccgcccccaccaccgcgtggatcagcgcgttcagcacgctcccgcacacccctagcttccccacctccaccggtcacttgccattgccatccgccttctccaccgccggcggcgcggcccgcggaacgatcggtggcaggcagttggatttcccgagtttgcacgccgccgacggcttagcgccggtgaggcacagcacggccaccgccaccacggcgacgagggcagcgtgcgccgtgatgctgctccctgtttgcgccattaattcgctacagctaagctagcttttgcttgttagttgtattgtgcttattcttcagctaacttgctttgatagagtatttgtaggggattataggaggatatgtatggctaaattaggcatcggtgattagcctgcttaaataaggagtttcatccaggtattatgcaggggactttgtggcagtttttgccatcttaaatggaaaagattcagttgtcatatcgtgtatctgtggtaaatacacggtatgagaaccgaagcttttgcccagaagataggggtaattattcacgtaggattattttttgatgagttggagaagagacgatagaagagatagcatgggtaactataaacaggtacaatagcatacgataagccagttataaatatattttaaagagataaaagaggagagagtagagcagcgggctacagatctgtagccagctgcagcacggattccaagataaaacgtgtgtatgacatgtgggaccagattaatagtgtagtaagtaactattatacgaattggctattaatttggctatagatgatttggagctagtagttggctatactattaaacttgctctaattggtcgtgtggctgcacactcagcccaaggacggagtcctcaccggagtcgtcgatgttgcatcccacgggctactgccctcgtccatggacaccgacgccaacgcctacgtcctcgtctgatgtcaccaccgccatcctcgcccacgaacgccgacgctgccctcgtcctcttccgccaccaccttcatcctcgtccgcgtccgttactgacaccatagtgtgccactgtcgatgcccttgtcctcgtccgtcgtgtcctccaccgcgctgccgctgccctcatctattgttggtgccaccgtccttgtcctcatttgttgcagctgccgactccctcgtcctcttccaccgcgctcgtcgcctccatcagtcactgctgttgcgctcgtcctccgtgtcctctgccaccgccgccatcatccaccatgaccgctgcagccagcgctatcaccgtcttctcgagctggcgaccaccgagcataaagaagacaaggaaaacggtaaaaaagaaaaataggcactgaagaagtggtgggaggaagaaagagaagggacaggagaagatagcaggccccacaaaaatagtagactaatatttgtgtggtagtataatatttttattgtatctttacaatccgcttctcctctcttctctcctccaccttagtatttagctggcttatagcctactattatacttgctcttaattacaacagcctgcaggctagctgcttcatgcatgtcacagtgatagtcgtcagtccgattgagtatgcatagctatggtcggcctgttagtgtggtgacatggtgagtgtgtggctatcctgctcagtcccaactacaatctgcctccttccaatcaggccttcttctccgccaatcaactcgttgattatccccgtcgcttcgtggttgaagttctggtttttataaatacatgactatgaatctgtacagtctatcatcatgatctccaggtcccttctagccaaacataaatatttgagctctgttttgccaagatgctttaactctagttctcgatgcatccagttcctagcagattctcaccggtcactaccatctccttcctgctagcaccctcacttagcaaggataaatgcatgtaatgacaggaacaggctggtcaggctctatagttttgacgtgtttatatatggggccttccccagcattccacatcaactacatcactactacagaggtgatttttctggacaccggccccttttggttccaggcgggccaaaagtggctccgcctggaaccaggcgaatgccggcgccgggctgtgggcc

SEQ ID NO: 22398 - DNA, 4621 bp, Oryza sativa
gcccacgtaaggcgaccgcttgcgatggtcggggggcatataagccccagcccgaccgttggtatgaaattccgacggtttctctctcataaacatccacaaaattaggggggaaggttttcgacctcaaatctttgattgggttccatataaaaggtgtagagcttgttctcctccttcatttgcttccatttttgtcagttttcatcggtggaatacgaagaaacttgcacttttataaatggaatagtgtaggcacctttttgttttttttatttttttagcaaatacataatgattccattacatgtttataaaagtatttagtacctacattgaaaagttgggtttgcctctattaaatttattttcatttggatgaaaggatgattttttttcattttttagaaatggacagtattttattaatgcttaaaatcactgtgcggctatttaaatagttcgtaaaactttaaattaccatgtgattcgttccctccaatttaaatacattcgtgtttgaatcgggcatggatgtattaatgacaagctttattgtaagtcatggatcagacatggatgtacaacacgaaaagagctcatccaacgttcttgaaggaagcagccaaatttgttgagctcgcaaaggcacatgctgtgagggagaatttgaggaacattttttgcccatgcaaagtttgtaagaatgaaattttgctgcaagatccgaataaagtattgtcgcacatcgtagaatgaggatttaagaagggctacgagatatggacctttcatggggaagtcaatggtcgtaatgaagagttagatgatttctgttttgatgatgcagaaaattttattgtcgaagacatgtcacagggaaacatcccggaatacggtggctctggtatagagaatgaaggtattgattttgatctggaagatatgttgcggcacgttgaaccagagatcctaactggtacaagacgagggttggacaattgggaagcgttggaaaaagcagcgaaggagcttctgaacgacgaagccaaaggatgcgacaaggactattcggtcctgcgctcggtgctcgaacttctcagattgaaggccagacatggatggtcggacatgagcttcaatgatttgatggatcttttgagagttatgcttcctaagctgaacctgctaccgacgaacacatatcaagcgaagaaattgatatgtccattgtctctaggtgttcagaagatccatgcatgtgaaaatcattgcatactgtaccgcaaggaattcgcggatttagactcttgcccaacatgtgggacgagtcggtacaagacgggcaacggagcctccgatagagaggtggtcgacaaagatgatgcaccggtggatgagaaaaaaaagattcttaggatggtgatgttggtacctgccagttaaagatcgcctgaagcggctattttccaaccatgacgacgccgagttgatgagatggcaccaggagggtaggaaaaatgacggtaagatccgacaccccgccgatgttcgacagtggaaaaactttgatgcactacactcggaatttgcaaaggacccgagaaatgtaaggtttgcattgagcacggacggaatgaacccgttcggtgccctaagcagcacacacagcacctggctagttctgctaacgatgtacaacttgcctacatggatttgccagaagcgaaagtatattcttttgtctatccttatacaaggatcaagacagcctgggattaacatagatgtgtttctggaaccattgatggaggacatgcaagaactgtgggaggaagggttacgaatgtgggacgagtaccgtagggaacattttactctgcatgccatcatattcgttacgatcaacgacttaccggcaaacttttcgctctcgggctagtttaaggggaagttcggatgcctcctatgtatcgacaagacgtcgtacaagtacctcacctcatcaaccaagggtgtttacatgcgtcatcgtcggttcttacctcagaggcataggtggcgtgcgaaggccagattattcgacaatacagtagagaacgatctagctcctgaaacacgaacatgtggctctgtcttcgagctgacaaagaacattaaggttgtcttcggcaagccaaaaaagaagcccgtcaagaggaagaaacggacggatcaggaaacaactgatgcacctttagaggaaagtaacctgccctttaagaagcactcaatttttttcaggtatcttgattactggaaagacctggaggttcggcatgccatcgacgtaatgcaccttgagaagaatgtgtttgatagcaccattggcactttactggacatcccgagtaagacgaaagatgggttgaagtcccggaccgacctcgtcaatttggacataaggcatgagctttacccaaaagagctgccaaatggaaagatcgatattcctccggcttgctactcactaacacttgacgagaaaaaatctttatgtagatgcttgcatagtgtgaaagtcccgactggtttctcagcgaacgtcagaaaacttgtatctttgaaagatttgaccatttctgggtacaatgctcatgattgtcacaagatgttaacagtcttcctaccgattgctataagagcggtcaagccagttcacactcgattagtgataacaaagttgtgctactttttcaatcgagtatcacagaaggtttttgatcctgaagagttaggcccccttcaaaaatttgcaatcgagacagcgtgccagcttgagatgtttttccctccagcttacttcaacatgatggagcatctgattgtccacatcgtacctcagattatcgagattggtcccctgtacctacaccagatgtgggcgtacgagaggtacatgtccgtcctgaaagggtatgtccataaccgagctcatccggagggatcaatgatagaggggtacacaactgaggaggtggtagaatgctgcatagattacatgaaggacgccgaacccatcggtgtgaccccccctttacacgaggggcggttagctgggatggggatcgtaggcaagaaaatgttctatgatgaggactacaaagatgtagcggaagcacgtagcagcgttttgcaatagctcgccatcgtcgagccatacattcaggaacacatgaacgagatccgagcccccaaccctagaagaacggccatttggatttgtaaagaacagaaacggaaatttcttgaatggttgaaggagaaagatctgccgttgggtgattcgctgaaggaaaaaactttgcgcaggctagcaaatagcccaactagccttgtgacctcatggcaagggtacgacatcagcggatataggttttacacgatgttcaaggacaggaaaagcgcagctcagaacagcggagttcgggtggaggcgtttgacgcatcaggtgagaagaagtcttactacaggatcatacaagacatttgggagctggactatggccttaacatacagatcccagtgctacgatggcaatgggtcagagacacaataggcgtattcgtcgatgactacgacctgacggttgtgaatcgtagcaagctaggacacaaggatgatccgtgggttcttgctgagcgtgttgctcaggttttctatgtcaatgaccctccgacgataagatggccattgctgtaccgggaaagcaaaacatcattggcattgatagcattgaatatgcgtcagattacaatcaatacgacgacgtccctttgttcacagattttcctaaccggatcaaggaagttgagacaagccttgacgaagatctgttttcgtgtgtgcgtaccgatggtgtttccaaaattgtgaaacattagtacatattttggagtgtacaacttagcttgtaaacaattaatggatgagacttattttgcgaatgaatgtatttctcactttatctggtcaaatacttgacttatattaatcaatcgatatgaattatatgcgaattaaattcatgtgcttaattctttgtgggttgaaaaatattatttgattaaataattacttgattactttattacatatttatttaatgtaggttgaataatttgtgggttaattaacccgaactatttttaattcgtggtttagtaatgtacattaaatatatttaatttgtggttcaataattatatggataataactacaatttatataagatttattaattaaatgtatttaattgtgctatattatacattataattaataaatgccaactaaattaaaattttgcaaaaaaaaaatggtaggagccttcccgtgtgggccacttaagcctattatcccgtgcgggcgtattaggtcacccgcacaggatgcccatgtatatatagaggaggcgggtagaagggctgaaattttctaagtccactccaccgacgctgccaggctgctgaaaaatccaaccgccaccgccctcccaaatccccctcgccctcgccgctgccgcctcctctcctcctcggccttgccgccgccgcctctcctcgagctcctccccctcg

SEQ ID NO: 22399 - DNA, 2931 bp, Oryza sativa
caggcgggccgggcaaccgcacgggataatctattcaaccgcccggaaaaatgggtattggagtagtgcatatttagggcctcttatatataggcaccgggaacatgaggtacatggagtgatgtacacaagcagatcctctgatcacttacttcccactgactttgaatcactggtacgtgggttgttgggtagatggcccacatatcagtgacccacgttagagaaaagtaacttggaggatctcaatctgtaatatactacttctcataatttggtttataataacaatccattgattccaaatagttcagtgaatactacggattagtctacaaatgcaacacatatagtagaatcaaagtagcaagtcgatcatggcacgctgcaatggaacacttcgggctagacccttttgttttatgaaagaacatgcgacccttcttgccttaatgagcaaatataaaaaatggtgagtgcatcaaaacatgtctctggacgaggggttctgttttttctggaacttgttgatggatgtagagtggagatggctagggacagtgttgtggatctgagagaaagggtggtcatggcggccatacatggtgaagaagaggatgggaaagttgagggcaaactcttaccgaggcgattttggtgtgacggagatgtggagggcaaggtgcgggagtgtcttagcgatcatcgatgacattttagtagttagagacttagaggcagggcctatgtgcgaagagagatagagatagagagatgggggacttgacatgtggacctagggtatttcaaagaattcacatgatttctctcttcaatttaaccgaaaataaatattctaatggacgcggtgtccatgatctaattttcatgtttacagagtgttttctccccaaagtcacttcatgtagtgttctacagctaaaaccgtgaagtcatgatgtcctgttgttaacagtgaaatttggtaaagcccgaagacatcatcggctgagagtcagtgtcggcttccgagttctagagacagccaatggtagtcattaagtcgccatgctgtcgtgttcctggtggaatcggatcagtcaaaggaagcttatctagaagagtccaagttcaaggaggatgtggcatggtagtttatctattaattaggcatagtttgttagtttccttttatctttaggaaaatgtgtttagtgtccgatagggactttatcttttccttttatctttagtttctttcttgtccgacaaggactagtatctacccatgggtataaatatgtacacccggggtctatgtaatctatcaatctcgatcaatacaactactctcggcgcatcgccaccctctttcctgaggtttttacttatcaaccggcggaacttggcacctgacgcggggctgcatcggctttcgatctccggcgaaggggtaagtcctacgttccgccggccttggtgaatctatcggctatgttggtgttgaggctgcatcgcttcgatctcttggatcgctctggtttctttgatatatttgcctacctgatatctcaattctatctctagttgcattgtgtttagagacgcatcggtttagttgggactgtctcggttaggtccgatcttctgtcttagtcgatatatctctacaatcataatgatgttataaatagatttgttatatccatcacattagacagatctatcggctcatcgagtattagattatcatatacaatctcgtgctacatcggttaggttcgacctactagattgttgttgataatataagtcttgttaagccgataggttcatgctaatgttttatcagggtgctagccgataagttatctggatttagccgatgacaacaaaggtttcactgtttaacctaatctgtggattttatggcatcggacctccagccgatgcatgctttaaccctcggatcaatgcttattatatcatatcacattgctagctgattggtttatactggattatgttgttggtatattttattatcatcagccaattgcctttatattattatctacattggacatatagccgattgctcaaaaccctatcactatcgctagtatcggcatcggctggaattgctccatcggcttgtcagctgatcggctgtttgatctactgtttgcatatcttgtcagttgcagggtcaaactgactggcacgcccgcatctcatcaacctttggatctgcactggagctaagcagatctcccaggccagtgtgtgtttttcgcgtcaacacctgtagaacatgtctatttgttacattgaaggttaatgatctcttgatgtagtaggggtggaatgacatgctagagtaaaactcaaagcccagcagatcaaatgaatgagatgaagcattccttgtgcaaactgtcctagaatcccaacggccggtgtcgatctaaccataattttgctagcctaacataactcaggatgggaatggttaggtttggcccatttatccattgaacctacgcacaaatatgctccattgggcctttaggattgattcaaaactctaaatgggccaaatggtttgaatcctagaaacctgggaaacaccggatcaatccaagcgactccttcgtgtcctctcgactccttgcggccctccagcgtcatgtccttcttggcacagtggcggcggcactcggacgacggccctctagggccgtctcatcctccacggcacgctggtggcggccctccagcgtcatgtcctccttggcacagtggcggcggcgctcggacggcggcccttagggcggtctcatcccccatggcacattggcgggccctctagcgtcgtcttgtcctccttggcacagtggcggcagcgctccagtagtggccctccagggc

SEQ ID NO: 22400 - DNA, 10058 bp, Oryza sativa
gacatccagctcgagccgctgattatgaccaaggaggaggatgcgactaaggaagggcgcacaacgagagcatcgtcgtctgcaaaagcctcgcctcagctctctccaccgaaggccgtcatcttggtggagcaggaggcagtaggcatggcggcacaacatgatagtgcgtcacttgtgcccgcgtcggaggtgcaccatcagcccgagccggtggcaaccacctgggcaaagcagccatggcacaccgtgagccacgacgcgtcaccgaagccagcagcagcttttcctgtgatgccgtgtcatcccactgcgacctccacaacaaggcgacgacctctgcagcgactgccacccccagcgggcacatgttcccatcgttggtcttggcaacggcgccgtcatcgcttccctcaatgcagacggaggtaggtgcgaaggctgcggattcctcggtcaacgctccgatccaatccgcaagaggcacgatctctggaggttgttggattggcgcagctgctgcgtgggccaaccatggctcgatctgagcttacgggagatgccctcatgccccgacagttgtgggtggcgcgatttccgcgagatcatgatgcggcagcttcggagctgatttcggcggcggtggttggtgcggtggatggccggcgcccgcgcggtgttcgcggcttggataagaaggaagcacagcagcgccgtttttaccgtgtcatcgtcgattggctgcgctgcggcagagaggagctgcggataggatgttcgcctctgtttttaatgggccaacataacctttcttttgggctgttccagtggactgggcttcaagtgtggcagcccatgtcttggctgttgtgttggccaggtggggctaaccttggaaaacagatcagatatgcaatcaagcttgcaacgtgctgtggacttatcctttctctcaaagcttttggatggggtccacctgcatgtgttatcagcgagatagtatggtggtgcatcataatctttgatttatttaccctttcaattttttgcaataaagtaacaagccgagatgtaaaaggcttaagttatgttaggttttatttagaaagtcgtatgagctgctcgaaaggagggatgtagtgtcataggtagtaggccgagaggtcgaggccctagggataaggatagagtcggttggataagattagactgggtccttcctccatctatataaggatggattgtatcgtcattctagttaagcaatgaatcaaaattagtctctcccaacctaagtctccctctcatccctagcagccgtcgccgcccggctatcctcccggcggtgtttaccccctatgaaccctagcccataacaatttggtagagaaacaaggaaaaagaacaagcgcatgtgtcatacttaacatgatatatgcattgatatatgtcaaatatgtgggcatgagggttgaggacgtgcaatttatcaccaagtcaacatccaagaccataaaaagataaggagttccagtgaagaaattgtaaatttgatattttcagatataaacatatttttttcttgaaaaaaagagagaatataagcatagtttcaatatccaattgagaaatgcttaggtattccacacaagaaaaaataacttattgtttgatatttatttcccacaagaaaagaaatccatctggtgtaaactcccaacttagatcaagactattctggctcctttgctcggttagagaagagtgcattattcacccaagccttgttgatagcaaggggataactggaggcatttcaccaatatgctcaacaggttatctagtagatcataatgacaagaacactagatgattttaccccaaaaaataaaaaacactaaatgattaaacatattatatgtggttacaaataaaggctatattgccttctacatgaaagtcattatcatttctttctggggtatttcgatgacctgtaatgatataattttcatcttttgaaggttcaaacatgaattttccatggttatgcatagggaaaaattctgttataccagatatacaaacatggctagataatctcaatctctgatggctatattgtaatataaccatcaataatatttgctctatcatacttggtttgtgctcttttaatgcctacacaagagagttggccagttgtcaattgatggcttaatttggatctagatgtacttcactggtaatttcttcacccctacactccagtagacactcttattaaattctctaaaggagcaacaaagcaattcccatctgagaagatccaacatattgttttgttcccaacattcagtggaaaataaaaatgcatgtaaaatatagccagaggttgaattccattgtcatagaagagtatattgtagcaactgtaatatgaataactcgtcgcaagtattgttttttagagagaaaaatacctaaaagtgttgcgccagcttgtcttgacgcgcgcagcggggagggaggcggaggccggcgcgcggcgcggggaggaaggggagctgggcctggcggcggaggcggcggcgtctgcatcggcgcgcggggatggaggcgaaggccgtcgctggcgaagggagggaggggagccgggcctggcgacagaggcggctgcggcggcatctgcatcggtgcgcggggtgggaggcggaggccgtcgccggcgaagggagggaggggagccaggcctggcggtggcggcggcggcggcatctgcatcagcgcacggggagggaggcgaccggcgccggcgaagggagggaggcgaagaccggcgccggcgaagggagggaggggagccgggactggcggcggcggcgctcggtggcgtcggcgtctgcggaggcggcgccggtggcgtcggcgtctgcgcgcgcagcggggagggaggcggaggttggcgcgcgaagaagggaggcaggggcggcggcgacggcagccggcgccgagggaagaagcgacgcggaggaatgaaggaggcggcgtcagaagaagaagagaaaagaggaggagaggagaagagagaactgacgggtgggtcccacatgtaataaggtcaaatgagtaagggcaaaagggactttttgtgcttcagttaacaccgttagaagcccttaatataatagggtcataccatatctttaattttgaaaaaaaaggtcaaataagcaaagttgaaaaaaaagagtcaaattggtagttagcttttaaaagagggtcaaatacgcaattgccctattaggaaagcagggcccgtgacaaatttgaaaagtatgctgcaaaagaattacatgtgaagtgttgttgttaatggaatgatcgctcacagatgcagccaatgaaagactggagtcattttctgctgcatggaaaattatcacagattgtccaaccatcccacttgaagcaggattctgcacattatgtgcatgaacagtgttcttctgggaaattctatcttcattactcttgaaattcttgcaacccgtacatctgcagttctctgaacagaaaacactagctttgaagcattcacagtatttcttcagatactctgttctcttgcatttacacccctttgtatgtttacccacaatatcaccctctgctgctttgctctggaattgaaagatagaatgagtttcatacacatcatggaagcatatgttatacaagtacgcagctgagcatctcattggttcttcatatgagaaactttgccttaaatcttgctacgggctttttgcacccaatgactggtaactgctaaaatatgactgcactcaaacttagccaatgtgattgaatcataggaaaaataacaagaaaaacaaaataaagtggtaatgatatcatgacaataaattaatttctagcaatggaaaagacctgtaagttctagatgaccaaaaacaatgcattttgtgtcgctgttgctctgaacctcaaataatattcaaaaatagaatccaaggaaacaacatctaactgacttgtagacatgaaactttgtctaatgacataacaatgtatgaatttcagtccctggaaaataatatcggcatcgttaactgtgagagtttaggacaccaaagaagtctcaaaacttgagggtgccagtttcagtttcttggtgcaaaaaacgtagcatatgctctcaggtattttgaacttccaaattgtaaagtgacgacatgcacggttaacttaagagatatgaaatggcaaccctcaagcctagtggtattttaaaataattcttgggggggggggtggttgggtcttaacggagagggtagatacactttatacatttatttggtatggtggtacccaccaggtttggctgaaagccggtgtttatactgttcacaacctagtgtgaaatcgtcctttattataccttttgctcatgaacaaactaaacaggcaaacaattaacccaaaaatgcttataggctagctactagagaattagaatctgaatagagaaaacatgccatcttgcaaaaagatacatcatgccctacctcacagttgtgggctgtgctattcgaaacttttggcataaaagctgcaggattccgttccaatgcaacattgatagcatcatgtcttgcattctcatgattaacattgttgcaacagtttgtgcaattgcaaccaatgcagtatctgcctttttcaaagcactcacaatacctacaaattcagtcaaaccaaaagactagtatgtgtgaatgtgtgattatggttacaaacgaaaccaggtcattggctctagttattactaaaaaagcctagggccattaaccttgcaagtgtaaattcctcgcaagaaaaaaaaaggcttcacaggtaggaaggaaattgatcaatgatggaagcatgcaaaagttaaatgcagcatctcataattgcaacaaaccttcagagaaataggttgcaacaagcgttcagagaaacaggtaggaagggaaaagaagagatagcttgcaaaaatcaactttcaaccaacatgaaatccaactaagagttattaatttcacacaagaacatgtattctaaactttgtggttgaagagtgtctactgacataatatttctaacaaaaaatctacaaagcaataaaagcagcgccaaagttctataaaaatagtaacaacttgttttatatttatcaaataggaaaaaaaattatatggaaaaacaattcttatgcagcaattggaggaaatttattatggaacctacagcttcaggcatttcgaatacttgcagctgcagtttgttttccttgtcagtgtcacatcttttgtttcagaccacatatcgctagatggcttttgagaactcagcatcctgaagagacagaaaagaagacaatttacctcctttagtaaagtaaactcagttacgtaccatgtgaaacatattcattatctgctctcctaattttctcaattaatccaagaaactcatatatgcattagcgcaaacaatttgcaaacagtgaattatacaactttaaaggtatgcatcatactatcgcaaatatgaagctatcaatttcaatttcttcaacgaagcattccatctcactattccaagaaatggagaactcacacgtcaataaaggttgcaggccttggcaacaatggcctctccatcttcggtgaaccttgcttcagctctggggatacatgttgcggtgaccgccgctcctgcaactttgtgggcttttcaactggcaatacctctaactttggaaaatcttgtggcagtatggatgaagactgctgcacttgcagcttcttggccggaggtgggctaggcaatgacatacgacgcttctgggcaaatgttgaagggcatgtcactggaggccatagtggcagtgatgaatttacttttgccagtgggagctgatagcagggcggcccaagcgcatgcgagagcgctgccgcggtggcagcgatatctgccttggcagcatacaaggaagaggcaaaatctatcttcactgaccctggacgaagctataacggcttctccatttcccaccagttcctagatcccactctggtgccgaattaaacacctgatcagacaaaatcaatcctcttctccgagatcatctagcacattgcagacaaaatcaattgggattgatcagtactaaatatttggacctgaagtctgagcaaaatcgatcaaaactcacatgtaaatgaaacaaaagaagaagcgaggatgcacatcggtttcagtcattttgatcactacgaaacagtggcggatctaacatgggaaatggaggttcagttgaactaccccgaacattttgagaacaaacttaaggcaaatttctagaacagaagctagggttaacgcaaattcgagaagaaaaaggtacgcgggtagagagaaagagagagagagctgagaaagtggacgtgcatagccatggatggatgctcaccaggatacggcggaagcagcaggacaaccgacggcgcccctactcgctcgcgggatggatggggatcggcggcggcggcggcggaggcggcggacgaactcacggggagtcggcgtcgccgccgagaggaaggggaaacaccgccgcacgactatttcctttttttttcttttttttaaacaaaaataatcgtttttggctacattttattgcccatgatttatttgatcaccattcaactcgtgttttcactttagattggaccacccaactcttttcttatttaataaacatctagaaaggaagcccgcgcagatgcgcgggcatcttatttatatagtttaatgaaaacaatgttaatataagttatatcgcatcatttatacgctgtgaaatagaccgtagactttaatatataaaaatgataaggatgtctctagggttttaaatctcccactatagctgtttgagaaggattctagctatttgctctcatgtacaatttagccgctatagctccatttagcccgatatagctgcggctatagctgtaagctaaccgctaaatgccttaggccactatttaaaacattggatgtctcccatattaaaaaaaatcactttgttctggttgtcacttcaaactgtagactttattatatataaatgataaggatgtctcctatattaaaaaaatctgtttgtcatggttgtgacttcaactcattatcattgtttagaaactaagtacctattaatagataaaactccatatatttataccagtaaaataagtctaatacattattaatacactaaaatatccactgcacctaagtattcatgtctgacttattttccaatttgtatatagatatcctaaaaataccacttgcaccaattaatgggatatcattgttaaagtgaaacataaatgtccctctgctgggtgaagccgattgtagcggcaaaacttactttctctgtgtttccttgaaacatgggtcttgtatcgatatagtagtgcctctccatactagcctggagcactattttaatgcctaattcacaccacaccctcatggagtattgtatcgataaatagtaagcctagcacaattggcgagagtggtctccactggggttgcttcaactgacccatatgtatgcccttgctatacttatgttagcgtagcaaactctgctgtccatgcttggtgccctttagtaaaggacaaagagaagatgaatgcgatcaaaataatgtttttgttttaagttttgagtatatttatggtatagagtaaacaccatttatttgtggtgttaactattacttcttaaataattatgatatagataaaatattctctttcaaaaatgaccgaggttaataaaagattatagctaaagagacataccgccaggataatgttcagagcaccatcttattatttaaattttaacaaatatctatagtttagtgtttggtttcttttcaacacctattgttgataatcacatgagacatctttaatcatttggataatgtacttatttttttcaaaacttatttacaatatataactaatttgtaagagaacacttatagtcacgtcggtggcatatatcacatacatccatcaattatgtctcatatgttggaattcctcaactataaaaaaatataacatgattggtagtatgttgcacatgttacttgattattcatttgttgtcaaaactatttggcaaagaaaataaaatgtacatataaaatcataaatctcataatggattaaggtgttctattatatcaagatcattggatgaaaatatttttttatatctatgtatcatgtgctgctcacttctcaaataccaatcaagtagttatagaaaattcaaaaaaaactttgagaatcttaatctcaaataaattaaaattaaatcaaagatagttgaaaaaaacacaactaaattttgttgtttttatgtttttacatatgtagatttaaattagcgttgtatatttgttaagggattttttacaccaaaatataacttgaaattattttaaaaaaacatcatatcactaattattatttgtcggcccgatgtgtcgtgatgtatttatgacataatataacttttataatatttatttaattaaaggaatacaacaaagatcacaaattagatacataattttaaaataatttaaaatgtgaatgtttatagaccgattatatagatctagtttaacattgtgtatttgtggagtaatatattttatctctatattgtagaaaattatattttaaagaccgtcgatttttcttccaatggttatatgtaagtatgggttttttttctgccacgtggcactatctaatctcaccgccgattttcatttaattggtggacccgttattttaaaccattagattcattaatttttatttaatttggtggacccattactttaatctaatcattatttggtgtatatatatatatatatatatatatatatatatatatatatatatagacacacacacaataccttcccggtataaaagtgggaataccatcggaaaaaaatcaagtatgtctagtacgtatgattcgggaaaaaaaaagagcttacgttgtgtttgccccaagaaaaaaaaagcccgtgccaaaaaagagataaaaaaatatgtacaaagtatcatcggaagaaaaaataaaatataattttctaccgtataagataaagcgaaaaaccatatgcacatagtaccatctatatatctatctatctatatattatatactaaataaaatacattaaacctccaacaaacactcccaaaccgtcacatgacaccctataaatactctcaagtcgccacgtggcaccctaataaaataaataaatctaaccatcgatatttatttaaatcggtgaacccattattaatgtgaatgtttatagaccgattatatagatctagtttaacaatgtgcatttgtagaataatatattttatctctatatcatagaaaattatattttaaagaccgtcgattttttttccgatggttgtatgtacgtatgaggttttttctttatcgtatatggcagaaaattatatttttgatttttttatgatactatgtacatatttttttagctttattttttttacacgcgtggctttatcttttttatcggtcctaagacctaagctttattgtttcttccaaatcatattactattttttttccaatccaactatacgtattttcttttctatacatgaggaaaatgttaggtatatatctaatctaatgatgtccaccaattttaaaagaaaatcgaggatgtatataaatctaatctaatgatctaacgggttcactgatttaagtgaaaatggatggtgagattagacagtgtcaggtgacgatttgagagcgtttgtagaagcgtcatgtgacggcttagaagcgtttgta

SEQ ID NO: 22401 - DNA, 6465 bp, Oryza sativa
ctgtgatggaacattcaggtgtttatcgttcctaagctttatcgtttcttccgaattaatcacacgtacgcattttcttctgtatatacgagaaagatattatgtatatatctaatctaatgatctaatgatttaaaataacgggtccaccaatttaagtgaaaatcgacggtgagattagatagtgccatgtggcgaattgggagcgtttataggaacgctacatggcggcttaggagtgtttgtagaaagtttaatggacttttagtatataatagaatagatgttaagaatatgtttgataaagttccaacttctaattttagcttcagagttgggtctgaggagagttgtggagctgcctaaactcagctctacctatctagttcattttgtgagagagctccacccaactccgctcccattttaggtggagctgaaacagtttggctgaaagctggagctgtgccaaacagacccagtacgtcggctcttacttatcaatgaaatctcacaaaccatttttttttcatacaacaagttgtatgtaaatgaataaaaaaaggttgagaatggtctaaagtagtgcaaaggtaagatacccggttcaattaaaaatattggttaaatggtaatctaaaacagaacatccataataaaaaggtggtccaaagtaaaatttactttttcttttctttgagaggatttaattctcagataacggaaataaaacaaagaaaagataatgactctttaaagatttttagatccaaaccagacaattcatgtcacatgtggacacgtggatgaccaacatcgaaacaacactatctctatctaccgcttgcatcatcgatcacagtatcctctagaaagttcaattgatctctttcctctgcgtggatcgttttcttttacctacggcacattgcaatctgtgctcaaggccacgatgcatgattcttcgcccaaatgaggcctaatcgcacccacattagactcccaaaaattcttatcgattgcgtaacactaatcgtcgtccaaacacttctctgactcttaatcgtgctcggatgcactgcggtcggcgggcacataatctcctacgcccctcccccaacaaacgcacgcacctccgcaaatcatgtcatgtgccccccacgaggtcgcatgcagttccaatgccaatcgctcgcgatcctttcttcttctcaaacgcagcttgggcgatttaggctaatgcaaggatctacatccccttatataagcattgtcgcactcatcacgtttgatcttgtaccaggcgtgaaggtgtgtcatctacctttaacctaactagatgaatacccgcctcgttgctgcaggaaattaagttgtataatatgcacaaatcagatgcaatatgattattaaaactaaaacaaattgatacttatgaattttaagcctaaaaataattgagatcgcatggtattacgagatatgaaagaagaaacaatttaaaccatagatttattatttaaaggctagaaataattgagaaaaaacataaataatattaactacacttagtggggatcgatgaaatatatgtataatataggataagcctagcttttggttcgtgccacaactatgatcaggctatccatagaaatttgggacctatgccttatatttaacgctaacaacaaagagctatactaaataagcatatccacctattaaaataggggtgatctaactaagaagaatggttacaccaatttagagcccatttagattggtgccattttaaactatatctttttcttaagtcgataaacatgtggatgtgtttagtttgttaccaaacattgataatgtataaataattttggttacaacatatttagtttatcctaccaaaatttgataatattaccaatttagtttttctgaagaggcccttaatttttgttactaagttaaacaatggaatccttattgtttggaacacacacttatattgttatcacaagatacaactattcgaggtagctatggttgtcatcgaacacttaccagagccaagaaaaaaaatctcgttccacccaaatctaatggattagaagaaatgactttgaaaaaaaaaggtaaaataaagagataccaagcatattgaaatgcattggtgtagattgaaaatatacgattttagggcctaaattttatggccatgagcggtcgatcatcttaagcacagggataggtgtagctatggtataacaccacttttaagaaatcaagaccattcatgattagtacatttttcttgccacaacttgtcattcactgcacctaaagcctttcagaaaacttttcaccctgtcaaatcgaatgtttggacacatgcatggagtattaaatataaaaaaaactaattacacagattgcgtgtaaattataagacgaatcttttaagcctaattgcgtcatgatttgacaatatggtgatacagtaaacatttactaatgacggattaattatacttaataaattcatctcacaatttacatgagaaaatataatttgttttattattaggctaagtttaatactcttcaaatatcaaatttgtgtccatatagacacggtctctctcccaccgaaacgtaaagaaactcgcgagttggccccacgtttcatcctcacgaccgtgtccaacccagggacccaaaccgacctccctcccaccacatccccagttccgccgcctccgcttccgcatcgcgccgccccggccacgaccttctccgtcgtcgtcgtcccgtcccctgctccgccgcgtcgccgccctcctcggcggccgcgtgcgcgccagccaccgcctcctctcctcctcgccgtcctccgccgccgccgccgcagccgagagggcgtcgccgccgtcgcccgcagacccggataccgtgcacatgacgatggctgcatccgagtatgtccccttaccttcctccccttcgttcattccctcaagatcgtgtctcccgtattctgtgtggaatataggcctaataggaggtttctgctgaaaacttttggtaacctgatgttttctgttttgatttggtaagatttgatttaggtaatctgtcgtgatgttctgggaaattatgcggcctcccttttgaggtttttttggggctttgcactgacaaaataccgacatagcgaattgaatttggagtcagctagtcaccgtgtgctatgttaatctgctttggaaatgctacaactggaagcacattttctgaacattttcactagttcagtaaggggggaaaatgcaaaggcctgcatgagttgtatgatatcacagaattctatatgtttgggtatgacagccacaaaaattgggtgttggattgcttttttttttccttctaaatggaagattatgttggaatctgtgaagtgtaggataactacaagcaatgaatcataaataagttgttccgatgctcagagtgaaaaactataaacaatagtattagacagccgaaacataatgttgtcagcactttgatatttaagttattgctcacaccttcatttcgcgttcccggaaataatagaggggcaatagaaggctttgacgcccttcattccattgcgccagagctaaatgctgtgttgattatacaagtttgtttggtcacctacccttgcctatatttctcactgttgaaatggagtattctttttgggctataccagggtttctgtgacaggatttcaattcttgttacatgtattcagggtctctagatgaatgcattttctgttgttaatactatacagtagaagtggtttcatatgcttacacttatatcccatatgtttgcaaaacctttaaaatattatgaaaattttgaaatatggacattgctaaagggatttcctgaaatttcatcagagaggtgatattctttttttggaaacaacaaatatttcctgctctttttttgtcttgatttattttcaactgttacatttgaatatgctacttctatcacattttgttcaacgcagtaggaacatttgagaatttaatttgtgccaagttgacttcaaatatgcttttggtgttcaggatgtatccccctcgttttacatactttcttataattttagttttcctaacagttccgcatttttgtgttctttggaaacttaatgcttcacagagattaaaagaattacatgctaaagaaccaccttctgaaggtaagatgctgcgattaagtgttgaagctggtggatgttctggattgcaatattctttctctcttgacgtcaagaaaaactcagatgatcggtatgccaattttcctgactggtttgtccattttagacaagtttaaattctgtatttcttctaagcatttttgtggaaacttatgaacagagtgtataccttataggtgatttatgcagtgagtgttgcacatacttcatcaatagttttacttatctcaacaattgttgttacacatgtaggatctttgagaaagatggtgttaaattggttgtggacgatgtctcatatgactttgtgaaaggtgccactgtggattatgaggaagaacttatacactccacgttcgtggttagtttaaatttgacctgtttgattctcgatttgaatactctcaccatggaaacatgtttggtcaaatcttccgctggatactaaagttgagaaagatgtcagaacttctcctagtgccaattttatgttgtgaattgtatttttactacgacttctcagctcagtaggcatatgcataaaattaaaaggcagaaatacttttctactgagttagctagtagctaccaccctatcattgtaagacgaattaaagaaatgatattggtttgatcattttgggtaaaaagagcaatttcaaaccactagacaactgcatgtttatttctttttaatatcaagatacaatgcactaaaaacaaaagttccttctcgtagattttcacaagtcacatgctggtgctgcaagcttgctgatctgttagtggtgtaacaaagatgaattattaaatgaataatcttttccattatttggtctggatatttaaatctttttcctcttccaccatatatgtttctctggctcttcttcatcatgacaagtgcacacatggtttctctggtctgaaggggttattggtggactggggacatttaggtgttagggatacattattttagaattagttgtcctccttgccctttgggtgttagggagaggttactttacaaatacttgtcaaccttgccacttccatgaattttgtgctctacagcaatcagcatacattcaacatgatattgttctaaagtttggattcagaatgtattgtatttatattggttacagcttatattacttgtaatctgcaggtgtcaaccaatccaagtgcagttgggggctgcagttgcaagagttcttttatggtcaattagtttcagctttagtagcttgatgagataggtaatatgtgatagcattctgtattgaaatatacttcattgatacatgtgtacaatttggtatatttggtggttccaaagatattatttctactgcttctaccttgtgattcttgtgattacaagttatgtatactgaatcatttggccttcagtatttatttgtttgttgcttctttcaaagtgctaaataagatgcaatcttttgtaacagtgatatgagtgtatatatgtcagaattttcttactatcttgaggttgatcctagtgctagtatatataatatagggtgtggtcgtttttctattttgtctgtggtgcattggtaaagtatcaagagttccttgtacttaaaagattgatcgcatatgatttctgtgcgacaagtttatctcaatgaactaagtccctttgggtatgatctttttgctgatatgttttttttcgtcctgagtcctgagtacacgatctagcaccatgctttacttcaaactcagtgattcccaggcagttgcttgatatctttggtgatcaccaggtatggtgtttgtgagatatcactttctgagtagcagacagttccaaaaggtaaatgtactactctgttcactgaagatcgatctgaactagttgttttacatggcaagaagttgagaagagatcttatggtggatatttaaaagcttactgcccgttagagtgatatattctctggattttcataggcatatagagccaacaacttgataaactcctcatattaatctcttggttaatcctcaaaaccacaatgttttgttctacagcattgcagatctaagagcagaatgcaactacgaaggcaaatcttcaaatctagtgctttatctaacttggaacatattgtgattcctaatcattctcctggatt

SEQ ID NO: 22402 - DNA, 11845 bp, Oryza sativa
gaggaaggcgaagtcgcgaagacggcgtcggaggagacgccgaggacgcggaatgatgcactcggtgttccacccccgccgtgcccgctcgatcatccgctccagcaccggcgacgccgtgcccttcacaccaaacccagaaacagaaaaccatcagcctcaatgcaaggtcgtcaagaacccctgatccatccagaattcaccaccagtaacagagaagaaccagaagtccatcttacaagaacgaaggaatgtgtggcgatgctcttcccatccgacgtgacgacctgcacgtcggcggccaccgccggccggagcacgtccagatccgcccaccgcgtcatcgatcagaaactcccaagaatacccaaattctcttgatcaacaattcgactggccggctaaccaagaaacgatctactgaaataagggagggaaaaaataagagggctgccgccgccgccgaccccgagggctgcgacgggcggtccgccgcccgcggacgccgagagccaccgccgctgacgccgatgaccgacgccgcgcggccgcgcagagccgccgccgcctgctccctgctacgctgcccgcgccggccgccgacaagccgagagccgccgccgcctgctgggccgccgccgacgcctcggctgccagcctaggccctatggttctagcctgacttgtgctctgcaagtctgcagtctgcccgataagtgaaaaagtaagaggggaaaaataagagagggaaaatgagggggaaactaaaataatggagggaaaaataagatagggaaaatgaaaaaacaatgagataataatgtatatggcttaatgaacacaattagaattgacataatatcataaataacttgagacaataaaattgggggaaatatatatatatatattaataatctgaatatatagttgttgcctcgttaaaaaccttacgccctagagtagggttcccccgtaaggaaaaaagagtacaacaactattttacattatagcatcaattactccggatcaacagcaccatcatctttggtaaggcaaatttccgccaatgcgtcttccactgcatcggcaagctcttgatcatctagacggtgttgtgttcgttcatctgctttcatccagtctttaagacaaaagattgactcaaccgtctcgggtgttaggcatgaccttcgttcttcaataattcttccagtagcgctgaatgcttgctcggaagaaacggaggaggccggaaccagaagaatatctcgagcaaagtgagctaacataggaagagttcgctctttctctttccaccacccaaggagatcgacatcgtcgccatcaagcgtcggatcatgctcagtatgatcggtgacgaggtagtggttaagctctgaatccgggttccatgttgatttgttctgtgaggatggagaggcttggtccttgcctgtatgctgcttccacaaatttagtgcacttgacttgcttgctttcttttgtgaggtctgctcaggaactcggggagtaccaccaagcttggttcggtacagacggaaaaccctatagagctcattattgacatgttgaaaagcttcagaataatcaagccccactgcatcacctattgagttcatggcaaccttggcaatttccaactttttgcgaggatcaagtatcaaagcaaagcaataaaggtgaggtatagcggtgaagtatttgagaaatttttcttccatgggtttaacaatggaagacagaatacgatcagaccggttttcatccaaaacaagtgccagcttccaaatccactcaagcaccaaacaagatgtaggatagtaaattcctgataattgaactgtagcattataaaagggcttcagaaatttacgcacacgtgtagcaatctcccaatcctgatcggtgagaatcaaaatctcaccatcaccgtcgtcatcggtatccttcattctgacatgcatcgaattgatgaaaatagaaattaactcctcatacccttttaattgtcgcagcaacaggtatgttgtgttccacctatgtttgacatcaatgccaaacatccgtccaggtttattcttcacaatgccaaacatccgtccaggtttattcttcgctttacagtagtcttggaacctcgctttgaccactgtgttacctcctatgatacgaacagaacggcgaattttgtttaacaatttatccagaacaatcatgcctgcaaaaaaataggtcgcatatattaaaataaataagcaatatgccgcatacactaaaatcaataaattattaataacattagtacctggttgaacgatgagattgatgacgtgacaaatgcatctctgatgaatgacaaagcctccaacataacttcttagatccggctccaaaatcgacatggccgttgtgtttgctgatgcattgtcaagagtaatggaaacaaccctagattgtaaattgatttctctcaatacctctaggattatcgtggctatggcatctcccgtgtgtgacgtcatgagtttgaaccctatgactctcttattcaacgaccgattgttgtcaagataatgaagaacaacactaagataagatgttctttggtgttgggatgtccagatgtccgatgtcacagcaaatgaaaaactagtagtactcaaagtttgcttcaacacactcaacttagaacgatatatagctgtaatatcgttcttggtggttttcctagaaacttttttgtactgtgggcaaaaagctttttggatcattctctcaaaatgtttgctttcccccattctaattggtagatcctcagcaacaataaacttagcaatctcttctctagctatttttgaatcataggtccatgtacttactgaaccgtcagggccgaaggacaaatgtgtctgtcttgctcctgccggcgccttgttcttgagatgcgccaagtaatgccggttgagatggcctgtccctgaagaagtagctgcagacaaaattttttcgcaatatttgcattgagcacgaggtatacttttaccgtcaaccatctcggtgaataattcgaagtgtcgccaacactccgctcttctggcagatggctggttatcggaatttggtgtgggcaacgtcgtggcgtcgacgtcgacggagaagttggcctcgccaggagatggctgatcaccgtcatcgccctccagaccatccatgtggcgatcatccatcccgtagtcgtccatgcccggggatagctgccgggcatcgaccgacctctggtatggaccggttgtcgactcgtgttgacgctttttggacctccgcatattttctatgaaaaatagatacggtggggagatgtgttgaaagaagaagaagaagtgtgttgaaatcagaaaataggtatggtttatatagggtatgccagggccggtccgccggccggcgacgcgtctgaacactgaactgatctgaacgactctcggcggctaccgatcgactcttcggttcagcggctcggttgaacgcgtgacgtcaggagcgcaggagacggctgcggctagaagcctggaacgctgcggctgcgtgactcctcgcgggtcgcggcgacgcggccggccatatctgaagtttctgaacgactgaacgcgtcgggcgtcggccacgcacgcacacacattgaactactgaagtctgaacggctgaagtttgagtgtcagtctgagtgaccacgcacttagttctggccttctgggcatgccgcatgcggcacagcaacaggcaaggcgaccatgcacatctgcatgagtgcatggcactgttcccttgagaaattaatcaccgcgtctacatgagttaaattccattcaaaacaagaggaagaaattaatcaccgcgtcgcatgcagccatgcacgcgctcggcgctcctgcggtgacttacgggccgactcctgcgctcctgactttcggccatttttcgtgctgggccggccttcgggccttcgggcctttttcgtgctgggctggcccaggcactgcccaatagcctgccgtgccgcccagcgtgcctcaacttacggcccaggcacggcccaactacgggccgtgccggcccggcccatagccgtgccgtgctgggcgtgctttctctcgtgctgggccatcgtgccttgggccggcccaagaaagcacggcccaagtcccacctctagttgaggaggagccggagatcaccttcttcgacgtggagacctccatgccatggggtcctagggagaggcgcacgctgctcgagttcgggtccatcttcctctgcccgcgacagctggttgaggtcgcggagcccttcgtcacgctcgtgcgcccctccgaccttggggtggtcacggaggcgcttgagcgtaagggcatcacgcgtggcgccctcgaacacgccccgcccttctgtgacgttgctaataacatccacaacgtcctgcacggtgaggggagggggttcttgtcattgtatttcttgacatgtctccttccttgactttcaggaatgaggaatccattttctttccctttccattttcttttctctcaaggaaatatgtagtttactactgcagccatatactagcaagcacgttccaagcatgtacattgttgggtgagtttgaataaaagcttttattatctaaaattcgatacatgcacatggttcaatgccaactaaataaaaaaaaatctttctttccaactccaacttactatgctgcatgactcaacggttatcaattctaatacatcaacagtcactgctttgggcctgttcttttgatactattttcaaccttaccaaattttggtaaagttgtcaaaaaaattggctacatttagtttgctgccaaatttgggtaactatataaaaaatcctgctaaaattttggtaagttgccaaaattttggcaaaatttggtaatgtttttttttatcaaagtgaacaggcctttaactccgttttcaatttcaatcagagccactttttacaatacaagcacaatatcatatcgatgccaacacaccatagaagaagaataagatttaattagcacttgagtgacatgatagtttcatcaacgctagacgaatgcacaatatccattttagtgttctataatggttaattttttaccactgtaaagatttttttttaaaaaaaaactactttattttggcccttttcgtagtgctctctaacgttgttagttctggacagggcgaatctgggctggtcacaacatcatttcgtttgactcagagataataagggaagcattcgctgaaattggacggtcgcctcctgaaccaaaggggatgatcgacaccttacctctgcttacccagacgtttgggaggagagcagggaacatgaaggtgatgaccttgttgtttgcataaaatcacttacaatttcaaactaagaatgctttaggttcagtttgacattgcggcatatggatcctgatcataaactcgtttgctgcaacaactttttgacattttggtgtttgttaaactgattttcttataatcttgtcaatattattatggtatgaaaatacgaaacaattggaagagacgtgaaagttggataatatatataatcataattcaatctataaaccaaacgaccaaaattatatgttcaaatttttagagcaattttaaaaatgagcacagcgcaacaccaacacaacaaccacaaaccgagccttagttatagatgtaccataaaagataggaaaaactacaaaaaccatcccataagtcacttgaagtttgataagttattttgtaacaaatgtccactccatgctctgttttgttgtaaaaatcaccctagtgcgcatgtcacaccccaatccggcaccgccgtacaacggcacctgataggagcgtgtcgtaagaaaaacggcgcgaaccgctacctacgaaaccgcgatctcggtaccagtcccaggacatagtgctggtacccacggtgacaaatatgaatcattgcaaatccttaaaataaatagaggacttatttaccttaacttaggttgcagctcagaacaacccgagaatgcaaccgacgacacggacgagtaaacaccaacaacagcagcagcagcggaaccaacgaactaacacccaacaccacaggcgacggctgggaacaaggacgaaaccctaatcttcacttcacttcatcttcacttcaaggcggaggaactatatatatttatatagagcaagggtgagtactttcgtactcagcaagtcacgggaatttaggtgtttaatgcaagcttggaagagaggcaaggttgttttgcaaatcctttgtttgaattcattttgaaaacactaagtgatttatttctttttgagtttggatcgaaaagagacttgtgtctcgatttgacttaagaaatgcttttcaacaactcaaatggtaatatatcgacctccagggtcagatcattacttatcggctcccagagccttttcactcgattaagcggctcccagagcctttttcattttctcggactcccagagtccagctgcccagcagcaaagcaatccgcttccactcgggaagcctagtctatgatgcccacagacatcccgaatcacacagattcgtttctgactactcaggtcatccatctgccacgtaggctgattctggttacgattcccacaccacaacaacttttcacaaagcacaggcaaacaaatctacgcaacgggaaccacctcacatccgcccatgaccgtgggcacggctgttcgaacagttagttaacctctgcagaggggtacactttacccacaagatacgaacttattccgaacacccgtcggtatcagaggttcgcaacaaagcctttcccaagccgacccagggttacctcatgccacatagaaggatcaattcctcacataaatataggccattttagttttcacaaatcaaactccaaccacctcgatcggtaatctggcaagcttcgtgttcttgccttaccaggaacccgggttggctccaaccgaccccgccccggcgttccccaactattggcatgcgaggtttccctgaaccgactagttacttagccagggtgtcccattccaccttgtggttgcactttgattatgcttgatgagtttcccacaggaatcggtccttatatgcgaatacgggacagcgccacgcaggcaccacccccgcatcgcgagttttcacaattcattttatttttaaacacaccgacaccacatgtcgggttttgaaggcttcacaaacccatttcccaatttttcgacaatcaacggtgtatgtgggacaattggtatacacgctcaaagagcacggataccaaagtaccacaagggtggagcgacaaggaatcagggtagtacagcctacaggaattagtgcgactactgggtaggtccgtcggtttggcacgcaaaccgaggccaagcatgttatatgtgtgtgactctaataatgcaagttgcaaacaaaataataatgattttccaattataggagcaattgatcaaagggtgacttgccttgctcaaggtcttcgcgaagcttcacgaatcttcgagaaaacccgcgatcgacgaaaatccggtaaccgcaactatacgcaaacaatcaaaaacctaaacaaaagaccaaaagaaagatcctattaggctaattaatagtgccattaaatagatctcaattttacggaattactggatgtggaacggaatcaatcggagctacggatcgggagatacgaattttggaagtttaattggattttctggacaaggaaatgatttatcggaattttctggaatacgagaaatggtttatggaatttatagaaataatattctcaagaatattattgacattcactgacgtgcgggagcaaaggaaatgattcatggaattttgggaataaggaattgatttatgaaaaagggaaaaggatttattaatccctttggataagaaaaggaaggagggataggaatcagattttaccgagcggcttggcgcggcccgagaggatttgcgcggctcggccgagcttattgggccggcgcgggctacggagaggcggcccaagagaggggcgtggggagagagagggggaaggggagccgggtggaccgggctcacctcgcggggtcccgagcgggcccgcttgtcggtgaggcggtgcacggtggaagcggcgcacacggggacgggcgctagggtttcgggtgcgcgtggttcgggcgcggcgcgccgggtggacggatggtggcgggcccacgtgcagccgcacggcttgccgtggaccgcgcgcacgggagggaagacggagggagggggcggctgaccggcttggcccggtcaaagccgaggtggcgccgacgtggcgcctacgtggcagccacgcgggccggcgggaggaggaagaaggggaggccgagatggacggcggacggcggccaagttcaccggagctcgtcgtgacgattcgagagagagggagtacaccggaacgatgggacggacaagaggaagtgagccaccgggtcggattcgccggagggaggccagcgacgacgaatcgtggcggcgcacgccggcggcgcgaaaaggggggaaacttcaccggagcaacgggggttcgattcaaaaggatgggagcatctccggggttcaaggagttcatttccggcgttggatggggtagagcgacgccgtggaggtccggcgacgagaggcggcctccgggagcgggcgccgacggcggcaaggccatggcgagcggcagcggggcttggggcggcgcctacgaaccacgcgagttaaaggaggaggagggcgagcgaggaagaggaacggagggctaccgcgtcgggacagggcaccgtgacgagcggcggcggcgcgggagcaagctctccagcctcgggccggggaaggggaaggagaagagtggccggagtccgcgtcagctcctcgtgcgcacgccggcttcaccagcacgcgcgacggcggagggaggcgaggacggcggcagcatggtggggatggtggtccggcggcaatggcgctgtgggaggaaacgagaggaaacgagtgggaggtcgagacgctgagggggggggctcgggttatataggcgaggaggagaggtcggtttggaggaggaaaaccgacattggcggtcaagggatgcaggggcgatgagctggcggtcgtcgacgcgtgcagccaaggcggcggcaggtgatgatgccggcggtgtcaggcaaaagtggaaaaggagggggaaaaggggggctctgctctttgccgagttggggcgggagagggatgggagcgggagctcggcctcacggttttggcaggacacgcgtggagcggctcgggcacgcgctgcagagctcgcggcaggcagcggggccgagcggcagcgcggcgcaggcgctgacggtggcggcgaccgggcggtcggccacgaccgacgcgtgcgcgggaaccaaaggcggtggcgggaatcggcgacggggagagaggaagcagagagagcgagagagagagagggcggcgctctctctcggctcgggcacgacgctcgtgctctgcacgtgcgaaggggagggggatcaggctgagaggagggatgggccgagggaaaggaattcagcccacaaaacagagggaggaaaaaatagacttttatagggaatttgagttggagagatttggggcttgggtttaaatttcaaatttgagattcgatctcgggggtttagggaggaatcaagggagactcaaggaaaggattcgagatgggaatttgatatttttcggaaatggggacaggtatttggcggggattcaaagggaggcgattgaatttcggagtttgatagccggaattggaatcttgaggtggacgatttgatggcgacgagagggaacaacgggaaattgaattgagatccagggcacgacttagactcgcacacaaagaacgaaattttcgcaattaggattttgccgaattagtttttaacgtctcacgagaagcggagcgttacagcgcacgtgcttaattaaatcaccctagagctaccacatgatgctaagctacccgagtaaattttattcaattgcttgcattagatttatccttcatgtttcattgaactttctttatatagcaaaacacagtgtaagaacatctaagctctcatcagcatttctatttgtggaatcttcaaaaattattttatcaaaactatattctacgtgtatctaagtttggtaaagatcacattgacggcttataatttattaaaacatgttgattcggttagacatacattcactggagtggtttttcaataaaattgagtagctgggtaggtatttgcaataaaataacttatatggtgaaatgtcaaacttcaagtaacttatgaggtggtttttataaatttccctaaagaaaaccaagatttgcatgctaaagaatccagaccttcgttgaatgttctcatggatatacatgatccttcttgtcatttgaatgaatatggctgatttctgcagatggcaaatttggcagattactttaatctagggccgcaaattcacaggtatattatatagagtgtaaaatccaaaatttatattcattgcatctgaattccaaatgcgtcctttctcaactttggatttttcttatcctttcctatttgaattgaaaacacatatacccaaggcatcatgttggtaacttagcttgacattcattaagtgattatttcattactggttacctagcccgctgagcagtttctattaatattaccttcaatcataaatatttgatatttatgacaatatttggtcaaaattttaaaattctaacaagaatctttctaaagaggtgtggtggaaacaatcactgttttttgaatatatatatatcgcccatcaacatttactcctgctaccaaacataatacgaatcaaaagtaatgattaacttcctcatgatcccacttcagtacatatcatgttcaaattgttttgtttagtttcattggcacatacgcacttctccaagtactcggtatttattgtcaattagagaagtagattaggaatcgttatttcaccttcttttattcagttttaagtatatatatatcctaaaattaatagagtaaatgatcttccactaatttgctttgcaatttaagccatgttcttttcatctgattattcattggatcattgaaacaaattattttctacattcttcaaaagatgtgctttcctaataaactttctcctgctacattgtttagacccttgtttttaagctattcgttaagtttaatctatgacaataatctgctcaataatttgcaggagtctgtatgatgtcaggatgaatcttgatgttctcaagtgttgttctacagtgctgttcctggtgtgtttggattacctacctcctgtttttctgttcctattaacttcatatgatctggaaaacaacattgttcaagcaatgcttctttgactgaaagtctgaaacaactacttgtttctatcatttttttccacgcatttggcatctgatgcagcagagtgagaactagtgattgcatagcatgatatgtcaacaatccaacttcgaagtgtgtggggtcattcatagatatctattattgaaattaagaatatttaaat

SEQ ID NO: 22403 - DNA, 4576 bp, Oryza sativa
gaattcattaatgtgtctcactgtctgatagtaggtgtgtaaacgggacgtgtattacccgctatcctgaccgacccgaggcttatgagactggtactggagagtgaaatgaatacttgccattatccatcagaatttgaacctaggagaaaaataggataggttatgttatgagttgtagccgtactattaaacatacaccaaaatctattatgactccacttatgaacatgataaaagatataaatagtccttatatatttatgaactcgcaaatgaatccctagatccatccccatttaacagttgacatgcccaactaatcgggttctctaattgtccctaggcttaatatcttagtactagagataaaaatccgttcttggatccaattccgagggaaaaaaccgggataagtaaatcaatgcttggttttggctctgaagaaaatacaagataggtcaaaaaagagtgctatccgatcatatctgacctgattatacccctatttgatagtataatttattggctaaaccatgaaattcttttgcaggaggataattttccagaactgctaagcggcggtttcctcaacccaaatgatatttcactcgagttcatccaagtttctatttctttttcctcttgtttgggcaaaagaagtctaacttccggccttcgcaccaattctcttccataccaatttgaatggagcttatgtatcgagcacaacgataatccgctacaacttcgttgcataggtttgagggtccgttatgaagtttatctgtatcaagacagtgaaggtcgaccaaataagttgagcatagtggttgacatccctgagaatctcagacaagttctagaattttgtgatgaaatagctgagataacattccggaagtttgggagcaattctgaatggcggcaagtgattaaggaatacgggaatcgtcctagtgtacgcctaaagtgagttacattgctctctgattcttttaaaatgtaaaaataagtgccaagtgttcatgcttctgtgatttttaacaacaacaacgatacttcctctgtttcgtattatatttataagtcgtttgaatattttcctagttaaacttctttaggtttgactaaatttatagaaaaatatactaatatttttaacacaaaacaaatattttatcaaactatagtcaatgttagatttaataaaactaatttcatatattagatattgttaaaattttactataaatttagtcaaacttaactaagtttgtcttaaaaaaaagatcaaacgaattataatataaaaccgagggagtaacaacaaccacattcccttttcgcagcatccccatcgtaggcagcggcgacgatgcgacctatgcgacagagatatacctgaaagaggctagcggcaacatccggaagaaggatttcagcaaggcagatgtcgcagagctggaatttatgttttttcgaggggacatggtcgacgcgttcttctctgtggaactatacgactacaaaaataatgctggtattcggctggtcgccaagaagttggttgtacactgcaggtagcatgcatcactaggctaaacagcagatagactgattattcctcttccttccctctctcctctatttcatcatctctctttatcttccggtggttaaagtggcgactggtgggattaggggtggcatgagttggagacggcggtgacctcgttggtgggagagacagtggccaagagaggtaagaactagccaggcagaggtttgagttcatgcttatcaccgtgttgaggaagtagctgggaggaggtgatccggcctcgagctccactacagcaacacacgtggtggagatgggtcaatgtctagaggccgagcttcatggcggtggtgtacttcgtcccccacaacatggaggccactgagagcgctagccctgtccttgctagagaaccagtctggcgaagggctagctgcctctgcccctctcccttctccctaacaacagcttggtgatagctacacatgcaatagcaccacccttggtttcctagtggaggagaggtttgtggtagcggaggcgaggtaagcggtggcagagttggatcccgttgtcattctcgtggcagcagatgacatgaacaacgacgtgtatgtgccggtggtcttcaagtcagggtgtccaacctagtaggccacatcgcgatctcaggatgccgactctagattccattgctctcgaaggcaacataagcgaaggtggcaactagagttgtcaacaagccaaacttgagcgagcctgcctgtataggctcgacctcgacacaagctcgagccgagcctaatccaccttcgagtcgttaagcaggctcgactcaaattcggttaggtttgcgagctcgaccgagtatatgataatgtatattttgatgataatttttatgtaaaacaataatttcaagataacaatattaaagaaaaggttaggagaacatacgattaatatatgataccaaaacagactaattattttacatgaatctgtactcatttatccttaacctagtcacttgttacacaagacataaaaatcaaacatacatctaggctcatgagaagctcaagctcaacttgacgaaagctcacaagcttggggttgggctcgggcttggctccttaagagctctagctgagctcgtatcaaatctaagacgaaccaagctcgagcagcccacaagccttaagctttttttataggcctagctggcaaccactagatctcgcgctctctttagccttgtcaagctctgcaccatcacccctaccagttgagcaagtcatgggaattgggaaagacaccaccaccaccgctgtcttaggctccagagtctgcggtcctctctttctctccctagtctcctctctctacctcaaagcttggctcgatgcttgccgagaggaagatggcagctagagaggaagaaagcaaagatacttactgatacgtgggttccattgcatttatactttttttttcatatttttcttctggtgctacataagcaccacatgccctagacttagttggtttgaccaaggtcaacatgtcacatcagcgagaaccacaaatcaacgtgccataccatcaagaaagtaattttacactagttttaataattgaatgggttgatatacctgattttacgatatgcatgggcatataaatcagattcaacctacagctgagggagtcgaattggactctttccgcgtgaaacgcaaggcagcaactggttccctgcacgtgaatcctccttaccagaactgagtaagtaaaattttttggcacggtattttctataaagaattttttaatataagtcaggtataaagatgcacttttaaaaaaattaattacttctagtactccctccgtcctagattagagggtgtttattttttgggtttagctcgtgccattgagatacgttgtttctaaggttctatggatagtttcattctggtaccattttcgtttcaaatgttctactatttcgattctattcccaataaacaatatatatgcttgtggaaatagtttgagcatttttccgaccattttcatccataatttgaagccagctgtagagttgtgtggatgccaaccgtagaatttctgtctgttcgatcgatggttgagtcttgcaagttctcttctagctatatatgctgctatggtacaacaatcggatggttaattgatgaatggatgacagggatggatcaagatatggccggaaagcttgattttggcaaaaaaataaggtaggcgatatggatccctagctggctagatccagcatgcatgccaccccttttcatcatctagtcccattgttctaaaaagaactcaatcctgactttgaatccggttacagtgtatgttcaaattaaacctaggattgggtatactcagggttggaaatttcggtcattttggatcccttcgatatgatattttttgggccaaaatttttcaatttttcatgaattttgataatatttgttcaaattcaactaaattttgttcaaattttggaaatttccgaaatttcggtgacgccagatcaaatcggctaaaccgaaagtataaccctgggtatactcacattcaaatctaggattgagtttgttttgggacatagaaaatatttatcaagaaagccaaatacggtactctgcttttatagtactcaaggacgaagaaagccacctccaacgactttagctttacaatgtgcgaaaccacgcaagcagcgtactacgttattaccaaacttttcgatcgaaaagtgaactctgatgagtgagtgggaagaagcagacaatgcaaaacaacctaggcacagcatcactgcatgcagcttctatcacaagccacaacacaccctggactcagaacccaacagctaattcctccgattaattactcccttcgtagtttttttttaccaatttttgaccattcgtcttactcaaaatttttgtgtag

SEQ ID NO: 22404 - DNA, 17386 bp, Oryza sativa
aacttttaagtttttcatcacatcaaaacttttctacacatacaaattttcaacttttccgtcgcatcgttccaatttcaaccaaacttctaattttagcgtgaactaaacacaccctagatatggagttgatctagagctcctgtgtcgaaggtccagtttgagactgtcgagtggattattgccgaagattttgatttgaaaactactaaacatttttttaaaaaaactcaacaaataggtctgaacaatgcagtagagtttttttttcttgagaacacatggtttttaaaaattatagtgcaaataatttgtttgaataatccgataataaaattggtgtttttgtctgattgtacagttttctcctactctattcaataaaattagtgctcgttgattcaataaaataaaatccgataaatgaaatggtgaaaaaaaaggggacggtgcatatgcatatgtatcctctttgtttatttgttgccactggccgccgtcctttcggagcgagataaggcgatgattatgctagttgcccacgtcctccatggaaacttaagaccctgtttagatgggactaagactttagttttaaagtccctatcacatcgaatgtttggatatctatctatctattatatactaaaagtccattaattatcctacaaacgctcctaagccgccatgtggcgtttctacaaacactcttatgttgccatgtggcattttataatctcaccatcgattttcatttaaattagtggacccattattttagaccattggattagatctatttgctttctattgatatcgtgtgaattcgagtgaaaccgttttataccggaaattctcacgttcatacgcacaatggaaaaaaggaaaaatctcacgtacttacgcggaccttaaaaaaaaaacctatatgtactgttcatttaaagaaacgtacttacgtactatataaaatctattaaaaaggtactgtttcagttgaaaaaaatacgtacgtacacgagtaaaaagaaaagctataagacctaaaaaatatatttacgtcgctagaaaaaagatggtttataaaatagtatattttatagtagtaaaacaaaatttattactccacaaatatgataaaaaagtataatttaaaaatatatgtttacagctgtgcgggcattgttcttacaaggtgagactttaaaaagtagatctatctaacaatatatatagtcacttcctattttatttatgcatgcaagtgaagtggtacaggataaaataatatgtagtcacaattttatatatatatttttatatatgattgaatgaatagaacttagaagaatatacattttacgagcgaagtagacaacatatgtcataaattctaattatgatttttatcataaataacacaatggtccaaatagataaagagtgaacgtgcgatttaaagttaaaagttatgacgatctaaaaaatattgttacaaatatttaatttagaaggttgtggttattcaaaaattgttattgcaaatattttcatgaagagaaaagagagaaaaataatcaagaggataatcttcctacgaactattccaaaattattgttgcaaatattttcataaagagaaaaagtaatcaagaggataaacttcctacaaacgcttctaatccaccacatattaccctataagcgttcctagaccgccacgtggcgctccaataaatcatagaaattgtaagaaaaaataaaacatccgaccatcgattttcatttattctggtggacccattatgttcaaccattagatctatcttaaaaattaataattaaatttatttgtaaaaaggctcacgtcatactgccactaccagccaatatacatgcacatagctacctaggtattcctccttaagaaaagtacgtacctacgtacgtacagtacgtacgcaggtattcctccttaagaaaaaatatgtacctatgtatcgtactatgaacgtacacacaccgggtctcacatccttattttttcttttttcttctcatttagattagatggaaaaccaaaataataatttaaaccctttattaattaaatatgctttaagttgtaaaaatatgtgcaatttcgagttgtattcaaattaggctctaatacttggaagatgccatgtgatgctctaataaattggagaaaatgtaaaaaaaaattgtaagaaaaaacaaaatatctagctatcgatttgcacttaaaccggtgaatccattattttcaaccattcaattagatttattcaggtaagccctcgctcctaaaaccagctaatccctctctatgcacgtacatacacaagagatgccaaaaacaaaaaagaagagtgcatatatggttcatcccatctggtagttttctgtttctttcttcgtagccctaaggtgttcctcaaattatacatgtatgtagcgaccactctttacgaggttgacgaagaagccacactgccatagcgctgcttcatgacaccctcgccaattttcttgaaaatattgttttaactaataatgtaaaaggcaatcctaagcgagcatataaacgtgtgcacacccacctttgaatatttcacggtacaaatacttccttcttttacggtaaggatatgaggtaatctatggttagttatgatgatatatgactttttttcagtagttctttaataaataaaaaataaattgcccgcgcaactgcgcgggcttccttcctagttaaacaaacagctcagtgggcaaaacattcgccgtcgcacaagcaaggagcgagactgcggtctcgcagcgcagtgtcgcgccatcctcgcgcaagaccgttcttgacgtcatcgccacctaatttttgtgcaatgtttctgcgggaccgatggtatatttctgtcaaaacaattgcatcccgaatattttttaaaaaaaccaaatgaacagtatatttttaaatttaattcaccaaagctcgactagttttggcttatgtgacacttgcatagtattttacacaacaaaaaataaataaatagtcaaccgtgatctactcacgcatcactcgactaaatgttttacggagtaattctttttctacaactacacaggcaagaataaagataatttacataatggattgtaaattgttaattgccgttgtacgttgatgatgtaataatcggttgcagtttcttatagcttcttgaagcaaagaccaaatgttatatcccaacagagctcatgagtagtactacatcaaaacggtccagacatgagtattaccgagttgaatttgttttacaacttgaatgcatatgaaaccatttagagctaacattcaatctatgtgggcatttatgcaaatcgatcttcctcgcgtcggtatttctttcatataacatagcttttctcacacttttaaaaatatatatactccatccgtgttccacgttagaaagaagatgtttcgatctcttcatcacttagttccattttttcttgtattgacaaactctcctagtcttgggaactccacacatctacaaattccgctatagccttttatatatactgaaattatcgtatctcgtatacactaaggcttatttaaattgaagcatttttttttgttgtactaacatttattttaacgatttaatagtatcatatgggtgatatgtgttgatttgctatcaatttttggccacacactaactaaaattctgtattaattgggcaagccaaaagcttgccaagtgccaaacattcttttcttaagtaaagtatcaaaattttggtatggtaaaaattgactccaaaccaaatctgccattccgtcggggagcacctccggtcgggccccttcaccgtgggaggccaccgctggtacttctatgtcaagcccaacggcgacggcactgatgcgaccgccgttcatcctcattaagaagaggctcaagcacgcaagcccctttgttctttgtactactccctccatcccaaaatgtttgacgtcgttgactttttttaaaaatgtttgaccgttcgtcttattcaaaaaatttaagtaattattaattcttttcctatcatttgatttattgttaaatatacttttatgcatacatatagttttacatatttcagaaaagtttttaaataagatgaacggtcaaacatggtttaaaaagtcaacggcgtcaaatatttaggaaaggagggagtataacattgagaggccgaggttgatttgcgaggaaaatctcggctagtacatcgatgtcggcacggtggtgaccatgctggtgctagctgatcggcacggctgcgatgttctgaagaaggcgtagtgcttcggttttctcaaatctccagcaagtctcagggtagtcattgccactgatggcttcgtgcatctgacatggaactgcacctctgttttgttggagttgactgccatgaactcagcagcttagttgagtggtactcagtgtcttatttcaatggtggttcatgtggtttcttgactgatgttgtcttaaggtagctatcctgttttcgcaatattctccctgactggcttactccctccgtaaaaaaaaaacgaatttagtattagatgtgatatattctatatatgtttagattcgtaatattaggatatgtcaaatttagtactaggttggtttttgatgggacggagggagtaggttttattatgagatagttatatgtatgtggagatgcagcgatagtttccgtttttatctgttctgttatcaattaaggtatttttttccccactaatgaacctgcaaatttgtatagaatgcttactaaggaaatgtcagaatagttttatgtttttcatgctagttaattgcatctccactttgatgttagctcatatttccactagacctgcaaattgttactttctttcctactttccttcactctatgtgtcaataatcaaaatttatatatgatagatggaactagagtctaacgttatataacattgttttcatgaactcgtagtatgacggtgcaaaacagtttgttgccgtcagaggggggcttctgtttggaacaaggaagcgtcacgaaattctctagaaataattcttggtaatagtagttcaactttctttcagggaagattcatggttagctgaactgctgaacatcgcattagttctacattcgctagattattaataaatgtgttcctgttctataagggtacagttgctggggatatctttaacagtcatatttacaagtacaaatctgaaaaaaattgcagttggtacttggtgttgaagaactgaaactgagatgcatccatgagtgcttatcctggattcctgataggctgcattcatacttggtgactctgggcaggctgctgatatacagaatcaccttatcgatctatttgcaatgttaagattcctttgaaaatacaagtcttcctttggtatcttgaacaaatgtagcctagtggctaaaatgacctgagtatagggatgaaaacggtacggaatatttctggattctgggcctgttttcgaaaacgtaatcatccggttggaatatttttggaaacggaaaagaattcggaaatttttttctgaaacggataagaattcggaaatattttgtcggaaacggaatcgaatatgataagagcagtttctgtcagaacaaacaatcggtcggactggaaactttttcggaatttctgaagttacaggtccatacaatacattagtccataatacgtcccaaaccagcccaattcagcataacacctcccatagtctataatacctcccgcaaacctagaaacttttagagtagagagtgagggactgagagagacatcgaagattctaaagccgggtggcagagtgacgcgtccagatctcacgtcgcctcatcccccatcgtctgtttgaagtttttgtccattgaagtttgaagctcagtttgagggttttttttatcccgataaatttttgttatcgtatctgcaccggctcgtttttgctccattttcggtttcaataacactcaattccgttttcgtatccggggtttccgattccgattctaattccgaaaaaaaaattgaaaacggaaacgataaaggtcgtttctgtccgtttccgtaccgttttcatccctacctgagtagtaccccaaggttttgagttgaaatctccatagaagcgaatttcagattggattgtttgtggggctaagttcccaatttaaatggccgcatatattcggtttgatgtagaggccaggtaagaaaataccattatctaaaaaaaaatcttgaacaaaaataatttgctgagtagaaaatgtcaatatgttggattctgtttttttccctgaaaagactattgacagtcaattctttcattggccccattgccactgtcacgtaaaactagcgacagaagttcataacctaagggagaatacatgcataggattggtagaccgattcagccaacaaaaatcaggctcatgaagctatagctagctagtttattatccttccctcctctattttaatatttttttcctaaactaattatttggtcgcaccgttgtattcgttgtaattaaatctttacaacaaaatatcatatgtttcatacgtgataaagacatgtttcagcatgtgtctaagtgtcttcattatgtttcgtaaaattcacgcaactaactacacctaccctgtctcctctccatctatccatgcatgtatgcatttagcaaccttcaaaacgatttttcttttaaactacttatctattcgatcacactgttgtattcgttgtaattaaatctctacaataagatatcacaagattatattttttatgaaacaaatatctttcaattctttaacactcaatgtttcatacacgataacgatatgtttcaacgtgtctccactgtgtttcacaaaaaaatattacttcatgtctagattcattaacatctatatgaatgtgagcaatgctagaaagacttacattatgaaacggagggagaaaatgtttcgactaaattatttgtctagccatgtataactcaatgtttcactagtggtcaactaaaatatttgaccatccgattttttaagaaacaatcaggcacccgatttggagtttcttcctaaataagctaggatatattgccacaactcaccaagcataattatgtgaagttcctagaatgtcaacaagctccttcataagagaggggaagctcctgctcagatgctcgaagctttcgctgccggtgacggcactcaggttcgccggcgacctgagaaaatcgaagcacgccttcttcagccccttgcagtggtgttgatcagccagcgcgaggatgtccatcaccgtgcctatgccaatgtacttgcacaatctttcctcgcagatcagcttcagcctctccaggttgtaccgatccgccgcgacgagcagatgctcgcacatggtgtcctccctctcctccatcgtctccggcaacgagtcggtgtacacgaagtggagcaacgccttgaacaccggcgccgccatgtcaccgatttggatggcatcgttggtggtggtgtcgctctccatcatcatgccaaagagctccgcgttgaagaccggtgaccgtgccgcgagcacgcaccggtgcgctgtgaacctctggccggcgacctcgaacactacgtcggtgcccttctcgttcttgaggaggtcgccgaggtggctatggaggttggacgggggcacggagacgaagccggcagcgccgctgctggcgtcctcggcacggtaattgtcgaccacgatgatgtcgcaccggatggtgaacgaatcgtccctgagatactccgatttctccaaatcttctctcctgatgaacttggggtaaccccaggaagaagacgaagaagtttgcttattgaacgctcgaacggtcttccatgccaaggacggcgcctgcttctcaacctggccggcgaagcaaatctggaactgagccttgacgttcctgacgacgatctcgtcgagcacgaggaacatggagatgtagtccgcggcctccaggacattgccgttggggtagtagcagatgcgccagcggtggccgccgacggcgaactggcaggagaagagggcctcgccggtgggcgtggccttggtgtgcgagtagccgtcgatcttgaggtagtggtaccctctggaggtattggcgacgatggcggacgcggacacggcggcggcggttgtcggagacaatgctccatggctcatcaccggcggcaaagtaggcccgtcgcttgttgctgctgctgctgctgatttgcaaagtttagcgtggggtggggaagattagctgcggaggaggaggaaccgaggaagccggaaggagaaggaaacgcgacgacgacgacatccatggttcttgatgccaatgcaggtacgcggtatataataacgtctttatccgctgctgtgtttttaaaatctcggaatttgcgttgtcgccttgtcgggctctgaatcatggtctcatgttatttttactgtgccctgatatgtttgcgatggaatatgagagaaatacgagttaagcttttgtatttacaagttttctatcccaatacctatacatctttcgaaagatttttatgatcgtatcacacagatttttaatctttggattaaaatctgatagatataataaaaagcaaaaagcaattaagaaacatcataatggacactaaattaccatatccttaataaaaagaccaaatccaatacaaaatttaaaatttacatgcgaagattcaaaaattacagtgtaacttacaaaagttaccgtgtaagtttcataaattacactgtaacttacaagaaaatgcactgtaaatttgagtgagaaaatcgagtgagagataaagaaaaaatctttcgagtgagatatagcaaaatcgatcccggtttatcttattgtaggtttaatggagagttggagactaatagagaggttggagggcaaaaactccccttttaagtccatgttttaattgagaccgatgaagaggccatatggactgcgggccgacggcccagcccatggcatggcgctttggcacggcccaggcacggcatggtctggcccgtgccagccgggcctgatagttggaccatgcttgggccgctgccttggcacggtgggttggcctggcacagcacgaaagtcaggagacgaataaacttactgtcagccacatgtaaagcgagaaatttgggattataccatcgcaaaagagtggtttcgctggaatcccatcgcttcaaactgattcactggaatgccagtttaggtgttcactaaaataccattttcttttcgttcttatctatgaatagaaatgtttttctcaattttattttcggagaagataaatcagttcaaagaaggtaaaaaccaagcaacgtgcagtctatgtggaggttcaactgacataactatctgttggctaatggctacagtaaagttattgctgatcaaatggcagagttgtagtctcgcagatatatacaatgaattaacaaaacagagagaaattttgatgactactgcataaagaatcttagaaacatgatatgtttgtcactgaactaagttactgtcacgtcctatgggccgggcttcaggcactgggctttggtccaggcaaacagggtgcatgcctttaaaagagaaggaacagcaacagatgaggcatcgatgaagaaatcaacagaactaaagccaaggcttcttcctcctccaatttcctctcatctctctgttcttccaatcctagtttctgttctcttattcccagtcccctgcttctcttcccaatctacattgctaattcctctcaattgtatccaaattacttgagtgattactgctatgaattatcggttgcttccggtgttgggcattgatcggtgggtgggttgaggatcgtgacagttaccgagcatggcaaccaactccgtcataagagaagggcagctcctactcagatgctcgaagccgtcgccggccatggcagctttcagattttctggagagctaaggaaatcaaagcacgcatttctcaggccatcacaatggtgctgctcagctagcgccaggacggtcgccaccgagctcacatcgatgcgctcgcatagcttctcctcgcacaccagcttgagcctctccatggcgtacctgtccgccgcgacgagcaggtgctggcacatggcgccttcgtctttctccttcatctccggcaacgagtcggtgtacgcgaagcggagcagcgccttgaacacctgcgcctccatgtcgacgacgcggacgacggccttcctgcggctctccttcattgagcctagcagctcggcgccgaacaccggcgaccgggccgcgagcacgcaccggtgagcggtgaaggtcttgccgccgaccttgaacaccacgtcggcgcccttctcgccgaggaggagctcaccgagatgccggtgaagatcggacggcggcacgctgacgaagcttccagttcccctcgcaggggttcttcttctcgccgccgtcgcggtcgccgcctcgggcatatccttcgcgacgaactcggtgatgacgacgacgtcgcaccggacggtgaaggaattgcccttgagatgcctcgatttctccaattcctccttcttgatgaactttggttgcccccaactggcatggctgaagaacttgttcgcatccagcgacggcggcggcggcggcggcggtaatttgtcacccaactcgtcgtcgagcagacgaaactggagctgcgcgtacacttccctggttacttcctcgtcgagatgaaggaagagggatatgtaatcgccgcagttgggcgtgttgccgttggggtagtattggatgcgccatcgatggccgccgatggtgaaagcgcgggacttgagggcagtgctggtggggaagagatcccgggtgcgcgagtagtcgtcgatcttgaggaggtggtacccgctggccgtgccggcgacgatggtggaggcggatcgcgacgacgacgacgacggcgtcggcccgccgccgctgccggcggtggtgccagagcgtgcgggagacatggcgcactgacccatgattgctagtgctactcgcgacaagggtttgtagctttttaaaaaaaaaatcaagaaatattagtaacaatgttcctttcttagattagattgatccgtgactatgcttcttcttttctttaattttcaccagaattatatgtgtctctgtttaccgtgtacaactgcaacattggtgatttttccgactcggccacgtgaattttccgactcggccacaaagtttcccttgtgtattactcccttcgtattttaatgtatgacgccgttgactttttaacaaatatttgacatttcgtcttattaaaaaaatttatgtaattatcatttattttattatgatttgatttatcatcaaatgttctttaagcatgacataagcatttttgtatttgcataaaaaaaattaaataagacgaatggtcaaacattggttaaaaagtcaacggcgttatacattaaagagataatccatgaaatgcaattgacaagcatccaaatcccagaaatgccatcgacaagtgtgagttctaagaaatgccatcgtacaaacaactttgtcccaaaaatgccatcgccggacaaaatcgtttgtacgatggcatttcttggaactcacgcttgtcgatggtatttctgggacttagatgcatgtcaatggcatttcttggattatctctacattaaaatacagaggaagatgtagttagtccagcatattcccaaccaaatcctgtgtctttcatctcgttcgtctcgagcaggcggttaaccttgcctgcctgcctgccatggctactgccgtcagccgcggcaccgcctcctccattgtggccgacgcggtgaccgggtaccacctcctcaagatcgacggctactcgcgaaccaagggcactcccaacggtgcagccctcacgtccgaccagttcgtcgtcggcggccaccgttggcgcatcagatactaccccaacggggacatcgccatgttcgccgattacatatcatttcacctcatgctagatgaaaatgccaccagcacgaagggtgtgaaggttaaagcccagtttcagatttgtttcgccgatcaggtacggagagagattctaatactcaggtggacgtccactcgagctgttaaaatagttttggtgacgagtaagaacttttggtgacgagtgctgtcatctagaccagtaagaacttttggtgacgagtgcttgacttggggtcatgtgaagttgatcaaaagggacgaatttgagaagtccgacgatctcagggacgattctttcaccattcggtgcgacatagccgtcgtcggcgagatccgcaccgagaggacgacggagatcgccaccgaaaccttcgtcaccgtgcctccgcgtctgacctgaaccagaagctcggcaaacttctggacaccgagaagggtgcggatgtggttttcggggtcggaggcgagacgttcgccgcgcaccggtgcgtgctcgctgcgcagtcgccggtgttcagcgcggagctctttggtccgatgaaggatagcgacagggcaggcgttgtccgcatcgacgacatggaggcgcaggtgttcaaggcgttgctccgcttcatgtacaccgactcattgccggagatggaggaggaggaagacaccatgtgccagcatctgctcgtcgcggcggatcggtacaacctggagaggctcaagctgatctgcgaggacagattgtgcaagcacgtcggcgttggcacggtggtgaacatcctcacgctggctggtcagcaccactgcgacgggctgaagaaggcgtgcttacattttctcggctcaccagcgaacctgagtgctgtcctcgccggcgacggcttcgagcagctgagcaggagctgcccctctcttgtgaatgagctggttgccatgctggcgcctccaatccctccatcgagtcatgcttaatgtgttcttggctattagcaacggagcagtggtaattagtggtttctgtttaggcttttgttctcaggcaattgtagtatatactgataataattatggagacaatgtccctggattatattggtaagagcttgcattgtggaacatgggtgttatttttgtaattcttttggtattcggtaaaaggtagacaaatatgttgccgtatattcagaatagtgtttgcaatttcagcccaaagaaaaagagcggactcggccccgtatcgtcctttagggcgacacgggcggcaaccctcacccgcgccaccacccccacccttccctccctccctccctcgctaccgcctaagcatgccaccagaaaactgcgtggctacaacaacggcagcagcgacagggcctccttctcctcgagttcgcagaggatccagctgcagtggctacaacggcggcggccgaccatatccagggggccatggcgcccgggtggtctcttaccaccgacagtccagctacgatggctgcacgggcacgaagtttcttcaacgcggctgcagctagggtagcttcggtggtggtggtgatggggggtgacggggacgacctcgatggcgagtttcagtgtcatacaatggctggcggtcgaatagcctcccctccattccctcccctcatgcttggccgcctccagtagggagcgcagcagggaatgcgtgtgggctagctaaatccaagggtttttggcgactgcaattctgcggtggcgatggcgtcagctaatggtagtgtgcagggaagcagttgagtttggtggtgacttgtccccctcttgttagccaggcatcattctctcctgggagcacctccccttcaatgtccggactaatctagatctggtcgtggggagctccaagggaagggtggaggcacaactgacacagcagggaacaacgatggcgtggaggcggcagcttcctattagcccgcttgtgatagcgggtggtggcttgggctttggtggaacgattttttggtttgtcggtgataattttacggattggttgtgtggggctagacggtgaatcgccggcaaaagccttgctaggccattggctagcttgacaacgacgaagtctttaggtgtcgttttccttcttggaggcgttgttcttcctccccctacatcgatctccaggtgaaattgttccgatttccagacaagtggtggtgatgtttcacgatgtgtcctccatgggggcaccactttggagaaccttactcatggtggtcattgtcggactgttgcatcggctttgaagctcttatgccctagcatgcttgacgatgcctttatcttctttgctctgcttctttactatgcggcggacggtcacctccctttgtttcactctgctaggtggagttggagctattgcattgggtgtgacgaagcttagaaacgatgacaccctgcaacctctttctaagtattggtgcccgtagtgtgtaggaggtggtgctttgggtgctttggctgatttccaatggaaaaggccggatctgcttgtctatttacacgcctattgtgaagtcgaagttgttgtgtcgctaggtggcaaacttggcaacgacgacactttcttgcaaagtcggagcagccctgtcgcttatacaacaagcttagcaacgatgcccgcattgggttccgtcgttattttagttgttagcaggctagtgtgggtgttgttggtggagtttcgtggtagtcatggttttcactcagttttccctaattaactgtgcattgtgaggttgggtctcgtttctccttaaaatgggacatcttcttttatataaaacgtctgcaacggctaaaccgttcgacaagaaaatttcaatcaaaaattaattttggcaattttggacgccctatgaggctatgccccctctcctgtgcaagacactatttcgcccaaaattttcaatttttttcaatattttgtgagtttagtcaaattttagtttgatttgttcaaattttttttaaaaaaaactctaaaatatgcaaaacgaaattgcagaccttgatccagaatagctgcctacctcgtgcctacctcgtgactcgtgaggtatctatactataccccactaagtgtaaagctcaacatgcatgtaaccatgccacatcgtcactgactagccataattacatatttacttccataaaagcatatccaatcatcacccctcacatatttgcacaatattttaacaaatctatctataatttttataatatttaacataaacttttcaatatgtttcccataaaagcgtggatttcatttgtttgtttcatgataagttgataaaccctgttggttcttttttttcttttttactcctaacttgattgtcgaaaaaaatatattgagaattgctgagtaattgtaacaccctgaaaattcccaacaataaaaaaaatcactaaaatttcaaactctttaaaacttttgcatcatgctggttgttatgattgctattgcttgccaaactgtaaataattacaaagaaagcaaatccaaacaaagggaaggttaattactaatttaatttatagatcaaatattaaatattcgaaccatgttgatagcttgatgtcatgattagctaaaagaaacagtaaaatcaaatctaattcatttgagtccaatctcacatgaaatataggaacacatgaaatgatgatcaccactataatgatcgtgtttataaataagtaattcacaggaatatatagattgatacttagaacatttcaccgagttcctcatgacatgaaaatcactcatataaaataatggtcatgtagataaattaagctttatatataaataagaatatgtgagtgtttaattagacaattagattaatgttgtaccgagtctcaatttatatttatagaattactagatccacgtaaaatatattattgtacaaataagttcattcaatgtactattgtaataataatggccacattaggatattttaattaattttggaaccctcaaagcctccaaaattatctaggttaattttggaattatacctcatttaaataatgcaatagaaaaatatatataaaaataaaatatgggtaatattagaaattgagtaaactttcatctaaattaacacatctattgggtaaacatcaattgtgtgaaatttagaatttatgggacaagatttgaatagcaaatcaaccaaataggaaaacccaggaaaatatataataataataagaattaaccctaattaaaaattcaaataaattatataaataaaatatgagtaatattaatctagaataaatccattggttggaatgacacaaacattgagtaaacttcatttatgcaagatttagaaattatagaatcaaatttatatgggaaataaactaaaatcgggataaataggaaaaagacactgttcattgcactctaggtgttcgacgaggctccctagccccttcccctcccctgccatgcgcgcctcgtgccccgagccgtcaccatcgccgcctgccgccgtgccgctgtcacctgccgcgccgcgcgccgctcggccgtcgccgtcacgcctcgcgcctcgtaccaccgcgcgccatcgccgttgctgccgctcgtgtcgccatcgtcgtcgcccgcgccgctgccgcgcgacagctcgcgccccgcgccgcgcgccatcgccgtcgccgtcgagcagtcgccgtcgccgccttgagccccgcgcgccatcgtcgtcgccgtcacgtcgtcgcctcgcgccccgcgcccctgccccgccgcgcgcccgtcccacctccctctgccgcctacgcgccctcgcgccccgtgcactgccgcgccacgtgccgtcccatcgcgccgctgctgcgtcgccgtcgttctcgccgcgccgagccccgcgccgacgtcgcgctgtcgccgtcaccgtcgcgtcgccgcgtgtcgccgtcgcgtcaccgatcatctcgagccccgcgccgttgccgtcagctgctgcgccgtcgccatcatcgcgccgagccccgcgctgcgcctgcgctcatgtcccgtcgccgctcgcct

SEQ ID NO: 22405 - DNA, 13686 bp, Oryza sativa
atggaaccctcacacgtcatagatgctcacgcccgcaccaatttggtcggaaaccctccgtatcgccctagcacctagctacccgtgcccggccatggcggccgtgcggcgccgctcgcccccgcgccgtcctacgccgtgaccgccggcaggtggacgccggagccttgccgctccctcccctggtcgccgtcgggtcgccctccgccggccttgccgcgcgcgctgcgccgcccctgctgctcccgcacggtctggaggtagaagacgataggaaaagaacgagagagagaaagagagcagccgagccactgacaagccgggccactccccatttttctctaacaaaaataattcggtagaaaagataataagacccctgaccccacccgtcagtgactctgagctgtagataggtttcggattaaaataaatcggatgtgaacagtactgtttcgcaattattcgaatttgaatccttacactagcataacttattcattttaactccgatttgaatgaaacttgatcctaaattcatctaaattcataagctttccaatggtatataattcattatttaagaaaatatattattaattactaaataattaatatcaagatgatgcatagtagtcaacttaaaaatgtgctaataaatatatttgataatgtacaatagagtagatgtaataatataggcctttaacatgctttgtcactgtagcaaccacacaaactaattttaaataatgtctcaaactaatgtattggaagatactagcactatttaatggttgtattattaaacccatgacttatagattatttaaataataaagttagccttataattaggtaaatcaaacatgaatacacatagatgagtctttaatttatttatgaggaataggaacagagttggtatgatagaaccacccaaataaggttgagtcggttaacatccaataattacccaaacagtaaaatcacttgtcaacccacttagatcacatatactgtacaatccatttaaaatcatacataggaacaataacccatcttttgacaaacatgtatattagataaatactagttatatattttgacctcatataattatagttcaactgtaaattaggattgttcattaagggataatatgtaaccacaatatgattaacctaaacaactctaacatagaaagcatggataattattaaccttttataatttattgcgacaagtgaaatatgttcataattaaagtaaagcctccatcaattaaataataatacaaatgattcattatttgattgatcctaaatccatccgacaacagaacctctagtatacgaccattttatttagatagatgcatgtgtagccataatccttccatagccattagctagactacaccacatattagccagatacgtatctcatttatactacattggctagctcctgaataggccacgttgacaatagaaagattaagaaaccttagcccctagcgagattggaatccattagcagacatgaatagtatattttgttgtgcatatttggttgttatttgaatattggtttttcttgcgtattatagaatttatgtatcggttagtcgtgaggcaacgtcagcaacttccaggaggtgaaggttgatcaagaattatatcaagaataaggactagactgagcaaggcaagtcatcactattcctcgaacatgctgatcctaattgcgaaattgttttgtttacaaataaaattgcatgcaatgatgaacatcctacttgtgattatgccatgccttgattattgtttacccttaaatctttgtaaccatgtttacgtatgagtccctagtcaactatgacaattgcttagaaatgctattctagaatcatgcatactcatatttatcaaatgctatatgcttgggcaattacctttgggaaggtaattgagatgcggcatgtggagacatgagcgccacattgccatgatgttgatgacatgatttgtgaaaggagaaataaaattaaacaactgtttttgactggggcggacggaggatttgggtggtatctggaaaaggctagtaccgtccccggtcaattaaggaccgagccatgaagttaagcatgaaacgacccccgtacaaccgtacttctcgaatgggtatagacctagcggattagatagccgagcggaggcagtatccctgcatagatggttcacccctgagtgaggcaggtgcgctacgatgggacagccgttgaggtagggccaagaggcgtgccctacatcggtgtcgccattggtaggactgccatgagtgtgtgagagagagaacttaacttgaaccataatttaatatgtttgtgagacttctctttcccgggagcgccagaactcctctcactgctaaaaacatggacgcctagagtgcatgaggatttaagttcatggagcgggtactgccaatgcgaggttatcgaaaagctttgccgtgacgcgtctcatgtgttgggacgaggctcatgtgttgggcagtcgcggagtgcgggtaaagtgtacatccactgcagtgtgagtaaaccaaatctattcgaatagccgtgctcgcggttattgagcaccgggacatgtattgcacttggctagactccaaattcttaacttgtgggggatgggatattgcatgatgaattttatgctgatggagccacatcccgagaggagggaaggtggacatcctcagaaaaccatgacgattcaatggcgggaagctatccttgggatcacaatggatggtggacagaactgtcgttgtttaaagtgaacactggtactaaaatttgatcagtctatgctaggttttaggcttgtgaaaagaattgtaaaaattagctttatgcaaaagaacctgaaaccattccttgaataccctctatcatatgcattgttgttgtggttgctgagtacggttggtactcacccttgttacttatatatcttttaggagagtgttgaagagaagcccttgtcggtacgcttgcgtatcccacaagatgatcggagtgcggtcttgttctaggtctcgttccccagtcgactgcctgtggcatgttaaccgggcccttatattattttgtcttccgctattgttctctgatagttgttggcctacctggccctaatgtaagtgtttaactcttttagcctaaattcattcgtgatatgttgtgatccaactatgtatgtgtgtaccaactactgatccagggattggtacggataaacacagaagatttccgattttcaaaatcgggggtctacagtaatttctgcagcaaagcgcagggaatagagctttgtgtccaactgctatcatagtaatcgtttgattgtattattgtaggattataaattatttacgcaaatatgttggcagtatatctatgagaatacacaaaagccagcgctaactaatatagctatattatgagtaacaataaagtcattattcctgatttatttttgacaaaaacaagtcattattctcgattaattgggatagttgtagatatgccatgaaaagaaaacagagaatttcttaatacttctactgaaacaggaatctatttatctatctattatattattaagacaacttgaaaggaggcaccacattcactgttgaggctagaaattctcacgttaatcgaaggaaaacaaaaaatattaaccattagattgtgtttgatctagatttaaacggttaagatttaatagtacttgaaaagttttggaaacttgtaataagtttgacatataagaaacggacacacgtattagaaacggacaagtacgttagtccattatttacaaaggtagactcacttttccatgtcagattatgtttagacatggctacagcacaacagcatgacactgatacaattcgtaaagataaaagttgacagtaggagtaaaaaacagtcaatttgtattcgttgcacattatgtcaccctaatttctatggactatggtgatttaaatattctcatataaataccaggcatcaataaaattgtcaacacaatatataactattaagaaacaatacaatcagcaaccgacaaaataaaatcctaatgatgattaaaaggaaggacgatgggcgggtcgtaaagcaatcggtcaaggcggttggtggaacttctagaaagtaaaaaataaaccctaattacaattatatatgatttttaaaatttcaatgacaatataaatgagaggcagtgggcaggtcgtataggagtacaatgacagagctgccgatggttggtgggacttcttgaaagtaaaataagaatttcaacgatagttatgtttaactttttgaatttcatgataataaagagtaagcggcgaacgggtcatagaggagtatattggcagcgtttgacgagatttctaaaaattataaaaaatgaaacccaacgagacaataaactcaaaaaactataaggtccaatttttaaaggttcaggcttctaaaacgtaaaaaataaataaaccctaatgataatcatgtttgattttaaaatctcaatgataataaagaagggatacaacgggttagccgtagaggggtacagtgacaaagtcgctgacgttttggcagaacttctagaaagtaaacaatgaacctaaataataattatgtttgatttttaaaataccaatggtaataaagagaagaggcagtgggcgaccatagatgagtataatggcagcatttgacgggacttctagaaactataaaaacgaaacccaacaggataataaactctaaatactataagattcaatttttaaagattctaaggagaatgaatagaaacagtgagaaggatatgacagaagtaaggggtaataactggtgtgacttttaaaaactataaaattagaagcacggggatgataaggtttggtctttcaaagttttaagataacgagataactatttaataaattttaagtaaaatcatattaaaaatatataattttatatgggtgctagccgcgcaattgtgcgggccacccagctagttatctgatgatgacacaaatgctcagaaatccattgacaagaatactgatgtcactgaattaagttgccgagcgtgccaatcaactcattcacaagggaagggcagttcctgctcaaatgctccaatccctcaccggccgtgacagctttcagattctcctgagagctgagaaaatcaaagcatgctttctttaggccatcacaattgtgttgctcggccaactccagtatagtcgtcaccgtgcccacaccgatgtagctgcatagcctctcctcgcacattagcttgagcctctccatgttgtacctgtccgccgcgacgagtagatgctggcacatggcatactcgtcctccttcttcgtctccggcaacgagtcggtgtacacgaagaagagcaaggccctaaacacttgtgcctccatgtcgtcgatgcggatgaccaccgtggtgtcgctctccttcattgatccaaacagctccgcgctgaagaccggtgaccgggccgcgagcacgcaccggtgagcggtaaaagtctcgccaccggcctcgaacaccacgtcggcgcccttctcggcgcagaggaggtcctgaagatgccggtgcagatcggacggcggcacggtgacgagcctcgccacctttggctttggagaggtcctcaccaccaatggcgtctcctccgagcggatccgcttggtgacgacgacatcgcatctgacggtgaaggagtcgttcttcagatacttcgatttctccaactcttcccttttgataaacctcagtcgtcccaacccaatgttgttgccaccaaaggtactgacctgcccgaggtcagcgatggaggaaggctgcagttcatcatcgtcatcattatcaccggcaaactcgtcgaataaacggaacccgtgctgcgcgtacacgttcttgtcggtgacaatctcgtcgagatgaagaaacagggagatgtactcgccgcactcctccgtgttgccgttggggtagtaatggatgcgccattggtggccgccaatggtgaacgcgcgggacttgagggcactgccggtggggaagatgtccctggtacgcgagtagtcgttgatcttgaagaggtggtacccgctggccgtgtcggcgacaatggcggaggcggaggacgtcggcggcggcgcgatcggcggcttaccgccggcggcgccggcggtggtagagcgcgtgtgagacatggcgcattgacccatggacggcaaggtgggctcgtcgtctattgcttgctttgctgcttgacgctatagctgctggattcgcgtatatggttaagcgctggagataagaaaggaactaatgttgcaaattaaggtggaaggagacgcaacgagagagacgagacgacggattcacgacagcaaaagtttttcgatatccactgtccagtgtgtccacgcatcgtatcacaactctcaggtttcccccttttgtttatttaaaaaactcctctcagctttccgggttttttctttttttttgttaaacaactcctctcacgttgatcggtaactctagttccttttcatactacaaaagagctttctatgatttgtgaatgcggttttaccactatacgtaaacaatgtgggaatgttgattttcaaaggcagttcagctgtaaaagtccaatttttacatgccgtccacctaaggaaccgttagggaaaaatcaatttttatgtgcggtccggcctaaagccgtccgtctgcacaaattacttttgagggatgggtggcttattctggaaatgattttagcaagaaaatagttccatcgcaattaccaattgctaaaaaatataattcaacaactttaattcaattcaaacacacaacagtttggatcccgttacacaaattcaattcaataatttggatctagttcaacaatttttggttcatacgtatataaaatcagatcgcaaactcacatatacaatcgtggtggaaaaaagggaagatctatgcacccaagcccaccgtcgtcacggcatcaactgctactggagctctcgaggcctgctgccaccggatccatcgctcgcagtgcccgtggccaccagatctgacctcctaggcctcgctacatcccaaccttgcctttcttgatgtctcttcttcactgctattcaacccgtcaacaaagttggatctgcctgacggttgaacaggtggaagaaccccgccatgcgaccctggtccattcgccgctgttcgtcctcatccgcacccatcaccatcgtctctctccccacctgcttctcgcctccttcgtctcctctcctctcccgctagcccacgactttgacatcgatggctgcgttgcgcacgaccatgtggggaggaggagcgacactgaatcagctatcagcagctcaacgtcgaacatggcaacgacctcctcgatggtgtcgaaggtgccgagccacaaccacttctggctaagttcacggatctatgccgagaacctgcctcacagacgccgccacacgccgcattttccgtttcaggatgtataaattatttaataaattattaatagaatttatattaaaagttcattaatttacaagtgaagttaaataggggaaataatatttcctaaataaaaaacttggctggacttaatttttattgaattctccatgattaattatactatctggaattttctcggattttttagagcttaattattaattttaataatacaaaagaagagttcagcaattatttcatcaataaattaatcattaaatgatctggttttaattttgttaaatactttgagtgtccaattattttcaggatttttcttgaaattatttgagtattggaagtatttttaacaattgaaaaattatttcattttggttaatttaattggaacagttaattaaatatccttttccttttttggctgaaactggaaaagtctatatgtaatcctcagccatccgtcctctgcgccgtctgctctatttccgggacgattttgctatatatttgtcgacaaattttttctcaaaaatttaacagatgtaattgcagtacaatcgtagtgtaattacactgtaacttgtatgtaattacactgtaactatagtgtaacttgtatgtaactttcaaaaatctctttgtaacatattattttggtaaaatggaggtcgtgggaacaaattcttttacatatgtgtgtgctatgatttgttttcttcctcaccaaaacaaatcgtgtaatagatcaacgattcaaaattatgtgaaacttacatataagttacactgtagttacatacaagttacagtgtaattacatataagttatagtgtaattacactatgattgtactataattacatttgtcaaatttttggggaaaaatttgtcgtcaaatgtataggtagtccctttccgggaagtctatttcttattcctccacttctttgcttttcagccagacaaaagtctgttttgcctccctgtcgctacagtaccttcttcaacctcccgccgcctctctctcccgtgcgtgtgctgtgcagccgccgatctccttccaaaatccggtctcctcgttgctcctctttccaaattagttgcgggaatggaatcctctcaatctcctcttccttttccccaataaatccccaaaagtttctatggaaatcctttctaatttcgcggatcaatctttccttttcccgggcgaggatcctaaactttcccggagtttttcccgtcgatttgggcccggacccgagctcgcgtgcctatataaaggacccgctagtcgtcctctgcctatcccctcaagtcccgtccttcgccgagccctagccgcccctgcccgcgagctccctctctctccacctccggccgccgctccagccgccgtgcgccgtcgcctcggccgtcgccggtcagcgccgacacctccctcggctacacaaagtcgagctctaccccggcctctggttgttttgcgccaaatcccaccggaggttgcccgtcgacgtgaagtggagcaccgccgtcgccgccgtgcctccagccgcgccgttcgtcgtcgtccgtcgtctccactggattcgcagctgcgaggagaacaccgtccaccacctcttcttcgccaaagatcgccggaacaccgtcgccatcgttgaccagtaccacgtcgcccttcggagctcatcgctggccatctccttcgcggtccgtcgtcgcgtaagtgttggtaagaatagccgtcgccttctctacctcatggtgctctccatttgcatcatcatgctgtggttcgccagcaaccgctgttctcgtgctcttcgattaagatcaatctaagccattcaatcttggtcactttatgtcaagagtagtctaagccgtccaaaatcgatataaatccgttttttcttttcagtggcatattatttcttcttaataaatgtcatgtgccagcatctactcgtcgcggcagatcggtacaatctgcagaggctcaagctgatctgcgaggaaaggttgtgcagatacattgctgtaggcacggtggggaacatcctggcactggccgatcagcaccactgtgccggtctgaagaaggcatgctttcattttctcggttcacaggcaaatctcagtgcagtcatcgctgccgatggcttcgagcatctgagcaggagctgccccactcttatgaaagaactggttgctgtgctgtcacttccactgaatcatgcttagtgacatagtgttcatgtgttctaacaatggtagcatttagtttctgaatctgaacctttgtcatcaggtatttctgttctcttttagcacgtgggcatgcagcttaactccttcagataggcttttcttaccaacttatgatgtacatatcaaattatgactacatctatcctaagcagaagctaaatcaaaatcgattgtcacttgttacctggttttaaacttccatttggcatgcttgatttggatgactggaagggataatgaaggagtagccaatttcatctctgttttgattttaatttatgttatctatatgattattttgatattagatacctattctcagtttttatattagagacctgttctcaggtactgcttttgtctgataatttcaataagttctcctggtcaggatgggactagattcatggtaggtccataaaaaattgtcatgctgatttaccttctaaatgttagatacctgttatcggttgtatctgtttgatgatttaaataagctctcctggtcaggttgggaccagattcatggttcagtcttgtacaggtacatataaatgagtcatgctaatttcctttttaactgtatctgggaaaccaaacttccttaaaaaataatggttttgtcatggtttctacccaagagtagtgtatcgactagagataatttgaaaaaataggctagcagaatcccggcacttgtgtcttctgtggttctgaagacagagtatggatcattcattctccaggtgccctgtatatgttggaagatatcccctccatcctaaaaaaaatccaatcctatctacaaatttggacatatatgtttctagattcgtagctaagatttggtttttttctgggacagagtagtagcttgcaatgctttcgatttttgctcactttctaaagtgtggtaaacttgtcaggatcctctttctccaaaacaacataaaaaaacctaagttatcgttggctttacaccaatttgctttggtcaatcggaacaaagaaacggttattttttttcgtcctaactttttttagggagattaatctgatcatcaggttgtatctcccctctgcacgtaatatttttgtcatgctaactactacctccgtcccaaaataagtgcagccatgagtttccgcgcccaactttaatcgttcgttttatttgaaatttttttataattagcatttttgttgttacaagatgataaaacataaatagtactttcctcgtgacttatgtttttaatttttttcaaaaaattttcaaataagacaaatggtcatagttggacgctgaaaactatggctgcacttattttgagacggaggtagtattttgtaaccgtcacttcattaattgtcttatgctgtctatttctccctctggtcattaacatatgacgtgcagacatcgatatattgttgtccagacatgtatgggagaagcttcttccaatctgagatttaaggggttcttgattttggaaaagcctacacagaaccaaacattggttttcagggggatggggacttggaatttgggagcttgaacacatataatattcttgtggtctgataaccggttgggctcttgctctcttaaaatccagtaccctgccatttatctgatctgcaatcagcaaagcatcctgtttgctgatgccctttctctgtagcctgatagcctttcttttaggagatcatttcttttagctgggtaacattatttctagggcttccctttctagtgagggaaaaataattctttggtccctgacaaaaataattgcgacaccacaaaacccaatattgtgctctctgcttccgtggggctgaggatggtagacagcttgacatttggctggctagtagacacaggatcctgtcctgccttttgcctgatttgcaatgacctggaaagtgacttatcttattatctttgatgtcctattgatgttttcttgggtttgttaagagatgcaatgggggtgggctcagattcccagctactttgaaaagtttgatgttgacttctactcttaaaaatcctaagatttttaaaacaaaaactgctttttactccactaacaattgcttttcgtgttgtcttttattttaagcagagtagcatgttgaaacctggagaagaaactgtgatgaatgaagtggtcaacaagatatttcgggcaatgcagcaacttcagagaggtcagtgttgttttgtcacgtcagcttgccggacgtgggaaatttaactataaaccactcttgtgacatggcaattaacgatttgccacgctctgtcaatgacacgtgggccctcatgtgtctatgacatgtgggcctagtggcaaatcgttaaggaccattcgtaagagtggcaaatagttaaaagccccgccggacgtagctgaaagattcagattttgaaaataagttttggagggtttatttttaaaattaaattttaaaaagattaaaaaaatcatgtttatcagctttttgcggtggtactgataactagctgatggacactagcgacattgttttataatatccaaataaaatgaagagagaaacagtcgcaaaaatacgatattgcccttgcatgccaagtccagctcgcatacagctccgacaccaccaccacacccgccgccgcacccattgtcaccgtcaccaatgaggtggctcttccggggggtttgagggtggcccacgccgccacgcgcctgggctcgtggctccgtgtcattcccgcactcgtcgctgctacagctcgaggaccgcgccgatgctccaccatacgccacgcttgcaagcgagcacaacgtcgaccacctcttggttcatgtcaagcagggtgtcaaagagcgcaggcggtcatagtcggtctggccatggcgccgctgtcgccagcgaggtggctctctggggattcaagggggcccgcttgcctaggcccgtggctgccccattacataggcccgtggctccatatcgtttcagcacttgtcgttgctacagcatgagggccacgctggcgccggaaatgtcgtcgcctccatgtcgtcggagctatatgcgagccgcacatgacatgcaagggtaaaatcgtactttcacggctatttctctctatttccaacagctaattaccagttttttgctgtgggacagatacatggtcttgcactgtctcctaactaattactttgctttttcgatgtcctgtaggaaattttgccatggtaaaagtccataatctgatagaaaagtgcccgcatatcttaactaataaaaaaattgctatccttcctatcgtcaacaatttttcgtccgtatgtgcgttttttttcactttccacctttttttagcgctgctttttttaatcatccaatcggacagaaacacagatcgagaaccctagaaaaaaggggcaaaagagaggaaaaaatcacacaaatgggcaagcttagagtcgccagatacggttgttccgagctcattgccatcgtcgtccactgcgctcgtgtcgtgcccgaaccagccgggcacgaccacacttgccacctccccaaccgcgctggcacccctttcctctaccacgacgccccatcctctggcgctctcctcttgctttaaggcagaggagaagaaagaaggacggccgtcgccactgtctccgtgcctagccctgtcatcgaggttgatggggagac

SEQ ID NO: 22406 - DNA, 12932 bp, Oryza sativa
gggagggggagcggcatcgtcgatgggtgagggggaaggggagcggtgccgccggtggggagaggcgctaccagtgaggtagggagagaaggagcgacggagggggataggtgccgccgacgccatcattttcagagagagagaaggggaggggaaataattttataagatcataaggcggtttggatggtggttttgcctaacgtggcgcctacgtggcgttgatgtggcacaaaaattcaaaaaaaacccaggagtatccgattaaaaataaaaaaatacaatgggaacaggggcggggttaggtttttcaacttgggtattcgaaattgtaggagagaaaattttccaacccaagatctaatagttgtataatatgcaacggtataagcatgatttcataaagtcataaatggatagaattgaccataaattgaatgcgttaaacatattagagtacattactaaactattaattgaaaaaacatatcaaatttatagaccatacaaaatggcaaaatgataagaactcttacaatatagagaagaactttccgtttcttgatattttgaaaatgattgatgatgtcttcattcttaacttgcaagaagaaatatctttcaatgaatataaccaagcaatcattcaaatattcttgccccatcttgcttcttaacttgtttttgatatagttcattgaagagaaaaccctctcaacactagcagttgcaacagggagaactaacacaaatttcagaagtttgtaaacaaggtcatagcgagaaaccttgtttgttttcacaagcatcatagacaggtctgccaaactcatcaaatttgtgaaattctcatccttactcacatcactaatatagcggttcagttgaaaggtgagttggttcatttcttcaacatcaaaatcattaggatagaacttggcaagcttaactaagttgtcaacattaaaatcagagaaggatttagctgggctaaatgatgacatgcatctaagtaactctgggtttacctcatcaaatttgttattgagctcttgaagttgcctatcaatgacacccaaaaacatatcggcatggaatcgatggtaattaatagcattttgaagaacttcttcgacctttgtataggcttataattcccatccttgtcaacaactttaactttgtgcttcacacaaaaagaagtgaccctcttaagaaagtcttgccatccagaatcttctctcaaaacattaagttctacctttgtgaatctttttacaagacatcccaaggacattcaacaaatatgcaagttgcccaaagaaccatgcacaatcagtattctccttagcaataactacaagggttagttgaagttgatgagcaaaacaatgtacatagtaagctcagggggactcatccataattagtttcttcaaaccattaatatgacccttcatgttactagcaccatcatatccttgtccacgtacctggattttccggatggcacttaataagcaaggacttaattgcctccttaagagtcaatgatgtagtatcttcaacatggacaagaccaagaaaccattcaactagttgccccgtcttattgacaaaccgcaagcaaagagccaattgttcttgttggtaggcatcactaggctcatcagcaagaattgcataacactcatcatgaagttcctctatgacaagtttagttgtttcatgagcacaagaactaatgagttgtttctgaatcttgtggcctatcatctgacaactagttggagcatttcctagaaccaccttattaacttcttcaaagttcccagctatccattgcacaagttccctaaaatttcctttgttgttagaatcctgactcatcatgaccacaaaaagccaacccctgccgcaaaagatagcttatgcacttgagtgaccatgtcaagtgagctaaatattgagcctaaacctctgcggagtttgatgcgaaggactcacgaattgatgtcttaggttgtatgaacaaattgtatttttcttcagcttcacaatatgcactattgacagcaccagcatgtttactaaatctaattttcatgttctaatttctatgccttcattagcaaaagcatctccaccatgattgctagtgctatctttgaacaaataacaaacaaagcactatgcagcatctctgtgcacactatactcaagccacttaaactcagaaaaccactttggcaggaagcgacgcatacctccacactcatgctgcggaaaatcctccttcttcatctttggttgacaagggcccaatgcaatatactcccttctaactgaatcttggtcattgacatcatattgtgatataggaatcctcaatccaggatcatgctttatgtcatatgcaccaccattattgtcttcatcacttgatgactcatcatttggccctcctccaatatcatcggtctctacatcaggcggtactgtgcttggactgctttccccactagcactctcattctcaggctaaccttgatatatcactacttgcacctgactctcaatacacgaaggttgacttggaccaatggaagaaggttgacttggaccagttggttcttgcttttttgttttgcagcagcattttctaaaaattaacaatgggacccttttttctcttcatgtttcaaacctacaaacaacaatatcaaagagcaattgagcaaagcagcactggttcagtggttcctaaatcctaatctagttagtcattcacaaacaatgaagctaaaataatcaacacacttcagttcaccgactcggcgactcaccgttgcaaccgcttgctatcttgctgactattgccgaggtctcgaggacgggaggcggcgaggcgcgcaggcggccgccgggcgcggggcgccgccgcgctggctaggcgcgaggcgcggaggcagcgagccggcgagggggctgtggcctgtgggcgaccggcggggcgacgccgcgaccggcgactgcgaggcgcgcatgcacaggcggctgggcaacgagttaggcgacggcgaggcgcgcgcatgcaggcggctgagctagcacggcgacggcgcgtgtgtaagcctggagggctggcgacagctggcgtgcaggcatgggcgtggcacctgggatgggaaggaaggtgaggagaagagatagggttagagaggtagtgggcttttctttgctattgggccaatgggcctgaaatagtgggtggtgggagggttcagtttgggcttcttttgagttttgaatgggtataagcatttttccttttttcctatatatacatatggaatatatacttcatatatgcatttttttttcaaaaatcttgggtattcatttgaatacccatgaattgaagtgggcccgcccctgaatgggaacgcgtcatcactcatcaccccctccctttttcttcttctctcccttcctcgtctctctcccatgggggtcgcataaaaggtaggcaatctcgaatagtctaatcccaaaccgaagaaccataaaaaaatcatctgtaagtccgaccgagcgacgacctgcgtccccgcacgcgtgatgtgttcgtcacatacgccgcccaaagggaaaaaaaattagagatcaaatcaaaatcctaatcacgtacagcggacaaatcccaaaatcaaatatcgattaaaaacccaattgtggcaaataacatccagagtcatcaaataacacaaaaaaaaaccaaaccaaaattaagaagtttaatgtatagtgatccagacattttttttctggttggtataaaaaaaggtatatatataggacatttagatggatgtagagaatttattccaagtgagaccgctcattagagcaagtttaatagtgtagccaactatgggctgcaaatcattcataatctattatatactaaaagtccattaaacttcttacaaatgctcctaaactgccacgtggcgctcctacaaacgctcctaaaccgacacgtggcaatttcaatctaaccgtcggttttcacttaaatttatgggtccgttattttaaaccattagattagatctatttaaaaggtcccgcttcagattattatcagatatatacaagatatttttacgagaaaaattggcatgtatttcgatcagatataaaccctgttcgcttaaggaaaacaaatcaacatatgtacgtacagctgtagagcgaaaacaaaaatactacaccgtatgttgatagaacctataatagacagtctctaaaaataagattttctatacatggcactttctaatctaaccgtcgattttaacttaatttggtagctccgttattttaaacattagattagatctatttaaaaggttctgcttcacctcattgtcaagtatataccagatattttttttagagaaaaattgacctatttcgatcggatataaaccctgttcgcttaaagaaaaataaatcaaaattcgtacgtacagctatagagcccaaaaaaaaaatacaccctgcatggatacaaccattaaataatagatggtctctataaaaatattttttatactataaaataaaacttattacttcacaaatatatacggttaaactagattaatataatatatcaaatcaatcgtctttaaatatccatttttaaaattatttttgaaatatatatctaacttataatctgttgtattcctttaattaaataaactattgatcacatataatagttatattatagtgctaaatacatggggccgacatataatatttcacgtcataattatttttaaataacttagccaatatataataattaatgtcattataatcttttttaaatagtttcacatgatagaaaggatcaacatggtctcaaatatagcttgacaaataacactaattcaaatccacatgcagggagagtggaacaacattgtggtttttcaattagatttgatttaattttagtcaatgtgagattaagattctcattttttttataactttttagaataatttgattggaatttccaaactatgatcttgccataatacaaccccttaatccatcacgggaattatggtcatatatatcttttctttgccaaatagatatggtaacaaatcaacaatcctattcattcaacttttatcatatattttcttatagtagatgatctataccatacaccctaccaaagtgactataagtgcactctaacgaatcaattacttcaaataattttggaaaaaataaatactcattctttggcattagcaaagatgtctgtcgcgatcatatatctgttgtagtctataactttttagtgatcagcctcgctcatttcaaaagcagaacattgtatctatatcataaaaaattaagcagtactgattaacaccgtaaacgattgtgtctacacaaaattaaaagaaacaatttttcattggaaaaatactttcatcacgtaccttctctctttttattccttgaaggtcaccaagcatgctatgcaaaataaacccatttctatacttttatatgctcatatttttttaacaaatactacgaatatattgaaaaaaaaaacaagtagaagcggatagatctttttttaagtagaagccgatagatcttaataaatcaataaagctcttaactgagacatattaaacttataaagcacaaacaaaagataatggtaatattgtttcaccaaatttacttaatgcgatggacctattattttataccatcttaagaactcaaaaccatttatctatgttaaaaaacaaactcccttcacccaacccaaccatatggatcctctccactgctattatatgtgcatgtactctctccgattcaacttcttcctcttcctttctctaactaacaacttgtaaacataaaaacaatcaataacgagaaagctgaaaaatcataattattaatcctttagtttgtttgaactattgatttatttataatcaaataaataatttaagatccatattaatcatattttttactttataaaaaattaaaatatatcatttgaacatagacccctgtcctttgtatgccaaccaaataataacaacattaatgaaacaacataaataaataaaatgacagcatgcatcccgtgcatcataggaactagaaaacatagattctttatctttcgtatacttaggattattattgttgtaatttactttttggtttggatagttttcgcaactattatatctatttacacaaatcactctaaatcctttgcagcgctcttaactcaccacgtgtcaagtactaaaaattagaacaaaaaaaattccaagggaaaaaaacatttgacaatgggttttcacttaagtcagtggattcattattttcaaccattaggtcttcctttagaaaaaatcttaagccgctatgtgtcacgtcttcaaaattagaaaaatcttagaaactataagaaaaaagcaaaacatatgatcattggttttagttaaattatttagaaaaataaagtccccaatgcatcgcccttcccagaacatgcattcacacaacactgaacgcccccttcccccttggctcacactctccactctccactactccccccttctaattttaagctatcaaactaaaacacaaactattaataataattgcaaagatcgtattcttaagctataaatctaatttttaatttaattgttgctcttttaaataatcaaaccaaaaatacatgatccataatgtctgtatttttaacctaaaatgtctgtattcataagtagaaaaatgtcaatagggattgaattaaatcaattggacaaaatataaaaaatttgtaaaacaaatagttattacttttcaaaaactggataaccattgtacaatgttcgattgccataaccatctttaagtgcttagatgttaatggccttccatccatcctacaccatggcattacgagtttctcaatgtattattgcatatacaagacacattaaggtagcagtgcgtagaagtacgtagttgtggttaaaaagttatgcattgctactattaactttaaatttaggactcatattggctagatattttttttagaaaacgctatagatcacatatataatagggaagcgaggtatacaatatgtatatctcctatgtatttattgacacgttctttccagaaaatgaagaattattgacaattgcttgtagtaatgaattaaatattatatagttcaaatcttacaaaaatattgtaaaaattatctaagcaatgtagatggagaaaatttatgaagaaattaaacttttcaagcgtgacaggtgtcatccggtagatattccaccttacaagttagtcaagcgtatcctattttacgtgcccgcgcgaatgcgcgggctaccttcctagttaatttaatagccaattcatacaattgcctattatctggtcccacatgtcatgcacacatgtatattggagtccgtgctgaagctagctacaaatctatagtccgcagctcttctcttcctctttttatctccttaaaatatgtttgtagctgatttataccctgtacttgcttttagagcaagtttaatagtattccaattcatttatagccaatctaatagccaattcataccatagttgcttactatactactaatatatggtctcacctgtcatacacacattgcgttttggagtccgcgctgcagctggctacagatctgtagcccgctgtttttctctctcattttttatctcataaaaatatgattatagctagctaatagtgcgtcccacgcaaaagcacacgcacaaacaaaaaaaaaaagaaagcacacgcataaacaaactacacacacaaaaaaaaaaaaaaaagcacacgccgttatattctccaccaactaaacgccgtggtcgtcgtcgcttcgtattccatttttccgctttcctctctcccccgaatccccaattcgccctaaaccctgctagaacagcggcgagcagtgtcctgccatggccaccgccgcctgcggcgagagcccttcgcggttgggctccgcctccgccatcgtcgccgacacggagaccaggtaccacctcctcaagatcggctgctactcgcgcaccaaggcgacgacccccaccggctccttcctcagttccggccagttcaccgtcggcggccaccgctggcgcatcaattactaccccaatggggaaagcgccgactccgcggattacatatcgctttacctcttgctagacgacaaggccaccaatagcagtgtgaaggtgcaggcacagttcaagttccagattagttccaccgaccaggtgaagaacacaccttcattggcatccacgaatgtaaatacatatggtgaggattctagctggtcttggggtcacagaaagttcatcaaacgggaagatttcgagaagtccaatgatctcagggacgactccttcaccatccggtgcgacgtagcggttatcggagagatccgaactgagaagacgaccgagatcccatcagccacaacattcgtcactgtacccccgtctgacctgaaccagcagctcgtcgacctgctggagaccgagaagggcgccgacgtggtgtttgaggtcagcggtgagacgttcgcggcgcacagatgcttgctagcagcccggtcgccggtattcagcgcggagctctacggcttgatgaaggagggcgacaccgccggagtcgtgcgtatcgaagacatggaggcgcaggtgttcaagctgttgctccgcttcatgtacaccgactcgttaccaaagatggaggaggaagacgtcatgtggcaacatctgcttgtcgcggcagatcggcatgatctacagaggctcaagctgatctgcgaggacaggttgtgcaactacattggcgtcagcacggtgttgaacatcctggtgcttgctgatcagcatcactgcgacgggctgaagaaggcgtgttttagttttcttggctcactggagaacctgagtgctgttgtcaccggcgatggcttggagcatctgagcaggagctacccctctcttatgaaagaactatttgttgtgatggcacttccaccgaatcatggttaatattcttgtgctctagcaatgatagttgttggtttctcaatctgaagttctgaacctttctcatcaggtagatatgttatcttcttttagcacgcaggcatggtgctgtactccctgtgtatatatgcttttgttatcaggtatactatgaaaaccaaaacttcaatgttttactgcttttgatcaagaatagtgacttgactggagttaatttgaagaaaacaggctggcagggcccgtcacttgtgtctgaatatgatgtatcatattcttcaggtgccctgttagctgctgcagtttatgtttgttggactactagctatgcttttaagttcagttggctacctttaagtgtgccaattttgtcaggatcctggctagcttcttttctgaaacatgataaactggttattgttatcaacttgtcatgcattcatgctaactagttctgagggagcttaagctgagcattattttttttctccctgctgtatgagggttcagaaacttttggatgcttattaattatgtaaccgtcacctatcttatgttggctatgaatacacgatgctaagggttatccctcccctgtttccttacaaaagttctttactattgttcatgttaattcaagaaatatttttgctagtcgtcagataaatttttgatagctcattgcatttcaacaagtcctgaaattcttgttgcatatactccatatgcatcaaaacttgaaatttacgcaaagttagtactcctaactgctgttgttgcccctggaagctaaatctggcaacatataaacaatggacaatatcagtgtgcattgttcagcgaacatgtgacttagatcatgaatagtggaagtttctcactatcctcagcctacaacctgttcttcctggcgcgcacgcattctttgtgtggcgagctgatctggcagacgagggcgccttctctagtgaagtttttcatgtggtcggcgacaaagggaagatgtatcacggcggataatttgcagaagcgtggttggcctcaccattctagttgctccttgtgccaggggatccaggaaaattgccaccaatcgagcgtgtgactgtggagaatgctcaaggggtggatcactgccccgtttcagcttccggcagagagtggtgctcagcttgtggactggtggctgatggcaaggttggtcttttgagcgagctacaggaattaaagctctcgtttcactcttcgtgatggtttattggatgatttggaaggagcgtaatgcccggatcttcgagcagagatcgcgcacagcaggtcagctatttagtggcatcagagagatcatgatctggaaggaggctggaatttttcggcaatgtgattagctgctaatttttctttctctttcttccttttggggcggcaccgcggcagccatttgtgttgttgcctgaatcggcagcctaatttagaacttgtaaggttcctaccaaactctgttaaccatttaatctttaagtgtccccctgctcttttcctttggtgctgtgtgagggatgcgttaggctggaaagtagctccttgttcttgtgaggaggtgcaaaatttgattctagacaatgttgtcacgataggaagtaatcttactgtgattgcagctggaatgtgggcgatttggaaagttaggaatgactgggtgtttaggaatgttttgatgaataatgtgatacatttgccttagaagatgctttcgtttttaaaatagtggagtcctttggtacccgagaaacgaaggatctgctggaggaaatcaggggcttgctcgatgccaaaatccggcaatccacgtagaagcagatggatgatggcgatgaagaggatgaagactggaggctttgcactgaacctggattgactatagtgcctggaatgtttaggcttttcggtcttttgtgtgttgaacttgggcttttctgtttcaagctggtgttcccagcatctgtatcgagcctattaagcttttgagtaaagccgggctcccagagccttttctctaaaaaatttagaacttgtaaactttgtaactatctattattcttaataaaatttggtcggccgacctggcaaaatcatgaatcaagtcaaactgcactctgataacagcagcatttgattcttcagtagatgacatattgacaagtaccctgttcttttctccaacaagagttggataaagattatgattttcgtggcacacttttcacactgctaaacggtgtgtttcgtgcgaaaactttatatatgaaagttgctctaaaatatcatattaatctatttttcaagtttgtaataattaaaactcaatcaatcatatgttaataccacctcgttttgcgtaaaaaacttaatctgcatctttatcttcaggagaaaagaacaccaaaagaagtgtgtgtgtatatatatatagagagaggctctattatacacccttctcttagaataactattctacacccccctcccaccttccatccgtccccacctccctcccgcgctccctctccctctccctctcgcgcctccccccaatctctccttttcttcttttttttcttctctccctccttctatcttttttagaaaaaataaatttgcgtaaaaaacttaatctgcatctttatcttcaggagaaaagaacaccaaaagaagtgtgtgtgtatatatatagagagagagagaggctctattatacactcttctcttagaataactattctacacccccctcccaccttccatccgggcccacctccctcccgcgctcgctctccctctcgcgcctccccccaatctctccttttcttctttttttcttctctccctccttctatcttttttagaaaaaataggaataaattggtggattcaagacttgatcccatgatctcatggtttatggtgagcacttctaaccaaatcaccatatgatgatttgtgaacaaatcagttatgtacctataacaatcataccttgttactatgattcggctgtaacattatcccagaagggtagtaacattatatgttactgcaaaaatgtataggttgttactgcactttttacagtaacaatatgatgaaatttgcagtaacagagaacatgcatagtaacagtggccctatagtagtaatgttttttagatctagagtattttaaatctcaatctttagagagtactaacgtacatgtgtcatgtcttatttttctaacccatttgcatcatggcgttcgtaaaaaaaagtgcttaatgaaactagaaccataataactattttttaacgttgttactgtgaaaagcagacgtgttactgcatattagccgtcgtgttaatacgctgttccagtgagacgaggactaaaaaataggtaaatctcaatctttagagagcaatatctctcacattatatcttgtatttccaaatcgtttgcaccatgaagatcataaaaaaacgcttaacgaaactagatccatcatggctactttttgacgttgttactgcgataatgttgtcctgttactgcacgatgaccgtcctgttactgcacgattcctacaagacaagagcagcaaagtggtaggtgggggaaggagtggtgggcgggtttgaccggcgggaggacgctttgaccgagg

SEQ ID NO: 22407 - DNA, 16971 bp, Oryza sativa
tattaacgtatgattgattgagttttaattattacaaacttaaaaaatagattaatatgatattttagagcaactttcatatagaaagttttctcacgaaatgcaccgtttagcagtttgaaaaacgtgccacaaaaatctttatcttcatccaactcttaaaagaaatgaacggaacgatagtcaatgtccctttgacaggattgttttgcttcctttatacagtttccccttgtttgatggagaccaggcagtaatcaagaacggccgatcagtttgagtcctgaatcttcacatattcctaaccacgcaagtcaaccaagattagtactaattcgttataaaataagtaatatggtttaacaagcaaaattgggattcttatgggactccaaagatcagtactaatcctattctagtaattattaatgcagtaattttgttaagtacatcccttcgtctctttgctccgtgctgtccgccctaaacctatacacaagagcatcgacaagctcgccatcaaaacattgtcctgcctgccatgtcctgttccgccattgtggccgacggggtgaccgggtaccacctcctcaagatcgacggctactcgttaaccaagggcacccccactggcacggccatcaaatccaacccgttcactgtcggcggctaccgctggtgcatcactactatcccaatggggagttcgtcggctccgctgattacatatcgttctttctctctctagacgaacggactaacccaattttgaaggtgcaagccaagttccagattagtttcgctgacaaagtgaattaattacaagcaacaacataacataatgtccacgacagtaaggacttttggtagtgactagtgagtatacgacttggggttttcccaagttcatcaaaaccgaggatttcgagaagtccgactacctcaggcacgactcgttcaccgtccggtgtgacatggtcgttgtccgcaagatccgtgccgagaaggggaagactgacccacctcgccgagaccttcgtgtccgtgcccccgtccgacatgaaccggcagctcggcgacctgctggagaccgagaagggcgccgacgtggtgttcgaggtcgccggcgagaggttcgccgcgcaccggtgcgtgctcgcggcgcggtcgccggtcttcggcgcggagctgtacggcctgatgaaggagggcgacgccgccgtggtcgtgtgcatcgaggacatggaggcgcgggtgttcaagctgctgctccgcttcatgtacaccgactcgttgccggagatgaagaataaggacgcaggcgtcatgtgccagcatctgctcgtcgcggcggatcggtacaacctggagaggctgaagctgatatgcgaggagaagctgtgcaagcacattagcatgggcacggtgtcgaacatgttggtgctcgctgatcagcaccactgcgccgggctgaagaaaacgtgctgcaattttctcggctcatcggcgaacctgagtcctatcagcaggggctgcctctctgttatgaaagagcttgtgttaggatgctggtgcatccactgaattagtgtgttctagcatttggtttaacctttctctcatcacgtagttctcttctcctgttttatcatgaagacttgcagttgtacacactgtttgaaaataaaaaaagaaaaataggagaaaaaaatatgacagaaaagaaaaataggagagaaaaaaaaaaccgagagaagcaaaaattactttcgagggtttagttatggaagccctacccaacggaattttccacgttcgccgagagaatgacaccatcatcctgggctatatttcaggaaagatccggtctagttctatacgaatactgatgggggatagggtcaaaattgaagtaggtcgttatgattcaagctcttttgtgctaggtatatccgtatatgatgttcgtaattccataaaatttatatgagttactccctccgtcccatgaaaggatttcgactttttacttacactatttgaccattcattttatttaaaaaatttgtgcaaatataaaaaataaaaagttgtgcttaaagtaatttggaaataaagtaagtaaaaaaataaaaaaaatttcaaatttttttaataagacgaatgatcaaacagtgtaaacaaaaaatcaaaatctcttatattagggacggaaccggctcctgtgacatagagaattctacgtcagagggatgttggacttccgatcgccgtcgcttgcgcatccaatggctcctgtccgcgtgtgatgatagccttctcgttcggcccataagcccattcgtcgccatcagattgctctagcatcgtctgccggagccgcgatagcgtgacggtgagcttgggcacacagctgagcaactggacgcagccctcccatgcgctgtccttgatgggctccgtcttggccaacaggtcccctgacgacgcggacgatgagcacctgcggttcggcagcgccgagagaagcgccaggtgtaagtgtcgcccgatgaacacgatgatgtgttagagtttgtgtcgaatatgtgtacgtagtcggttacagtttagaacttggagttgtaataggtattaggattagagtatgagtcggactctatcctaggatctctcataaatagaggggcgtgcctgttgtaaccgcatggtgacttagcatagcgagagggagcggctgccggcgtctaccggccgtgagtcgttgtaattctgatacgctgtatatggtggatcggggaggagcgcccgtaatcagtgccccggagatgtaggctacggctgaactccgttaccaaatatcgtgtctcggtgtcgtcatcgttttggatctcctatggcgttttcttccgcgtttagctaccgatgttgatttcggggctggttttgtaacaagtggtttcagagtctgcaggaggtccatggtagaggcgcgatagaggtgctccacacctcgtagcctgctgtaatgcccagggaggggcattggcgcaaggtggagcacgccggcgatcaacggagtcttgattggtggatcgaacacttctggcggcggccggaaccgtcgatggctgctttcaacagggagatgactagacgtggtgctcgggatgatggcggcggaagcgattggcaaatcaatcggtgggtcggacacttcgggcgggtggctcggactttccggtgagctactctcgacagggagacatgcggccacacgctcgggttgattgaagctggaggcgatcggcgttcttgatcagtggattcgaacactctgggcggggtggcccgggcctttcgatgagttgcgttcgacagggagacgtctagacgtagcgctcgggtcgttcagcggctgggaagacagcatgcgacttgtcggcttcggctcgcgactagattgatggcgatcaatcggaagtcggagcaggtggatcctataggctgttttggaggtgttgacgaggtatttgcacgatggaattgcttcaaaggcggcgtattttgtggcatatggctgaacaaagcctagggcgaatagaccggcatccagtagcggttcaaccctggagaggcattggttcaacctgtttttccctctagcagacaagaagaaaaccacacgggctgtagatcaatgacaacagttgttggtggagtcatcggtggtgcttggcattggtgctagatgttgtcagagatatgaagaagcccaggaggttagggtcacggcggtgtgcgcgtcctgcgtcaaagccgagccggcgacagagatcagggcgatgccgaggagctggctagggtttagctaggtcgtgcagggttcggtcttaagggtttgtggtgtggaagacacggacatggaatcgtctccggttcgggcatggcacggacacaattgaagacaaacagtggataccaagtttcaacacgaaggggaatcggacgaggacttcgattcgttcaggaatcagactcaatttttcccagataaaagtagcagaggaccatgggattgcaacaacgcaatcgaaacaaatcacctagcagagggcgagagtcgtacccgattttcgcagaggcggaggtggtttgggcggcgaggtcacgggcagctggagacacgtcattgcaggtggcgcgcggcggcgtggtactcggcggcattcgtcggagctcgggcaggagcttgcggcagcggctgcggtggttcccggcgaggaaccggcgcaggtcttcggtggaggcggctcccaggcgggttcccaaggccggcgacccctcggctcctcgtggggtcggcacaggcgcgcgacggcggagggaggcgacggttcccgaggcgggcagacgatgctgagattccttgcgggggccggcggcggcgtgaggagcagggcgcaaagtggcggcgcatcagaaagaagcgccgcaggcacggtttctaggaggagcgaggaggccgaatgaggaggaaaggagatcggtttctatctgattccctttgaccgctgttgactggcttattgactagaaaagaaaaccgaccggttttttggaggaaaaaaaagggttggttttgtccggctggtgactgtgcaagtttagtcggtgggtcaattaatcagagcagatcaatttaacagggcaacagctgttgagttgattatcgtcgatggcggcaacagcggtttccaaatttgaggtggtgaagttcgatggcaccgggaatttcgttctctggcagatgaggctgaaggatctgttggctcaacaggggatatccaaggcacttcaggagacgatgccggaaaagattgatgctgacaagtggaatgagatgaaggcacaggcagctgcaacaatacgcttgagtctctcggattctgtcatgtaccaggtcatggatgaaaaatcgccgaaggaaatttgggacaagttggcaagcctacatatgtccaagtcgctgacgagtaagttgtatctcaaacagcagctgtatggtttgcaggtgcaagaggagtcagatcttaggaagcacgtggacgtcttcaatcagttggttgtggatctaagtaagttagatgtgaaactggatgatgaagacaaggccataattcttctgtgctcgcttccactgtcgtatgaacatgtggtgactaccctgacgcacggcaaggatactgtcaaaactgaggagataatttcgtcgttacttgcacgagacttgagaagatcaaagaaaaacgaggcaacgaaagcttctcagggtaagagtttgctggtcaaggataagcatgatcatgaagcgggggtgtcgaagagcaaggagaagggggcacggtgctataagtgtcatgagtttggacatataaggaggaattgcccgttactgaagaagaggaaaggtggcattgcaagtttagcagctcgtggtgatgattcagatagcggtagtcatgagattctcacagtgtctgacgagatgtctggagaagcgtggatgttggactcagctagttcctatcatgtgacatcgaagcgggagtggttctcttcatacaaatctggtgattttggtgttgtttacttaggcgatggcacgagttatcgtgttgttggagtgggcgatgtcaatttcaagatgtatgatggaaacgaggtgctactttcagatgtgagacacgtgccgggattaaggaagagtttgtttcgcttgggagcctacatgagacaggttggttgtatcaggtggattctgataggaagaccatgaatatcatgaaggacggcaagactgttatgactggtgagaggacaagctcatgtttgtacaagttacaagggagtgctgttacaggtggagtcatggaagatgggtatgttggtgttgctgtgcatgatcctgaaggcggcgagcctggcgtaggctcgtcgggtggctcggcgtgagctgcggcagaaccaactcaagtcctggtacatggaggttcgagcaagtaacagattcaagttggcatggcatattcgccaaggtggagtttgttagagtttgtgtcgaatatgtggacgtagtcggttacagttaggacttggacttgtaataggtattagtactagagtatgagtcggactctatcctagaatctctcataaatataggggcgtgcctgttgtaactgcatggcgacttagcatagcgagagggagcggctgccggcgtctaccggccatgagtcattgtaactctgatacgctgtatatgttggatcggggaggagcccccataatcagtgccccggagatgtaggctacggctgaactccgttaccaaatatcgtgtctcggtgtcgtcatcgttttggatctcctatggcgttttcttccgcgtttagctaccgatgtcgatttcggggctggttttataacatgatgtacctgctgccggacaagcacaggatgtgcggcgcactcgaggtgtctgtgctcgcgcacttcgccgcacgagaccgcgtcaatgccctcctctgcctgggaaaccagattcggagagatcgccgtcctttgacagccccaatcgatgacttggctcacaaactctagattgtctggaggaagaagatgaacagtgcactcacaaggtgtttgacagagggagttttggtgctgtgtaagtgtcactggctcactgaagctttttattttctcatccttttatttgcagaatacaaaaactcaccatgcatcgtggcctcctggatgcgcgccctcacctcgctgccattgccgcgaatgtgttccatcccacacaagcgaagcggagcgcacgacgcggacgcgccgcgacatgaactaagcacgtccgaaggaatgcgatgccaatagaaattgaaacctgatgcaatctactctaggatgctgctaaaaacaaggacacacacatgaccactgtcggctacggcgacttcgtcccgccagcgacgctgccaagctgctcgcctgcaccttcgtcttcctaggcgaacggagcttaattctcgtcggccgtcgctaggctatggctcgagcgacggctccggcggctggtgcttccctttggcgtgagctcccggctgcgattctgcgaatgggcaccgtacggaaaggctatacatcgggcacgcgcggaccggagccgttggatgcgcaagcgacggctatcgggagtcgaacgtccctctgacgtacaattctctacgtcagaggagccggttcctcagagggagtatgacttatgagcatatatccttaggaggagtcgtgaggaggtcaaaatatttcagattcatataagttttttgattcttcaatagatgacacattgactacttcctccatttcatacgagtcggtttgaatttttttttcttaggactaaatttatagaaaaatttagcaacatctagaaaagaaaattagttatttgttttgtgttgaaaatactactacatttttatataacttagttaaactttactagaaaaaaattaaacgacttataatgtaaaacggaggggtatttttccgtaaacttagtctacattaaaaagtttgattagataaaagtttaattaggaaaaagtttaaaacaatttataatatgaagtgaataaagaaacagttctttattcttcaatagagacgtattgatagttaatgtcattacttattgagctattgacttattgagcttccatgtggaacatgcccccggtagaatccaagcgaaccataagtggcgccgtctagaaaaaccgggcgaccagcgccgggccatcgcccgcacgggaaaatgcattatcccgtgcgggcgtcttaatccgaccgcacagcataatggggaatattatcccgtgcggctccgtaacatgactgcacagaaaaatcgattttcacgtgcaagcatattaagtggaccgcacgcgaaaatacctctccctctcactcactaccaaattttcacacattctctcccttcctatccttttttattttcactcctctctctctcactttcctcctctctatcccttttttgatctctttctcttctcctctcctctcctctccgcgggaagcggccggctcggcggcaccaacaacgaggcagcggccgagaacgggcgggaggcgacacagcggcgggcgacgaggcagcgaccgggtgggcacggcggcgagcggcttggtggacggcggtggtgaacaactcgggcgcggcggcgaggagcgacggcaaccggccctcgcccggatccgcaggcggcggccgtcccctgcctggatctggccgctgtggtagtcccctcctcggatccgtgtgatcgggcggcgggcaggttcgacggcggcagcggcggcatgaagaccgcaacgacgacgggcaggcgtgacgaccgcgtcgatgacgggcgggctcgacgacaagtggcggcaaccgggagcggcggcggtggccgggtggggagccggcgcgacgacggcgacgacgacgggagcggcggtggccgggtgcagtggtcggcgattctagggttagggttagggtttttctacttttatttttttgtgttttttttttgcgtgcgggcggtataacttgaccgcggtccacttaacacgaccgcacgggataatcgattatcccgtgcggttgggccgcccgcatacgaaaatattgattttcgcaaacccctgaatgcagacgggcgctacctcccgtacggaaaaaatgcagacgggcgctacctcccgtacggaaaaatcgattttgaccgcagaaaaaaatgaattctgtactagtgttcttcccgtacagtttccctttgttcgctggagactggccagtaaccaagaatgggcgccggccagtttcggagtcctgcatcttcacaaatcccacacaaccaagccgccgtccgttgtaaactaatacggtttaaccatcaatgttgggaattcgtttgggactccaggtgaacattgacaagaaggttagtgtactgatcctaatctaattcttaataatatactactaatttcgatcgtcccttaattttcttctcatcgtcctctgcggctctgcccttcccctacttctcctaatacgccagcaattagtgcccctgcctgccatgtcctcttccgccgccggcaactcgtcgcggtcggcctccacctccaccatcgtggctgacacggagaccgggtaccacctcctcaagatcgacggctactcgcgcaccaagggcacccccaatggcacggccatcgcatccagccagttcatcgtcggcggccaccgctggcgcatctactactatcccaacggggaccacaccgacaatgcagattacatgtcgttttacctcttgctcgacgaaaagaaaaacaccaagaccaagagcgtgaaggtgtggacgctgtttcagatttgtttcgcagaccaggcaaaggcgctgcctacactaacatccaaaacagtgagaacttttggtgatggttcttcttggtcttggggctattcgaagttcatcaaaagggaagatttcgagaagtccaaggatctccgagacgactctttcacaatccggtgcgacattgccatcgtccgcgagttccttgttgagacgaccgaggtgctcccgcccaaatcgttcgtatccgtgcccccacccgacatgaacctgcagctcggcgagctgctggagaccgagaagggcgccgacgtggtgttcgaggtcgccggcgagaggttcgccgcgcaccggtgcgtgctcgcggcgcggtcgccggtcttcggcgcggagctctacggcctgatgaaggagggcaacgccgccgtggtcgtgcgcgtcgaggacatggaagcgcgggtgttcaagctgctgctccgcttcgtgtacaccgactcgttgccggagatgaagaagaaggacgaaggcatcatgtgccagcatctgctcgtcgcggcggatcggtacaacctggagaggctgaagctgatctgcgaggagaagctgtgcaagcacattagcacgggcacggtgtcgaacatgctgttgctggctgatcagcaccactgctccgggctgcagaaagcgtgctgcaattttctcggctcatcggcgaacctgagtcctgtcagcaggggctggctctttgttatgaaacagcttgtgttaggatgctggtgcctccactgagttatgcttaattagtactatgttctagcatgtggtttagagacctttgtcatcacatagttctcttctatatattttagcaatgcatggagacttgctgttgtacaccctgtctcggtgtcttggcttgtactatcactatcaggcagagctgcagaggtatatgaccttagtaattccatgaaatttacgagtcatgaacatcatcctaaggaggtaaaagtaattccagtttgaccgtgtgttgttactaccactgtaactttacatgaaaaaattacttcttgatttggatttggatgactggttgagttatgtaagcacctgtgctatattctcactactggaaagatgcttttcccagaaggccaaattgaatttttgggttctttcttataaaaaattgaatttttgtaggcacgtggagcaatcgcctgagcataggtgtatgtgaaaatctgagattttcctagatggacaaaacaactgcatgtgaaaaaggattttcataggcaggcatgttatgctgcccgactgcaaaagttttttggtgaaacaaataaaaattctaaaaagaatattccaacaactctaactctaatatacagtgaataattgtctccatggttgtccccgcaaatggacgccgctgaccatactggcattatctccgattccctcgacactggatctgtcgtctccgacctccccagtacctaatccacacctcctgatcagtccctaccgcgacctctggcggcggattcgcggtatccgaggccaccgccgtcaacgagaagggaaagaggagctgatgcggcatcatcggtgctgagcagtcgagaggaacgagaaggagagccgaggaggggactgcgtccttttaatttaactagtaaaagtatccgtgcgttgtaacgggaagcgtacagatcagaaaaatatgcaattaattaaaatacaaattcgctgaaatatttggaatttttaagtaggtatttgtataattaaataaatttacaagtaaagcaagtgtgagaaataaaataacatggttaaatttaattttattaaattctccatgattagtaacgctctttggaatttttttgtaattttcacagcttaattgctaattttaataatacaaacatcatttaacaattatttaattggaaaaagaaagaaaatctccttttaggtttgcttcgaaataaatacattacattcaataactataattataaatgcttctgaaaaaatgaagtactaaaaatgaactttttctctttttcttcggcccgagggacctaaaatagacttctttccggcccttgccggtcggcccatggccttttgcgcatgggcgggcgcactttccctccccaggccgcaacctgggcttaggccggaaaagtggcatcgctctcgatccctcttgggccgagaggagcttcgttttttaaaaggagggtcaaataattaattgcccctaaaaataaagatgtgacggcgaaattggttttttaagtgtttatctccttgttttgagttaatttatgttatctccatgataactttgttgttagataccttttctcatgtgtttttgcttgatgattcagcgtttcagataagtggaacaacattcaaggttcagtcctcgactccttttgtgctggtccataaaaatgagtcttgttatcatccgttttaaatctatctgaaagccaaatttattttaagatttaaagtgttcttaatgtctcttgatcaagaataattaatgtctggactagagataatttgaggaaaatgcatcttttggtggttctaaagatgtgaagagtatatgaatagtttgttcttcagcgtcacgttgaagtttgtacctactatttccaaacttgtcaggatgttggttagctagtttcttttccgaaacataaaaaactggttacttgttgtctgtgcaacagttttctgggtcaaacagaacatacaaaacaagttatttgttcccggagaaaactagttattgtttgtcatgctcatgctaactagtttagggagctcaaattggagcatcagctcagatttataggcttacagcaaacccatgattaagtcatgtgtcatgaaaccaatgattaagtgatgaatcaaatcaataggcagtctttaattcttcggtcgaggttcatatatatactgagaatggaaaatatccctaacaactgtgagcatgaattgtggaacatggggtgcagggtgctatattttttcctcttcttcctttttttttttgaaacaaggcaattttgctcctgaaaattgaattgagttgctaattcaaccgcatcgtcgatattgtagagctttttgtccagctgctgcaagctgcataacattgagggcgaccacaacgtgggaatagagggggtcttaagcctcctcactagtctatatacatcgtgggagtgatctttatagaggtcttttggttgagctacccatatggctaatgcctggccataaggaataaaaaaataattttcatctctctcctagcacactcttggtagttgagatggtagaaggtgggacccatcttaacaccccctcctagccatatacattgtgagaggggtgctatatctcaatgggacccacctggggcccacttgagcattatacattgctcatgccctgatcaacgccagcggtcattggtgacgctggccggccgtccttgtatagatgaacagggttttacatttcgggaagcaagataatttcagcggccatcaaaattccgaaatttcggatactttgaacggttttttttaaaaaaaattaacatatttttactgaatttgaacaaattatgaccaaattcataaatatttgaaaaaaaatctagaaaattcgctcgaaatatttgcttgccggtggggaggggggaggggggatttcggcaatttccaaaatttccatccctgtagatgattggaattggattaccgatccacattccagggctcccatcagttgccattttacctaaaatggcttatttggcttattagaaaattaaaattaatttataagtaaaacttttgtagatttgttcgtagcgacttaaaagccaaaattaacaaaaattacgttaaaagcatttcaaaatcaacttcaaaattaagttcaaaaattcaaattttggcttattctttggctgtttaggccaaacgatggggctgcaggtcatgtacgctgggctataaacccaattcgactactattaatttcggatttttctttacatgttctttttcatcgatcttttgagaaaacaagggaagaccggaagagtacgtgaaaacactttccccggtctaaaccctacaggaccagctagcgtgctgccatgtcccccgccgtaggccgtggcaacccgccgtcgcggtcagcctcctcctccaccatcgtggccgagacggcgaccgggtatcacctcctcaagatcaacggctactccctcaccaaggccaccacccccaccggctcgtttctcccttcgagcccgttcaccgtcggcggccaccgctggaacatcaaatactaccccaatggagatgacgtcaagaccgccgattacatatctttctttctcgtactagaagaagaagagaccaacatgggtttgacggtgcaggccaagttcaagtttagtttcgctaaccaggtgaagaagcaaccttcgctgaaatacaggcccataaagacatttaatctcgaggattcttgtggttggggctatgtggagttcatcaaaagggtagatctcgagaagtccgatgatcttagggacgattctttcaccatccggtgcgacattgtcgtcgtccgtgagatccgcaccgaggagacgaccgagatactccccgtcgaatcctttgtacccgtgcccccgtccgacatggaccagcagttcggcgacctgctggagaccgagaagggcgcggatgtggtgtttgaggtcggcggccagacgttcgccgcgcaccggtgcgtgctcgcggcgcggtcgccggtgttcagggcggcgctctacggctcgatgaaggagggcgacactgatggagtcgtgcacattgaagacatggaggcgcaggtgttcaagctgttgctccgcttcgtgtacaccgactcgttgccggagatggagacggaggaagacgtcgtatgccagcatctgctcgtcacggcggatcgatacgacctgcacaggctcaagctgatgtgcgagaacaggttatgcaagtacattggtgtaagcacggtgtcgaacatcctggcactagctgatcagcaccactgcgacgggctgaagaaggcgtgcttcagttttcttggctcaccggcgaacctgagtgctgtcgtcgccagcgacggcttcaagcatctgagcaggagctgcccctctcttatggaagaactggtcgttatgcttgcacttccgcctagtcatgcttagtgttcgtgtgctctttttttagataactagttatcgtgcacgtgtaaggcacgttttgacattatatacacagaagtagaataataaatgctacttttttatgcaacactccatataaattcttcacgtaaaaattgagtttcatagaccatatggagctttggaatttctgttaataaagacggatggtgcattgcatcttatattgtcactctaggaatgctcccgaggacaaaaagataactacacagaaatatttcactaatataaaaacagaaacaactttgaagtatctttgtctgagagtcactatgctcactacttatgtgagattgctagcatctctaactggaaaaaaagtgatctgctagcatctcatttttctcatttgtagaattgcattgcagagtaatactatagcctattatcagatagatctaatggttaaaaataatggctctaccagattaaatgaaaatcaatggctagatgtttgttttatagaattcctagtgccacatggcgacctagtagtgtttgtagaagtgtcacatggtaacttatgagcatttgtaggaagtttaatagatttttaatatataatagatagatatactcactccatcccaagagttagccatatttcatattttagtttttctaaataatttgttcctatttgtagtttctatgcaagaaaactgaaatagagaggtaaattaaatctttgattagaacccaaggagcaatattaatattcagtagctgcatacgtgtatacgctccttaatttttgttatatgcatgattaattaagttcttcttggtcatggtgataaaagtaataggtgtaactttagtggatggagggagtctatgtaactaaatatacaattacattgacatcatgtaatccttgctttatataattaactttcaccacattggatatagaaaacaatttggttatacagctctaatgtccttacacgttcatgtttattcagttgatacagtgacacattgcacgtgcattaccccttgacatgcatatacttaattaaaatagcacaatagagtattcatttgaaaaacattcaataaatgggagtgatataatcttccaacttcaaattagaactgtacattaccatagctgcatttaacaaataccgattgtagtgacacaaattaaattcaaaaccaaatatcagtacagccgaaaattgataatcatgcccaaaccatgtgtaagaacaaaccagatttcatgtcattctcgatgatattgttttccaaaatctcagtgcccttaccttagtcaaatcatttttaaaattgaaaaagattgaagcagtggtaaccaaataagaattggaacaattattcataaatacacagatatgtagaaataaattaaaaaacaggagcctggttgacttcttgagaattggataaatgaatgctcacaagaagaatgtagttgtgcaatacaatcataaagaaggtcacatgcaagaaacaatatgctaaaagtacatgtggaaaaccatcaagattgaaatcaatgactgaataggtatcgatcggtgaaaaacgactgaaaacacttaataacagtaccagtagcacttttcgcccacaaattcttcttcagttcgatttgtcgtcaactcagtcctaacaagcaaacaacaaaccaataagataaccgaggagcctaggaagaaaacaagattagattcattcaacttctgaggcaattgcaaggattaaatagaaagcatatgaattaggtacgggaagggaaaaggactgcatttgcctccattgccgaatcaaatcttcattgtcatatgtcattactgcacctgtgctagcattgcgaacaattgagagttaaactcatgattaattcttgaaaatatgcctcatggtaagttttataggggagtttatagcgctgaaccgatgacaattaaggattctcaattcacacaccatcatctcctagtagttgtaaacaaaatcacaattgttaggcaatcatccaggtcttgaagagcctcatcaatagtctctgttcaaccaaaagatagtttgctgaataatgctagagagtatgta

SEQ ID NO: 22408 - DNA, 8764 bp, Oryza sativa
catagatacaagaccaaaaaaaaaaaatcagagaatgtggattctattcaagaaacagagttcagaaaggaccaagaagccagtccgtgaacggatcacaaccgatgcagacaaccacattcacaacaggcatgagatccctggggccgaagaggtagttcatgccgtgatgccagaactcgcgcacacggaggggaatcggagcaggcagcatgcgactcaccctcttcctcctctcctctccacgcgcttattcatcttctctgtctccggtgagcgagtttgagagaaggggccgggcttctccggtgaacttcgacgggttagggaaggggaaccaccacggcgcctgcaggggcacacgatgcggtggcgtgcggcggggactcacgaggaggcgcgcagcgattgaggtggtccggcggtggaggcgcggtagcggcggcgctggtccaacgatggactgcgacgggcattcacacggctgagaggaggagggaggaggagcgaggagggggtggctggtccggcagtggactgcagcggcattggggaatcaggcggagcgaggcggcggggattcctcgctcggctgaggaggagggggcggctggtctggcggcagcggggaatagggtggagcgagtgaggcggcggggattcgcgtggatgagatgagaggagggaggatgcgtggagcggagagggggcggagattggtgcggcggactcatcgtgcgctcgggggcggaatcatctcgtttcggaggtcgaatcgctggtattggcacaacgattgagaatagattagattagatcagatggtgaatggacggatagattagatgagatgatggacggacggatgagatgggataggatgatttcaccagtaggattgtaagggggcaactcctcctttttatattagtatagattagtgttcgtgtactctagcaatggtaattgttggtttctgaaactttacccagaaaagcaggagcggatctagaaaagattaacaggagggtctgaacaaactatacaaaattataacccctcttctaatagatgtatgacaaaaaaaaaatagtgaggtcttcatgggatctcccatggttacaatatggttagtggggtttagagaccccatggtggatccgtcactacccaaaaagcaggtgatgctgcagtactccttgtgtgtagatttcggtttagctaaaatcatttttttttcagcaacttgatcctctgatctgcaaatcgtgcaggagcagcgttaagctggctagctaattaaagctagctaggtagacagttatttatatattcatacgaatttatacacatcatacttacacaccacttacgtagtaaaacccacttgcacgtcacttacatatgtaattagtatgtaattttaggatttacatatgtaattttaggacttacatatgtaatatttagagttacattgtaaatacaatgaaattgtatatgtaatttaagaacttacaatataaatatataccgattattttttagtgaaaaaaaaatatagcgccataaatatagctactctctccaactgattttgctataaggtacatgacattggccatccacaatgtagtataaaaccagtccataagcaataaaatattctattcaaccacctaacaacattgtggaactagtacatagcaagaaaatagcaaaagccacccataagcatatgggctgcccatagaggataaaatatgttatttatctctatttcctctctcctcctaatactagttgctatccatatacattgtgaagataacaatagttatagtctatatgtgtgggtcccatctatatggactacttttgctatatacattgttgttgccctatactgagcaggagttagcgattgttactgcttaatttgtctttttttttatgctatctctgcaactgcacttttagatttcgaaggattgtcacttcttacctggtgttaaacttccacgtggcatgtttgatttagaggatttggcatagtcacaaagttcccagatcaatgggttcaaggattaggatcgaggaacgtggtacgctacttgcaaagaggtttttataatgtgaggacaaaaatgtccccatgtggaagtaaatgagttcgactgagggatgagagtgtgagagagtgaaagtgtgccagtggtcactccggccgcagcggccactccggcgccggcggccacttcccctgtctcgctcgagccaacatgtcgcatttgaggaggttgtcgtggagtgatcaggttgtcgccaggcagccgacatccgaggaagaggacgtggatgcgggtgggcgttggacggaggttcggcgcaaggtcagaccgcattcatggtggtcgagcaacgccccaaccaccaacgcttggggcgcattcacggcgccaaggacggtgccccgctggctccaaggatgttgcttcaagtgcttgggcctaaggggtgatgctaattggcgcgtacgcgcacttgctcccacgcgactcgctcttcccgcatgggacgcactttccgagcctgctgctaatgtctgtgttagtgctaatttttagcggtttgcacaaattgatttttttaataaaatgataaataaaatagttgggttgaaaattttaaaatacgaattgaatgttttgaaagtttagttgaaattttttgaatttgagttgaaagttttcaaatcatgacttgaaagttttcgaatttgagttgaaagtttccaaatttcaattgaaagtttccaaattcgagttgaaaattttcaaatcttgactgagttttcaaatttaaattgaaagcttcaaatttgagttgaaaatttttaaatcttgacttgaaagttttgaaattagagttgaaagtattaaattttcagtagaaatttcattctaatttcatttttttcatacactgtgtatataaatgatgtgaacttaatcacgtgaaagatagagaagagatgctaactgcacctgctagaaaagttaatcatcgtgggtcgggtgatgctaattgacgcgtacacatgctagtatcccgtcaaacacgttgctacacttgcgaaaattttttgaaaaaatactattcatcgatctttctttcataaatataccggatgtggtttgattagcataaatataccatcgaaatcgcgtttagaaagcgcgataccgaggttcgctacgggaaagcgcgatatcgccacggtatcgcattaccaatgcgcgagagcgtgacggtctcgcgcatcgaatgggcgaggagatttaagctggcggtgtcgctggttggttatgcgatatcgacgcggtatcgcatttccacggagcgagagcgccacgttgtaccgatttgggtgcgacgcaggtggagtgacgccatcggtctcgcttattggcagcgctggcccgcggtctcgcacccccgaatcgcgagagcggcatcggtatcgctctttcagagcacgatagcggttgtggagtgggccccacggaatttttttgctgggagatcaggcagccgtggtatcgcaaaggcggttgtggagtgggccccacggaatttttttgctgggagatcaggcagctgtggtatcgcaaagtgggagtgcgatgttgcgcatgggggcccgcagtctcgcacgttggttttgtgagaccgaaggcaatgtgacgtatcggtgctagagcctacggtgtcgcacaaacaatgtgcgagaccgcacggcatggctgccacagggccagtgattaatgtgttaatcaccttgattagcaactaattgatcattaataatcattaaataatcactaattatggtaattaatcactaattaccgctctcgtgttcctgtagcgtgagactgcttgggttgcagtcgccggccccagggctctcgcatctctcttgcgtgagaccagcgctctcgctttcctctcgtgcgagatcgcgcatcgcagcagttccgggacccaccgacttgctctcgcacttttagggtgcgttcgttcctgggggattgggtgagaaagcccatcgtattccgcgcgcatgcttcccaaactactcaacggtgcatttttttaaaaaaattctattagaaagttgctttaaaaaattatattaatctatttttaaaattttaaataattaatactcaattaatcatgcgctaatggctcacctcgttttgcgtatcttcctaatcttcttaatcttcttctcctcaaactcacccttagagtgcgacaccgtgcgctctccctaattagcaaagcgatattatatgaccgcctaggccatcgtgtgcgctccgtcctcgcagaccgaacgagcgataccgctctcgttctcgcgcctcgatcttgtgagaccgtggtctcgctcaatgaaaccgcgacggcggtatatttttgcaaatcttcacgcgttcagtattttcttgcaaattctacagaaaatgcgtatatttctaaaattttttcctacacttgctagtatcctgggagtagattttaatcctcgaggggatgtcccttcgttatttgcacgtcacttaaatagttatgaaaaaaattatgaagatgtattaacatatgatatatcactccacaaacatttaagttcaattcaactttcacatcaagctaattactataaataacatgtagatggagggagtattaaacataaataacatgtaatgacatttaaatagaaagagtaattagagtcgcgcgaatgcgattaataggttagtttggttgattgagcattgacaatatcagcgttacaggcttacagtagcaaacccatgattaaaattataaaccacagtccgaaaaagttttgaggcagtgttacatagggttttcttttttaaaacaaatttatacgaaagttgctttgaaatactacctctgttctaaattaattgtagttttacgttgttatcatatattaaggtttgaaaaaaaaaactataatacccgtagcaatggtttatattaagagtggagggttgttgagggtaaaatagagataaatttggatgagaggtgattaatgctatccttagtattctattgtgacaattattttggaacaaaatcaaatattagaaatacaattattatgggatatcatattaactcattttttattttttaagcctatactatatgctagccaagtaaatatgcaaccttttattctccagtcgaggccttttctcctgaaaattgaggcatatggaaactactcaccttttgctgcagcaagaataactgcgcagatcagttgctaatttaaccgcatcatcatcacgtatgtggtaaagctggcataacgttgatcgacaattcgccatagcaagcatgggccgtccgtccattggaccgaatttctcggcccatatacacgggtgagcccacaatagccctataaataggtgggcccaaggaaaaacgcaatgctctctcgcttcgtctcttccgcgtcgtctcccgactctcccctttcttccccaaatccgcgctaaaccctacctgcctacccgagcggcgcggcgagcagtttccggccatgccgcccgccgcccgccgcccgccgcctgagcccgccgcggtcggactccacctccaccatcgtggccggcacggcggccgggtcccacctcctcaagatcgacgggtactcgctcaccaaggggacccccaatggctcgttccttatctccagccagttcaccgtcggcggccaccgctggcgcatcaggtactatcccaacgggttctcatccagctccgccgatttcatttcgcttttcctcgtgctagacgagaaggtgaaggtgcaggcgaagtcggacttccagatcagttacaccggccaggtggatgagccaccgtggttggcaaccatgaaagcggatactttcgatggtgcgggctttcggtctttcggctatgaaaagttcgtcagaaggtgtgactttgagaagctcatcagggacgactctttcaccatccgttgcgacattgttgtcatcgacgagatccgcgccgaggagtcgaccgagatcaccaccaccacagccgccgtcgtcaccgtgcccccgtctgacctgaaccagcagctcggcgacctgctggagagcgagaagggcgcggatgtggtgttcgaggtcggcggccagacgctcgcggcgcaccggtgcgtgctcgcggcgcggtcgccggtcttcaaggcggagctctatggcttgatgaaggagggtggcaccgccgccggagccgtgcacatcgaggacattgagccgcgcgtgttcaaggtgctgctccgcttcatgtacaccgactcgctcccggagatggaggaggaagacgtcatgtgccagcatctgctcgtcgcggcggaccggtacaacctcgagaggctcaagctgatctgcgaggagaagttgtgcaggcacattagcgtcggcacggtatggaacatcctgccgctggctgatcagcaccactgtgacgggctgaagaaagcgtgcttcgatttcctcggctcactggcaaacctgagtgctgtcgtcgccagtgatggcttcaagcatctttgcaggagttgcccctctcttatggaagagctggttgtcacgctggcacttccagggagtcatgcttagtgacttactgttcatgtgttcttgcaatggccagtggtagtttttgttgctgagtttgaacctttgtcatcaggtagtttaatttgcttatcttcttttagcacactgatatgcgggtgaattccccgtgtttaggccttttaccatctatcctaagcagaagttagaaatcgtctcagttttttttactatccctacagcttcactattaaatctctatggattgtcacttgttacctggtattaaacttaactagatgctggggcgcgccaatggcgcgccgcctacacatagattggttgattactgtagactaatcatttgttttctggctgaatcaatgattatgtaaggagaaaacccacgaatacatttgcaggggatgctgttgatgagtaattttgcatacatcgttgtacagattctgctgagaacaaaactcttacacattacaatctaaagatgaagcaccaatgcatataaaaaatgaaaataaagttttacataatgatcggaataatgtgtccatggtgatggtacaactatatttgatcatacaaatctaccagtcaaaagaagacattgtggcaataacattctccgctgaaaggttcacatctggagtactaattgcaatggacctgttcaagcacaatccatcagcattcaatgagttttaaaaaaaatgtttcggaggatattttcaaatcagtatcaatggaagctcataagacacttgttaattggatttaggaagcgtggcaacataatatttccattttacttctcaatacagatagttatatcaagtggtacagcacgatactacagatttgtgtttatcacatggaaatgcagtgagagcaaaagaactctagaatagattgatatggaattaagcatgaagggtaagaaatttacaggataatcaactaataattatccttcactttttcctacactaaggcaaaaaaaatgtgtaaatcaaattgactgtcactgagaagatgatattctgtcagtcaaaaacgctaaaaaaaatacaatagcaatgcaaaagtaaacacctttcatcgcttgagttgcctgaagctgaaagccattcaagatccagaaagtttgaatcaccagaatgaatgcaactttcagtttcaacacctagaacatgatgtatctgaggtaccatgggagtatacctgtagcgaattttgagagaggaatgttagtactccactatttaaaacaccatgctttttcatgattttctaggaaaatacttgtatgagaagaatgaaggtcaaaaccctgaatgaatagaaaccaaccttaagtttgatacctcactttcagaggtcaatgaaatttcattgccatgtactgaattagattccaacactggaaattgtgacccacttttaacatcaagcaatactgcattcaacagctccttgtctccattatggcaaccactacatccagatatggatgtgttgctttcacaaagaatgttgccatatgatctcactctttttactgtattgtggaattaaagaaaacagtataagaaccccttactgttttacaatgtgcatatttcaataaggattatttttgttttcttcgaacgtaatcagcagggaagctacaaaaggtaatacatggctaaaagctctagtttaaataggaacatcctgctacagttcaaacacgttttggaatagcaaatcaacataacatgcaactcctaactatgttttcactactgcgtaccattgacgcctgtaccatgatttttttttgctacttactgttttttaacaatgcttcagatgacctctctttgcagagaatattttcagaaaaagatcacggtacagataaattagacgaatgtccatctaaaatgagaaatataacaccatatgaagtcaagcaaaagggcaaatatattctatactgaagttaagtccatagaacagcagtgcagaatccaccaatgtccttg

SEQ ID NO: 22409 - DNA, 784 bp, Oryza sativa
atttatagataaaatgagttttggttttcaaacaaagggatacgaagaatttaaaggaacaaatttgctagtaagcatagaatttataggaagattaactaatagaagtgcctccaaatacaaaataaatgtaaatgacgtgattgaaaatatgcactctaagggaataactttcatgagccctttaaaaataagttctgaagaaagggcaggagaagaatggaaaattagtgatttaatcgaaagcaaaactttgagtcagcctgaaaattatataagttatcaaaacagtaaagggaataccagcattagatttataaattacaaacccagaaccacagatgacttagaaacagaagcatctgatagaaatataatagataatagaagacatagtgtttcagagtttatggaaaaattagatcaagaaagtgagataaaatattacgaaaataaattaaaggaaataaatgaagaatataataaatctatgaagtgtgagtggcctaaaataagagataaagaactttatttctatagagaattagctagagtaaagaaagtaaagaagaaagaagatatggcagtagaaatttttaaaaaccacgaaaccatgatagaacagataaagaggatagagcaagataagcatggcaaagaagagcaaaatcttggtaaaattttaagtgaagaagagcaatgggcagagaatgaaagattatttcttgaaagttatgaagaacaaattaatctaataaatgagatggagaatatagaaaatgaa

SEQ ID NO: 22410 - DNA, 594 bp, Oryza sativa
gcataataaccctcgaatcaatcgctaaatattttgcgcctaatccaccgatgttcagtgactctcctcgcgcaaccgcatcagacagtctcaccggcactgacgttatggcggcgcttggccttgctggccacaagtgcgggtttggtttcgatctttacctctcgaaaatcggcattagcagcccagatatagcactggagagactctatgagcaggcacgtaagttatcaggtaaattcagagcactgtctgaactcgatgaatcagctcggtcaggcgtgcttaaggttctctgcgcttttgcataccaggattattcaagaagtgctgccagcactcgaaaatgtgattgctgtgatggtggggatttacagaggcgcaagtgtttaccaacaaggtctcatacccatgggggaaaccgccttactggtcgaaaatgtcgcgtgccgttcgcccaagcgactgggagagctggacacaggcgcgtgaggtggtgcgagttaagtgcaagccgtgtaacggaaaaggcgttatcagcaattcgtgtcgctgccatggcaaaggtaaggtgctggacaaggctgatgaact

SEQ ID NO: 22411 - DNA, 26246 bp, Oryza sativa
aactcacctcacttaatgaacatttcttaaaatgatagcgtgacttgaccatagaatctaatggtgcacaacactccccttcttgaatattgtcatcgattttcaaaacagggttaggtaaatttatccgaatagcatcaacgttgtacgatccatttagtttctcacatttttccatatttaaaggagtattcacatctaagcatatataaacacgatgcaccatataatctcctctattattatatttaccaatgacatgataattattccaagaaaaacatggaaaatcgtaaaatttcttctctaaggtatttagatcacaaggagcatcaaattagatataacctaaagtacataaagaagacaataatttcagctcttcttggtcatcagcgataacatagacatgtttattttgagtggaaaccaaatattcagaaatagaagtaatgtgttctttcactagttgtggcatgtatataagtgaagcattgcacaactctctcattacaagcattatcaatatcaacacaatctgaatttttagcttgtgataaaggcaaattagaaatctgttccactagaggttgctctaacatagcataattagtggacaattgtagcatatcgcaatctttcttaccttggtccagttgaccatcagttaaattacttgaaacactctcttcacctaatttaggttcttcattctccttttcttcaaaattgtttttaccttcctgcacgatgttagatacaatagaaggcacaaaaatattctcatttatcataggcatttttgtttctttctcaatctgactttcaatatcgcaagcaagcaaaagtaactgaaaaagatggctatgtgttttattttcaagcctattctgaatttttaaatcaagcccatgtaaaaaccttgtaattgtatcttctctagactcccctgtaccaccgtaaaacatataaattttaaactcccggtggtactctttcacggttctattcccttgtttcaaattttgtaatttcttttgtaaatcacgaatataataatcgggtacaaatctagctctcatcattgtttttaagtcattccaagaacccggtttcttactgacgagacaaatatcactccaccaaagagatgcaaaagtaaaagaactggtggcaactttaatcttttattcctcagaccattcataatattcaagttcatcttccacttctaactcccaatcaatatagttcttagtattaaacttaccaacaaatggaggcaacgatatcttatttttacaaacctcatcatgtacctcttcttgatgtgaaagccaatgttttatatgttcaatcccgttctctttgtacgctcctgtcattgttagtaaccaaaagaaactcacaagaaagtgttagttcctaacaatttatagatatttggagcttttgaaggcactcaacactcaagcatataccaattcttataatgttctcaaagaatgcaaaaacaggtcaatcaccatggctggttcatggcacaatgacacgcttgatgagtgaagcgattgtaaagccggacctataaaggttagtagtatgtggatcttggtagacctaactatatcacaaggaatagcaaaaatcaaatagatttgtgaaattgaataatagtccaaagtactagtcaaagttgctggcctagtctagactcaatccttgttcaagcaagcaaatgatcaacactcggactagaaacaactcgactttatcacatagtaagcaagtctctccaagattccaacaaaacaaatttccacactttcttttttttttctgatttgtttgctcttttctcttttttttctgattttttttgtgcggctcttttttttgcacctttttttttgccttttttttttgctttaacaagtggcaagtgcgtgcgcgcgcatgcacaaatacaagcagctgctagctattactgggagagaagatcacgtgcatgtatggaacttgcatgcatggctaaacaaaggaaatacaccaaggtaattacggagattaactactgaaacaaagaaaccgaaaagcaaggagactgaacttgtatgcacgagataaacaaagggcccacccaatttatgtgttgcgctgcacacagtaggagggaaacaaaagagataatctcccccaactaaaaggaaactgactgaataatttagaggaaacagatccttataatttcttgcgcaagcaacaaacttaatcatgaatcgatcaatctgctaattttcttcaacctataacgaacatgcagtgcacaaccgagatgcaaaactcaaaccaaggtgatactaggactaaaatcagcactccgacatgacgatggaccaaaaactcaacaaagcaaaactgaataaaaattgcacggctcaaaactagggttcggtaaagggaaaagtggtacggcaatttgtagatgataggtaggaaaaataaatatatacaactgaaatcctcactaggtaaccgaagctctgataccaactgataacaatccggcccaggtggggttggccgaggcccaataacttaaggttgctcggaccccaacaagctttggcacagctactcggggaaatgtccaatctccctaaaagactagtccaataggggaagggtggctctcccttttaaggtggctttctcctcccaagctaagcaaggtgggattattcagagcctcacacggtcgccgcccgactttagcgtctctaccagcgggtaatagtggagaatgtcctcatcattcccacccccttaaacaagggcacagctctgataccaactgatgacgctctctctcgtggcccgatcttctggtgaggggataactctcgttttgatcgagtgcgatgtttgcgacgtggctaccaaccagaacaagtccaggacgccgtgcaatcgctacaccacaaacgatgtcgtaccaaccgtgacgcgcggttgatgatccctacaatgcaaacgagagaacactgcaagaataagataagatgcaatctaaatattacgaataggtgattaagcacaaaggaatagttgcgattgaagtagtagatctaatcgacccggtaaatcgacacaccaactattgggggctctgaatctatagtcgccgactaatcgagcgaggactagagacaaggtgaatggcacatggcaaaattcatctaaacaaaacccaaatgtttttgaggatgtacaaagctatttataaaggaaaataaagctagggttaagtgctaattcgtggaggtggagggagatacttccgagatgggcctagtctattacaaggcccaaggcccaagttcggtttcagcaacagtactgtcttgttttggcgattcccgttgactcgggatgaatttggacatgagaccagacgcgtttgaaaggtagcgagataagctttccacaaagtccaagatcacccaaatcggagttggcatgaaggctctaggtccatttttgaagtcagtgctgtctccggaggccgaattagattccaaaactcattggactttaatatcttgtatatccaccattcatctgatgtattatttggaaatgttttatatttctcatgcttggtggtatgcatatacatgatggtcacatcaactcttctgatggccccccccccagctcaagtgcgcctgtggtcacccaattggatccttcacatcacctataccctagaatcatggtagacattttatcaaatgtgcataaaactggttcactatcatcatttttgcatcgcaggcaaatccccctagcatgtatttgttgcttaacgtgactttgacctgcaaggtggatgcaaagtttgaatttgggaagatctccttcatgaatatgtcgatgatatggttgagtactacaacaatggcgccatacattgccacgatgaagccatattagtcttttgaagcatgagttggaagagaagacgacccaaatgcaacagattgaagaagataacgagaagtgccttgcatagcttaaagagaacattgctaagttgaaggacaatgaagacatcagaagggtcctcaaagaattggacagcttgctaatttctaaaaaggatcgaacagctacaggggtaggggatgcgtttagtttggggacaaggtgcgatgggttagactcatccctgtttttaggatgggatgatcctatctgtttggaagaggggatgggatgatccaacttttgaaggaatgacccacatgtcagcgagagaaaaaagtgggttggattggtatgccgatttttgagggacaataccaacccgatcttcgaggaatattccctgtcagggaccatcctatcccacatgtccccaaactaaacacactgaaaaatgggttgaatccaacctaacccacccaaccgtttaatcaaaatcctcctccatggaagaccaaaagtaaagcaactatatataccagactattggatatatatagttgaaccaaaaattatttttctaaaaaaattatgtatatatgtatgaacatcgcaaatcaccctatgattacgctatatttcaggacacacatttgggcattagatagctaggatatcgaccttttcattatcattctgtaaatgaatgtgtcgattactgcctcaaaattaaagctataagatgaaatgtgatggggaaaaatcaatttgattattttttcactaatataaatcaatttatttttcacatattttcgcagcatacaaatgtatatgtgaaggatagtttatttttttcatggaaaatggccacaacacaaatacacatcaaataaagtaatgaggacacgactagctcggatatgaccatgactatcttatatcttatgtattcatcaaacaatggtgcatatgttctatatttggattttagatgcagaaaaaacaacaaacaccgaagcatcatatgcagattaaatgaagacgagcatgtgtaccttaagtactactaattcgtctctagcagatatttttcccatatacaagcagtacaaattttgctcatgtccagcaccagctggatgtattctctcgatcgaaaagagaattgaaggatcgatggaaaaaagacaagtcatatctatctctttgttgtcaacagactagctagtactccccccgtcccaaaataactgcagttttacactattcacattcaacgtttgatcattcatcttatttgaaaaatttttatgattagtatttttattgctattagatgataaaacataaatagtactttatgtgtgactaaatattttcaaatttttcacaattttttcaaataagatggacggtcaaacgttgggtacggatatccacgactgcacttattttgggacggaggtagtacattaaatttatttgaaaattttttatgattagtatttttattgctattagatgataaaacataaatagtactttatgtgtgactaaatattttcaaatttttcacaaatttttcaaataagatggacggtcaaacgttgggtacggatatccacgactgcacttattttgggacggaggtagtacattaaattttgatatgactatagctagggtccaaatatactgatatcaaaccattgcacagcctgaaatgtataattcaaatatttgtcatcattctatgccttaaatattagtaaatattctttcaggaaaagatggactgttgctgatacaattcttactcaaatctgaaactataaatgtggaactacataaaacccaacaagaacttggagtgtgctgcttcttgaactgtatgcaagcacatacatataggaagtcatagactaagagctgtagctattatttgaacattggcttgcacataataattttgtaataaaaaaaaacaacggaccaaactaattaaagaccagaactatcatgagggcatataagcctgtatagtgatcctagataccactaaactataagttggctaaattgatacaagaacatttgtaattctgcaaaataaattgctgctaaatttccatgcaaaaaaatagttgctgaattacgcagcacatcaaccaaaaaaacacaagtaagcacttcttgcattcaattcctagagcatgaaatggttgatttcctaagaatcatgaacgatcaaaaccaacagtagtgatttattttttgtttctcattatgatgtatatagaaatgcattctaaacgtactacggtctgcaatccagaaatttgcatgaacaaaatgcagatcattgtgtaaatttttgtatataattatacttgtgctggttatggttaaacttttctagcaattctcatgtccctgtagcctgtagggaccgacaacctagcacatatatatatacacctaacagattcactggcaacaataactgcaaacaaaaacataaatcagcaactctatggtaactgaagtacatcgatcagatcaatcgaactttctggtttataaattaaaaacctgtctattctattatattgttcttcgcgtatttatttgtagagccttcttatttgtaattatctttttagttcagaaagaaattaaacaaagaataatatatatacaacggtagatttttttttatggggagcacagagatcatttgagtctcgatcatatatatatacatacacggataacagtactataaccagaaacagggtaaaaatatcaagcgattttagatgcaacaaacaacaaaatatcatatgcaaattaaaagaagatcgacacgcatgtaagtaccactaattcatctctaccagagttctttttttcccaagtacaagcagtagtactttagcatatgcccagcatctggtgtataattctctgcaatgtagttctcgaaggggaaaaaaagattcatatctatcttgtattgactagctagtgcatcaaattttcatgactatatatggtccaaatgctgatcaaaccattgacccaagtaccccaaccttatatcatgcatcattcaaatatatgtgtcatcatcctaccctaaatgctgtgattctttctagaacaattaaactgctgcttaacacaattcttacttaaatctggcattaaggaactaataaaaaaacccaagatttagagtgtgtgctacttcttgaactgtatgcaagtgcatatatgtttatctggtctaattaatttgatactctcagaataggagaaggcgtataactaagttccagtgagctataatatgggaacactgatttataccctaattttagagaaaaaacaacggaccataagtccagaaactatcatgaataaacataagcccgcaaaaaataatgttatattagattctaattaaactaagttggctaatttaaggctatagacaaacatatatataattatgcaaaacacatttattggctgccgaaatttcctgcaaaaagaatcgcgctgctaaattacatgagtgtacacatcaaccaaaaacacacatgtgagcacatattgcattaattcgtcctagagcatgagatggttgatttcctatgaatcatgcatgatcaaaagacacagtgatcgatatatttttgtttttcatatgactagagctaatactgatatcactgtggatcacaatatggctgctggcgatcgatgctgacaggacagggagactggaatacactttcttctacaagccgatgctaatcgaagaccaaaagaaagctggttggacagtatattgtttatggcacagtgacatatatgctggaaagttgctactagctatgaagttttgtctgtcttggctcttttgtatttggctgtcagtttggaatttgctcagcccagacttgcctgtttttagtgttgttcatgttactgagcattgcaggatatgatggtattatatggcatcataacctggcaatttagttgggataatgtagttcagttctaatcttttaaatatgtaacctatgccactgattttttgcatttctgatcatatctgggagaggatatttctcatctatctcaaaataaaaaaagatattgatcatcagaagaccgcaccccggataaaatcagactactacgtatacatacaaactcaagataacagttttgtgatccctactggcacaagatataaaccagagtaccagaccacataataatatttcttataaaaaaaaacgtgccgaaggtctgactcatttcattgatactttgatagagaagagaaatgcaaaaccaacctaagaaaagattcgccctgaaaacaccaagctacaagcaccatacctcaagaacaccacaaataattaaagttatacactaaaacacctgctgcaaaagcaattcagcagtcagcacctgtagcatactagaacacaaaacataagcaacccacagatgccacgaaaccaacataagccctgctttgtagcccagaaaacgcttcaccacaaaatctcaaatggcagtatagcacacgcacaccacatcataaaaaaaaaacattgtttcaacttcttgttcgatcaacagaaaattaaagtctgacagcatactgataaaaactcaaatgacagtagcacaaggataataactagttgagttgatcaacatgaacgataaatcactactaaagcagtccaaaatgaaagttttaaatccagagagatcacataggatcatgatgatgccgaatccccttccttcacgcaatagtatggatcaatccatttgtcagatgatcacctcatccgacccaccacattgccgccttgtccttgacctgaaccagaggcgttctgtgacgccgacgacgatccatggccaccattatcggctgctgccacagctgccggagcagtagccgtcgccatggacgccaccggaaccggcaccatggatccgaagagctagaagtttgtcatccgcatggcagcggtggtggtggcggcggcggcttgccctaccatcggctcggaggtgtttgcggcggacggcgtcgacgacgagcccttctccattgcagctaaataaatctgatcaaaaaagagagcaagtgtcacgtacacaatcttgataagagctagcgagtgagataattaaataagtgtcacatacacaatcttgaggtgaaaagtggggaacacatttatttaagcagatgggagaaaaagattattataaacactgaaaaaacacacataaaccctagctatacttttatcctatttgcatggagacactatacgtttcctcatgaaatttttctacctgagcagatctattgaagaaaaataaaagagaatggttgtacatgtcgttgctcgcttaccttaacacagatctgcaatgaggagaaaccctgccaaaagacaaaagattatctatccggtagagaactagcacacaacagatccagatttgttttttcaaccaaaaaaacagtgaagaaatcagcatgaattaatcagacccaatgctttttcaatcaaaacatacagaaaatccctctccataaaaaaagacacaaaaatcaatctgaatcaccccagcacatatcagatctatataaacatcttgatatattcacatatggcagagaaaagaacaaatcccatgtagataccctagctacctcaagtcctcgatatatagtatcagaggacgaacagagatgctcctgatacatataaatcaatcttaaaacctattatattaattacctcccattcaaatttattcccattttatccccaactacctttttaacatccaaccatcccttatctaattagggatatcaaagtcttttctcctcaacattaatacgtgcaatgcttgcagagtatatggaatgttatgggtgcatatatggttttcctttatatgcatccataacagcttatattggtgttgattaattgcacccccaacatttgatcgagaggttcaaacattttctccattgggtatatctttttatttatatcgtacatctaatacaaatttcaattaaattttattcataactcaaattggaggtgtgaaattagtccaaattaattatcacgagtatgtggtttattttatgtgcatttgtgttgtggccattttccatgaaaaaaagagactatccttcacatatacatttctatgctgagaaaatatgtgaaaaataaattcatttatattagtgaaaaaataatcaaattgatttttccctataacatttcatcttatagctttaatttcgaggaagtaatcaacacattcatgtacaaaatgataatttaaagatcgatatcctagctatctaataccaaaatgtgtatcttaaaatgtagcgttatcatagggtgatttgcgatgttcatacatattatcatggttatagataccacatacccaatagtaattgactaagctcggtgaggcctaccatataccaagtcttatacataatcatatctcgtatatagaaggagttccggataaggaaggacaagaagagttatataaggaaactataagaactacccggattgtatccatatcgctctccctagttctacttggacaaggggagaggagggacagatcgacactgttaacgccaaaatttggtaaacccgaagttatcatcagcctagagtcaatatcggcttcagagtcctggaatcggccaatgggaattatcaagtcgccaatagccaaatttttgctatatttggtaaaggaaattaatctattaaagaaagtttatctagaagtgactgagttcaaggaggatgcggcatgacggtttatctattaattaggcagtatttgttagtttccttttatctttaggaaagtgtgtttagtgtccgataaggactttatgttttccttttatctttaggaaagtttctttcttgtcctaaaaggactactttctacccatggcgttgagccgagcggcctcagttgcaaggacaagaacatgttgccaccttgtccttgacctgaaccagaggcgttctgtgacgccgacgaggatccatgtccaccattatcggctgctgccatagctgccggagcaatagccgtcgccatggaagccaccggaaccagcaccgtggatccgaagagctggaagtttgtcatcggcacggcggtggtggcggcgatggcggcttgccctagcatcggctcggaggtgttcgcggcggacggcgtcgaggacgaacccttctccattacagctactgatctgataaaaaaaaggagagctgaaattaaacaagtgtcacgtacacaatcttgataagagctagttagtgagataaataagtgtcacatacacaatcttgaggtgaaaaatggagaacacatttatttaagcagatgggagaaattaaaagattgattattacaaacactgaagaaacacataaaccctagctacttttatcctatgcatgcatttcctgctcgtgaaatctacaatgaagaagcacctaaattaaccctagctacttgtatatatcttgtggactataggtttcctcctgaaatttttcctgctagggaatctacaatggagaaacacattaaccttatctacttgtatatatcctgtatggactatacgctttctcctgaaatttttcctgctagggaaaaatctacaatggatcagaaacacataaaccctagctagctacttgtatatggactatacatttcctcctgaaatttttctacctgagcagatctatatatcgaagaaaattttaaaagaacggttgtacatattgctgctcgcttaccttaacacagatctgcaacgaggagagagaaaccctgccaaaagacaaaagattctgcaaccgttagagaactagcataaaacagatccagatttgttttttcaaccaaagaaaacagcgaagaaatcagcatgaattaatctgacccaacgctttcaatcaaaacatacaatccctctccaaaaaaaagatacacagaaatcaatctgaatcaccccgtcacatatcaaatctatataaacatatcttgatatatggagttattcacatggcggagaaattacaaatcccatgtatatatgctctaggtacctcaagtcctcaacacagatatatagtatcagaggacgaatagagatgctccttacacatataaatcaatctgaaaccctattaggtctatacatctaagatatataaacagatttgtttcacagataagcagagaaagaacacaaatctcgcatatgctcttgcctctctatctctgtctacctcaacacagacagaaatcagaggacgaacagagatagatcgatagctagagattctagcttttgctggcttagctaggagaatatcgagacgagcagaaatcagaagaagagctcttgcgtcgaaatggctggagctttgcagatgagtttgggagagaggacgtgaggtgtgggtgcctatttgtagaggagggaaatcaatgcatgacaaatttgcaaaaaagagtatttgaaatttggagaaattttgtgggcgcgggctgcagttcacacatgcgcctaattcgaacgttaggggtgtatagatggtcttcctttttaagcatccatccatgaataatgacagcttccaagctattagctagcagcattgccacgtttgagggaaggttcaagctagcattcctttttctacttgctagttaaatatttttatattccaattttttcgtcctaaaaaaatatgtaagaagttcgttcaattttttcatcctaagagaaatttgaattcaaaaaatgctttgctcacaaaatacaaattggaggtgtaaaatgtatatttttgggctgcacatttttaccagggaagcttcaaatatactgcacgaaaaggagatgtgtgaaaaataaatcgatttatattagcggggcatgtcaatttgatttgttccagtcacgtttcatctcatattatgcttttaacttagagagaaaagatcgatatggtactacccaaatatgttcatttgcaacatggtaaggaaaagatcgatatgctactacccaagtatgtacctgatctgaagtaggagtagtactctagctagctagcagcttgtaccataaatatcttccttatttaggccatgtttagttcgttggccaaaattttttttaagtatacggacacatttgaagtattaaatgtagagtaataacaaaacaaattacagattaagcctaattaatctgtcattagtaaatgtttactctagcatcacattgtcaaatcatggcgcaattaggctcaaaagatttgtctcgtaatttatatgcaaattgcgcaattggttttttttcgtccacatttcaagctccatgcatgtgtccaaacatttgatgtgacatttttggccaaaaatttttgggatctaaacacacccttatcctttctcgactgcattggactagggtcttttagcaatcgccataaaagctagagagttgacaaaagggtgattcagaatgttagtacatataaggatttatagagtattacttgtcctattaattacctctcattcaaatttattcccattttatccttagctacctttttaacatccaaccatcgcttatctaattagggatatcaaagtcttttctcctgaacaataatacgtgcaatgcttgcagaggagtatatatatggaacgttatgggtgcatatatggttttcctttttatgcatccataacagcttatattggtggtgattaattgcaccccccaacatttgatcgagaggttcaaacattttctccattgggtaaaccttttatttatatcgtacatctaatacaaatttcaattatttttatttgtaactcaaattggaggtgtgaaattagtccaaattaatcatcacgagtatgtggtttattttatgtgtatttgtgttgtggccattttccatgaaaacaaaagagactatccttcacgtatacatttgtatgctgcgaaaatatgtgaaaataaattgatttatattagtgaaaaaataatcaaattgatttttttcctataacatttcatcttatagctttaatttcgagggagtaatcgacaaattcgtttacaaaatgataatgaaaagatcgatatcctagatatctaataccaaaatgtgtatcttaaaatgtagcgttatcatagggtgatttgcgatgttcatacatattatcatggttatggataccatatacccaatagtaattgactaaactcggcgaggcccaccatataccaagtcttatacggaatcatacctcgtatttctggataagaaaggacaagaagagttctatatggaaactataagggctactcagattgtatttatatcggtctccctagttctatttggataaggggacatctatgtgtatgaatagaagcccccctagggggagagaaaggacagatcgacacacaagttagaatagacaccaacacacgctgccaaacatcgacattagagataagcctagacagacccaatatggtgcatgaggaggccgacaagagggatctagcgccatctctgatctcgatgagttcgtactcgaggaggaagactactatatcgtcgactacgtgttggttatctatgctgccaagtcgacgccagctagataggttatcccaaatattgtacttgtgtgatctagatgaataaagagcaacatcggctacggccaacaggagtagggctattacctgtcagataaggggcccaaacctgtataaaaatcattttctccatcttttttacctcaatctcgcatatactctggtaccaacgatctccataccattcaaaaaccatagtcgtgacctcaaacgtcgacatatatatacataatatttttagaaaaataattttcagttcaacccctcgaatagtctgatatatatagttgctcacttcccctaaggggatatccccctacccccatagttgtctgatcctttttggagattaacaagttgtccgattctttaaggtcccttcggatgtcttcattgaccttcaatttatattagcaacgtactcttcaagctatgcatggcacttcttattatcttcttcaatctgttgcatctggttgtcttctcttccaactcgtactttagaagactaatggcttcatcgtggcaatgtgtggcgccattgttgcagtacccaaccatatcatccgacatattcatgaaggagatcttcccaaatccaaactttgcatccaccctgctggtcaaagtcctgtaagcaacaaatgcatgctagggggatttgcctgcgatgcaaaaatgatgatagtgaacatgttttacacatttgagaaaacacctgccaggattccagggtgtatgtgatgtgaaggatctaatcgggtgaccacaggcgcacttgagctgtggggggaagaccatcagaagaggggaggacagcactacatggagtatttcggttgatggaggaagaagatgaactctgcatcgccatggatcctaagaggaaagtgaaaatgcttaggtgtggacagagagcaatgtggcctggagacttcgatctgtattaattgagaggaggagaaaagcacttgtagaggatcagagctgaatccattgaataatatagttttggtacatacgtgggccaaatgaaatgacattttgttccatatacgggcgttagaaaatgagtggaatagcaaaataaaatggaatacctttgaggtgtgggatgaatggcatgaatctcgcgaagggcgatgaacggagatggttgtagggggacatacccttaataaggatcagaagagtttgccttattttcactagaaatactcttgaggttgtcgatttgcacctctagtgtttagtggcatggcattaatattaacaccgtagatagtaagtttatcaatcatgcaaatatatttacactatgcccttcgcaatgcagtagtgagcctacgacacctggtctgactagcaattctaactatacattgatctaattcaaaactcctatagtctaagccgacttattaaatgtggactaacatcggtctggctatgcctcaaaatggtttgactgcctatatcgcttgtttgaccagccttttgatacgtatgaccgacagtaccgaaaatataccttgacctctcaagatactagaccactaccatcaacatcgtagctgatttttgttaatcatagtataatcatcaccatgttttcatagccccaacctaatatgtatcattcaaagttttggcatccaactctaaatattactatatgattcttcttagaacaattaaactggtgttggataaattcttacttaaatttgatagattcttacttaaatttggcattaaggaactaggaatatatatctagagtgtgcttccagctagattagttatatatgcaagcacgtagtatatatgtttatctgatctatttttttgaatgaaattatctagtctaattaattagaaagtctttagaacaagagcaaatgtaaccaagttcaatgctatatagtcatatgtatatgggaacagtgtgttgcatagcttgcagctaatttttgaaaaaataacggaccaaattaaagtccaaaagttaccatgagagaacatataagccttataagcctgtaaaattaataatgatattagatactaaattaattttgctgaagtcataattataaacatttataattctgcaaaacattccgctgctaattaaattacactactatatcaaacaaactaaaaaaacttagcgtatagaattaataagaacaaaacaagcttaattcaatggaagctatctcggaaattttgactcctacctaattctctagaaaacaaaaatataactatattctaaatgtgtcttcatcaattgcagtagcgcgcttaattaaaacaacaatcatacatatgttatattaagcctactttgctaacattgtatgcaagtctgttcattctctcccaatgagaacaagtcagataaaccaaaaacacctagcatatcctgttgatctagaacatgaatgtgatgttgatctgccatgagcatgatcaaagtgtacacctcaaggatctcagatctcacaaattagtgcctcatattatgatgtatatgcaagacttcatacttttatatgaaatacatgcgctaaataattacaattcagaaatttagtgttttttttataatgggtagcaattaatccagtctctcttatatatcgatccacatgtgggtatacacagcaattcagaaatttagttacctaagcaaatgcatatcacactgtttgaaatatctgccaatgtgcatacatatactagatatatagatcaatatggtcctggttatttttttgacgcgagaagatagagccgactctaccagcttatagagccattacattgatagaaatgaagaggtacaaagtttttaaggttacaaaatgaaagaggaaaagtataaaaagagagagggagggaaggatttaaaggttacaaagtgaaagaggaaaagtataaaaagagagagaggggaagggagaagaaggtaaggaggtgaggaaatatacaagggagatatatacagtagtctgaggcgggtctcatccccacctcggaggagtgaacagctacaaattctacaggagttcatgcccacctcggaggcagctgaaacaagggagttcctatacccggattctacaattaatttccgctgcaaatgcatatcacttgctaacatatcatgaatccctttggaaacctgcggaatacacctggatcagaatagtccccaataattgtaaaattttcctttggttggcctttaaaaacaaactaaacaccaaggctaatatatatgcaagcacgtagtatatatgtttatctggtctatttttttgaattaaattatctggtctaattaattagaaagtcattagaacaaagagcaatgtatctaagttcaatgctatatagtcatatatatggaaacattcacttgcatagtttgcagctaatttttgaaaaaataacggaccaaaactaaagtccaatattaaagttatcgtcatgagagaacatataagccttataagcatgtaaaattaataatgatcttagacactaaattaatttttgcgaagtcataattatatataaacatatataattctgcaaaacattccgctgctaattaaatcacactacatcaaacaaactgaaaaaacctagcccaacaactagattatctacctggtctatagaattaataagaacaagacaagcttcaatggcagctatctccgaaattttgacaccgacctaattctagaaaacaaaaatataactatattctaaatgtgtcttcatcatatcaattggagtagcgcgcttaattaaaataataatcataaatatgttaagcttactttgctaaaattgtataaaagtatattcatttcccaaaagaagtcagagaaaccaaaaaaaaaaacacctgcgagagctagcttatcctgttgatctagagcatgcatgtaatgttgatctgctttgagcatgatcaaagtgcacaccttaatggatctcacaaattagtgcctcatatattatgatgtatatgcaagacttcatatacttttatctgaaaaatgcatgctaattaaattacaattcagaagtttagtattttttgtataatgggtagaaatctggcctctatatcgatccacaggtgggttaaaacagcaattcagaaatttacttacttaaccaaatgcatatcactgtttgaaatctctgaaactctgatgatgtgcatacatatatagatatatagatatatatacttggtgcgggttatggttgaatttttcaaggtgtatattctcatgacttgtagccgacaacctagctagcacatatatacagctagttagcagattttgagtggcatatgcagacaaaatcataaatcagcaacgatgatcaatatcttgatgatttatgaattagacaagcctattctattgttccttatgtatctacatatacacatgaaaattaaacaaatgcttttgtaatcatttttttagttcagaaagaaacagaatagtatacagtggtagacttttcagggggagcatagatctattaaggtggtgtttggatccggggattaaattttatagtccctgtcacatcgatcggatgtttggacactaactaaatgtattaaacttagattaataataaaactaattgcataaatgagagccaattcgcgagataaattttttaagcctaattaatccataattagcacatgtttactgtagcatcacatatgctaatcatggattaattaggctcaatagattcgtctcgcgaattagtgcagggttatggaatagcttttgtcattagtctacatttaatacttctaattagtgtccaaacatctgatgtgacaggactaatatttagtctccctggatccaaaaatagggtctagatttcatgcaaacgataacagtgctaattaccagaagtatgcaggatgaaattaaaaatccaagggattttaattagatgaaaaaaacaacaaacaccgaagtatcatatgcagattaaatgaagacgtgcatgtaccttaagtactactaattcatctctagcagatatttttttcccatatacaagcagtactaattttgctgatgtccagcaccagctgggtgtattctctcgattgaaaagagaaggaactccgtgccataaagttctcgaaggaaaaaagacaagccatatctatctctgtgttgtcaacacactagctagtacattaaattttgatatgattatctagggtccaaatgctgatatcaaaccatagctcagcctgaaatgtactataattcaaagatttgtcatcattctataccttaaatattactagtatatattctttcaggaaaaattggactggtgctgacacaattattactcaaacctggcactataaatttggaactaaaacccaagaactggagtgttctacttcttgaattgtatgtgtaatgtttatttggagtaattagaaagtctcagaataagagctgtacctattatatgaacattgggttgcacataattttgtaaaaaaaaaaaaacaacgaccaaactaattaaagaccagaactatcatgagggcatataagcctgtataatgatcctagaaccactaaactaatttgtctaaattgatagaagaacatacataattctgcaaaaataaattgctgctaaatttccctgcaaaaaaatcttgctgatgaattacgcagcacatcaatcaaaaaacacatgtgagcacatcttgcattcaattcctagaccatgaaatggttgatttcctaagaatcatgaacgatcaaaaccaacagtgattcattttttgtttctcatatgatgtatatataaatgcatgctaaacatactacggtctgcaaatccagaaatttacacctgaacaaaatgcagataattgtttgtcgatgtgcatacatataataatacttgtgctgcttatggttaaatttttctagcaattctcatggccctgtatctagggaccgacaatctagcacatatatactcctaacagattcagtggcaccaactgcaaacaaaaacataaatcagcaactctatgctaagtgaagtctcagatcaatcgaacttttctggtttataattaaaaacctgcctattctattgttcttcgcgtatttatttgcagagccctctcttatttgtaattatcttttttagttcagaaagaaattaaacagagaataatatatatacaacggtagaatttttttttatagggagcgcagagatcatttgagcctataaaaggataaaaatatcactacaaccagaaacagggtaaaaatatcaagggattttagatgcaaaaaacaacgaaatatcatatgcaaattaaaagaagatcaacacacaccttataataagtaccactaattcatctctaccagagtttttttcccatgtacaagcagtagtactttagcatatgcccagcaccagctagctggtgtataattctctacattgaaaagatcgaaggtactctgcagtgtagctctcgaaggggaaaaaaagatccatatatatatatatatatatatatatatatatatatatatatatatatatatgtggtccaaatgctgatcaaatcattgacccaagtacctgatatgtatcatgcatcattcaaagatatgtcatcatcctcctaaatgttgtagctagatattcttcctagaacaaataaactggtgctgaacaaaattcttacttagatctggcattaaggaactaataaaaaacccaagatctagagtgtgtgcgtgctactccttgaactgtatgcaagtgaatttatatggtctaatttgggagtctcagaataggagaaggcgcgcgtaactaagtaggagtaagttccagtgagctattatatgggaacactggtttatacataattttagagataaaaaaaacaacgggccataaatccagaaactatcccgaagaaatataagcccacaaaataatgttatattagattctaattaaactaagtagggtaaggctatagacaaacatatatataattctgcgaaacattttattgtctgctgaaatttcctgcaaaaagaatcgcgctgctaaatattacatgagtatacacatcaacgtaaccataattataacacatgtgagcacatctttcattcgtccgaaatggttgatttcctattaatcatgcatgattaaaagacacagtggtcaatatatttttgtttttcatatgactagagctagggtccaaatactgatatcactatatatagatctcaatatggctgctggagatcgatgcagacaggacagggaaactggaatataatgcactttcttctggacggtatattgtttctggagatcgatgctaattaatcgaagaccaaaatagagctggttggacggtatattgtttctggcacggcgcgacgacatatatcctggaaacttgctagctatgaagttttgtctgtcttggcttttttatttcttttgtattttggctgtcaatttggaatttgctcagcccagacttgcctgtttttagtattgttcatgttacggagcattgcaggatatatgatggtattatatggcatcataattaacctggcaatttagttcggataatgtagttcagttctagcctttaatttaaatatgtaatgccactgatttgaatttctgatcatttctgggagaggatatttctctcctgtctcaaaaaataaaataatgatcatcagaacacaacaccccggataaaatcagactaccatgcatacatatacaaactaaagatagcagtttgtgatcttactggcacaagatataaaccagagtaccagaccacataataatattttgtttataaaaaaaattgcgcggaaggtctgactcatttcattgatactttgatagagaatacaaatgcaaaaccaattacctaagaaaagattcgccctgaaaacaccaaactaacatatttgatcaacatgaacgataaatcactgctaaatagtccaaaatgaaagttttaaatcgcgcaacatatttgatgatgccgatcatctccttccttcacgcaatagttatatggatcaattaatcctttcgtcagatgatttcacctctcatccgacccaccacattgccgccgacgagctcgccgtcgatgggccgtcgccgccgtagcctgagcccgatggaccagcaccaccagccgccgccggtggccacagcggtggcgccggcacaaggaccctcctcgcggtccacgtcgagaccgagaagacgggcacgtcgcaccagcagatcacggggaagcacccgccgccgtgcgccgccctgagcaccccggcgccggcaccgcccccgcccgccgccaccatttgctgcgcgagcgtctccgtgctcgccagcgccctggccgccgtcacgggggagaagccggcggcgaccatccgctccgcccagcgccccagcgtctcgtgcctctcccgccgccccgtgccctcacggacgacgatgtccttgatctcctcgccgagcacccaccgctcgacgcacgcgcgttcgtgcggcggcacggccgccggcggggtggagctcgcctccagggcgtcgaacagcgccgcgtagtagttgagcgcgttccagacgcgcgccccgagctccgcgacgttgtggtcggcctcgttctccgtcaggaccaccagcttcgggttcaggtcgcggatggcgcggaggagcgcgtccgccttcgtcttcgtcgccgtcgtcatcgtatgctggctggatccggattgctccgccgccggcctcctgctcgcgacgccgtccacgtagtcggggaaggcgaggaggcggtggatctggaggttggcgacgacggcgaggggctggccggggatgacgacgaggcgggatccgattgatccggtggcggtggcggagagctcctcgatgctggatagcaccggatggaactggaggctgaggtcgaggcgctgggcctccgcggcgacgtacgcggcgacggcggagaggaagtcctccgactcgttgacgacggtcaggcggagcaggcccggcgggccgccggggcgcgcggcgacgaggcggacgagctccacccactggttggcgtcgacgccgccgccgaggtcgacgacgtggacgaccgcccgctcggcctccatcacctcggcgatggacaggttggccgcggcggcggcgaggcggacgaacgggcacatcgcgcggaacccctggcgcgcggcggagacggccggcggcggcggggcccgcgtgaggtggagcgagcggcacaccccgtcgcacggcaggatgaagcgcagcgcgagcgcctcggcgaacgcggacgccagccgctgcgccgacctcccctcgccgacgccgccgccgtcggcgtccccgccggcgaggtcgacgacgcagctcagcccgtcgttgacctgcatctggcacgtcccgtcggccaggaacgccgcgatggaacgcaggaagctcaccatcagaacgtcccgctccccgtcgccggcggggtactccgccgggccacctagggcgaacgcgtcgggctggatccccgccgccgccgccgccgccatggccgccaaggaggacccgaacccgagcccgaccaccgggcgcttccccgcgttggtggccgccggcgccgaatcctccccggccgccggtagccgctctcctcccgctccccctcctcctccacccagggctagcctcgggatctccaccgccatggtgaggttgcccgaagtaccctgcgccgccgccagattaagttggtccgaaggctaaagacactcgcgcagaaggacacactcacacacgacacgggggtccttttatatagcggcgggcgatggctaagggagactggtcagggactcagggcgtcaggcccacttggttgccctagtagcttcctcgttgagtaccgtagtttgtttcaagaaaaaggaggaaaaaggttgggccgtcggaagaaatgattagtttctttaaagtcaatttgttttttttataaccccatttcgaccaccgtctttcaaccaaaaaaaatgggtaaaataaccttcactgcatcgatttgaattagagtaagggggtgtttggatccagagactgaactttagtccctgtcatatcggataaatttggagtattaaacatagcctacttataaaactcattatataaatgagagctaattcgcgtgacaaattttttaagactaattaatccataattagcgcatgtttactgtagcatcacataagctaatcatggattaattaggctcaatagattcgtctcgcgaattagtccagggttatagaatgggttttattaatagtctacgtttaatatttataattagtgtccaaatatccgatgtgatagggactaaaaaaagttttaatcccatctaaacaaggtcaatatatttccactagtttatgtcgtgtcttagctattttctaggtatcaataaaataaagtaaaatccaaaacttttgaacacatttggtaccgatcgactaggcaagaggacctagctagttactcaagaagtgaccggccggccaccaagctaattgaagccacgtgaggctaagcttgggtggccaaccattctggtcaatccagttggccacctagcctgaccgctgcggggcaccaggctagtcagcatcaccgacttagcctaaaggcgaattgacctagcaagaagcccaactaaccaccaagtacactctgacaagccgatcggcttggcgtaggatgtacccgcctatcgaccgatcacttcataaagaaatgcgagggacaaaatcacctcctagtagaaatctcagacatcgcagaaactagacagtgccacattgcataggggagggggataacatcgatcatgggagggttatagccccccaactcaattcacacaccaccacatttcacacccaccatagcagctccattttgttatttttagtcactagagtatcctaaggctgtgttcgctccttcaggttgggaacccatctcctccacacgaaaaccggagcgatccattagcgcgttattaattaagtattagcaaaaaaatttcaaaaatagattaatttgattttttaaaagcaacattcgtatataaatttttttacaaaaaaacgcatcgtttaacagtttaaaaagcgtgcgcgcgaaaaacaggagatgtgagttgggaaagtgg

SEQ ID NO: 22412 - DNA, 2056 bp, Oryza sativa
aagatgatcacctcatccgacccaccacattgccgccgacaagctcgccgtcgccgccgtagcgtgagcccgatgcactagcaccaccagcaccagccaccggcagcggccacagcggtggcgtcggtgcaaggaccctactagtggtccaccccatcacacagaaggatgaaccgcagcgcgagcgcctcggcgaaggtggatgccagccgcagcgccgacctctccccaccgacgccgctggcgaggtcgacgacgcaactcagcccatcgttgacctgcatctggcacgtcccgtcggccaggaaggcggcgatggaccgcaggaaccacaccatgagaaggtcgcgttccccgtcgccggcagggtactccgctggcctacctagggcaaaagcgtccggctggatccccgcagatgccgccaccatggccgccaaggaggacccaaccacctggcacttccccgtgttcgtggctgccgccgaatcctccccggctgccggtagccgctctcccgctccccctccgcctcctagggcaagcctcgggatctccgccactatggtgagcttgcccgaaccctgcgccgccagattaagttggtccgaaggaattgaagctaaagacactctcacacagacacactcacactaaacggggtccttttatataacggcgatggctaaggaagactggtcggtaaggcccactttgtttccctagcttcctcgttgactactactccagtttgtttcaaggaaaaaggaggaacaatctaggttggaccgttagaggaaatgattagtttatttcaactcaatttgtttttttttgtaaaacccactattggccttttagaaaatggtaggcatttgtgtgtgtgtgtgtgggcgctcgcgcatgtgggtgtgggacgggcactattggtcaaaaggcacttatgaggcaaatgcctatgcctattaagaaaatgtgtctacaaggtatttttgttgtgaaaaaaatttgctacaggatactcaaaaagtgtggtctttactggtagacagtggacgcattaaaatacattatcaacccaattgataagagagaacccacgtaaaaggtcagtgtttccctcatctttttctctcttctctcggttttcctcctatctttttccttttgtccttttctaggactcattgaccaccaagcgcttccttgtgctcgtggccgccggtgaatcctcctccgctgcagccatcggtggcaccggtagtcgctctccccctccccctcctcctcctagggcaagcctcgggatctccgccgccatggtgaccttgccggagccctgcgcagccagatttgttaggtccgaaaaaacgaggaagctaaagacacacacagtccttttatatatgccgattgctaagggaaaccggtcagtaagaccacttccttgttgactacaagtttgtttcaagtaatagaggaaataattcaaagtactttctttcaagtcaatttgttttatgtaaaaccccattttgaccatcatctttctatgaaaaaaattgggtaaaacaacgttcaatgcattgatttgaattagactaatatatttccactagttttgtcgtgccttagctattttgcatgtatcaatcaaataaagtaaaatgcaaaaccacaaaatctcatggcagtatagcacaccacatcataaaaaaaaacattgtttcaactacttgttcgatcaacagaaaattaaagtctgagtgcatgcatactgataaaaactcaaatgacagtagcacaaggataataactagttgagttgatcaacatgaacgataaatcactactaaagtttttaatcaaaaatgaaagtttttaatccagagatcacataggatcacgatgatgccgaatccccccttccttcacacaatagtatgaggccaatcacacacgaagacacacatcaggaatcatgcatcaatccatgcgtcagatgatcacctcatccgacccaccacattgccgccgacaagctcgccgtcgccgc

SEQ ID NO: 22413 - DNA, 8478 bp, Oryza sativa
cattagactagaagtctatggtgtccctcgaccacgtggcgcgtgaagaggacccccacggcggcgttgaagtcggggtgtggagatggtgatgtaggttgcgatggagaggtgggcagcagccgctacagtgatggtagggatggctagggaggagagtgaggcaaggatgagatagggagcgaggccagtgccgcggtggcacccaccttctagccctccggaggggattgtcctccctagatcgatggtcagaagcctcctcgtcagttgccattatataggaaaaagggagatgccgggggcagagagaataggtggagagagaaacacaagagaggagagagagagaaaagaaagaaaaggataaagctgaggcatgacatgtggaaagatatctaaatagtccaatgctgtgcatctacactaattgctatagatatctaaattttcaaaagaaaaataaagcatgagtttattggttgcttatattaatggtggtgggagattatgtagtacgtggagggcatgttgcaacatagcgagtgataggcattatgacgggtgggctacggttgcctaggaaacaatatggcgggggcactattggccttttagaaaatggtagtaggcatttgtgtgtgtgtgggggcgcgcgcgtgtgggtgtggggcgggcattattggtcaaaaggcacttatgaggcaaatgcctatgcctattaagaaaatgtgtctacaaggtatttttgttgtgaaaaaaaattgctacaggatactcaaaaagtatagtctttactggtagacatcacaaaaacgtgaatttgtccgaggacactggacgcattaaaatacattatcgagccaattgatgagagataatccacgtaaaaggtcagtgtttccctcatcttcttctctcgtctctcggtcttcctcttatctttttccttttgtccttttctaggactcattgaccaccaggcgcttccttgtgctcgtggccgccggcgaatcctcctccgctgcagccatcggtggcaccggtagtcgctctccccctccccctcctcctcctagggcaagcctcgggacctccgccaccatggtgaccttgccggagccctgcgcagccagatttgttaggtccgaaaaaacgagaaagctaaagacacacacacagtccttttatatatgccgattgctaagggaaaccggtcagtaagaccacttccttgttgactacaagtttgtttcaagtaatagaggaaataattcaaagtactttctttcaagtcaatttgttttatgtaaaaccccattttgaccatcatctttcaacgaaaaaaattgggtaaaacaacgttcaatgcattgatttgaattagactaatatatttccactagttttgtcgtgccttagctattttgcatgtatcaatcaaataaattaaaatgcaaaaccacaaaatctcaaatggcagtataacacaccacatcataaaaaaaacattgtttcaacttcttgttcgatcaacagaaaattaaagtctgagtgcatactgataaaaactcaaatgacagtagcacaaggataataactagttgagttgatcaacatgaacgataaatcactactaaagtttttaatccagagatcacatacggtcatgatgatgccgaatccccttccttcacacaatagtatgaggccaagaacacacgaagacacacatcaggaatcatcaatccatgcgtcagatgatcacctcatccgacccaccacattgcctccgacgagctcgccgtcgccgccgtagcgtgagcccgatgcgctagcaccaccagcaccagccgccgccgacggccacagcggtggcgccggtgcaaggaccctcctagtggtccaccccgtcgcacagaaggatgaaccgcagtgcgagcgcctcggtgaaggcggatgccagctgctgcgcagacctccccccaccgacgccgccggcgaggtcgacgatgcaactcagcccatcgttgacctgcatctggcacgtcccgtcggccaggaaggcggcaatggaccgcaggaacctcaccacgagaaggtcccgttccccgttcccggccggatactccaccagcccacctagggcaaacgcgtcgggctggatccccgccgccgccaccaccatggctgccaaggaggacccgaccaccgggcgcttccccgtgtttgtggctgctgccgaatcctccccggctgccggtagctgctctcccactccccctcctcctcctagggcaagcctcgggatctccgccaccatggtgagcttgctcgaaccctgcgccgccagattaagttggtccgaaggaattgaagctaaagacactctcacacagacacactcacactacacggggtccttttatatagcggtggctaaggaagactggtcgataaggcccactttgtttccctagcttcctcgttgactactactccagtttgtttcaaggaaaaaggaggaaaaaactaggttggaccgttggaggaaatgattagtttatttcaattaaatttctttttttttgtaaaacccactattggccttttagaaaatggtagtcatttgtgtgtgtgggggctcccgcgtacgccgtgcgcgtgtgtgtgggtggtcggtgtggggtgggcacttttggttaaaaggcaattatgatgcaaatgcctatgtctattcagaacatgtgtctatgaggtattttttgttgtggcaaagtttgctacaaggcgctcaaaaagtgtggtcttcgctagtagacatcacaagaacttgaaaccacgtaaaatactttttccacccaattgatgagagagaaaccacgtaaaaggtctcagtttttccttcatcttcttctctcttctctcagtcttcctcctatatttttccttttgtccttttctaggactcattgaccaccaggcgcttcctggtgttcgtggccgctggcgaatcctccaccgctgcggccatcagttgtgccggtagtcgctctcccctccccctcctcctagggcaaacctcgggatctccgccaccatggtggccttgccggaaccctgtgcagcctaatttgtatggtctgaataaaagaggaagctagagacactcacgcagtccctttatatatgtcgagtgctaagggaaactggtcagttaggccactttgtttcccttccttgttgactacaagtttgtttcaagtaatggaggaaaaaggttggaggaaataaaaatgtctagttaaaattattttcaaattcaggcaaaaattgttgaaaaccttcacaacttcacaatttatttaaatcaagaaacaacaccttttctttgggcccctttcttttctttctccttcttttctccgatccaaggaataagtccacttcgattccctcaaatattctaccaatatgattcgtatcccttaaccgcaataccaagtatcttggccccatatatatatatatatatatatatatatatatatatatatatatatatatatataattgaaaaagtttcatactcatttgaattgggtatatactcaatttcaacaatggtgcccgggcaccatggagcaccaaacaaatttactatatatatatatatatatacatatatatatatatatatatatatatatatatatatatataacaagcttctgaggctgtctaagtaggattcgccaccctgcaaagatcctaaagttaaaaaattctctcgaagtgaacagtattgaacagtaaactgaataggaatcagtcgaataaatagtgtttttgaacagtgtatattgtctgaagtataaagctcatattcattaattctttcttcagactcaagattaggtacttctaagttgtcgagtttaggggaggttccaccacgctttcgtacctctgagatatatggaacattattcagaacattttctaagttctgtattttcgttaaattcagaacttgagctgtcaacttaaattcagaacaaataaaaaaggcaaaattaatataataaacccagagtattcccctgttctcgtgaatccacagtagcttgttgtcatctcgaaatgttagtcttctgaagtataagtggtatcagagccagtcatcatagagaaatcaaattcagaagctaatattggaaaggtaattactaccaaagataatctgaatataaggtgtacactaaatcacattgaagaccatagttggcactctaacaatagtcaattaaatttaattgttgatctgatatataatttttatataaattgggataaaaagcaggaagatttagagcgaaggattgaagatttgtttaaagaacaaaagcaatctgaagaacaatatttgcttgtcagtaataaattaaattcagtgccaaaagagctagaggaatataagataaggcagaataagatattacaaaacagtgactatatcaaagaattacccattaaaacgactataaaagaagaagggtattctaaaaaacccacatacaaggaatgcctaacaaaaggagtggatccattagatggggaatatattgattggaaaataatagaaaaatttgtagaagcctccccacaattaaagaaggaattaaaggaagaaatacttaaagaattaaaacaagaaatggatcagaaatttgaacaaataaaaaaggcagtaaatgagaaattagaagtttctttttctgatctggacactatggatcttggtggtcatgggcaaccagatgaatagaattctttaagctaaatatgtttttcaatatatattgataatagaatatcaacaatttgggcgtggaagaagaataaacgaagatttcagaagactactcaagaaggaatccagaagaaggaatccagaaggacaccctataaagcataaaggaacaatatagggtgcggtgaatgacatatccctgtgaagaatataattttcagcaactttcggcggtgaatgacatatccctgtgaagaataaaactttaggcaggaaaggcatcaactttagcctgctctcgtgaatccacagtagcgaagagataagcaggaggcacaagcgacgccacccctgacctctataaaaggaggggcctgcccagctgagggaagaacaacaacgaagacaccattcagagcaaagcttccaagcgcactctcaccctccattccaccgtttttagtagtagtgactttagcctaccttgcatagtatattgaagcaaggagttctgttataacgctgtgtgaggtaagaacagcttgcttgtacctaccttcgggtttcccgaaagggaaaaccgtatgtaagcttatctgtttaatatgaagtaattttccttaagtattcctgcacgtttgttctagacaagtgtttatgctaaggaccctatagaagaaacctcttcggtttgttctcgtttttagcctgcatcttgcataggcgtttggagaatcggtatccgtagagaagtgttcccttcgggtggaactgcttagggagacgataaactcttagctagaacaagtgtgatttggaatatctttttaagttgcttttaaaaagacagataggtgaggcatacggtgagtaccgagtaggactttacatcatctgaaacaagcttctgaggctgtctaagtaggattcgccaccctgcaaagatcctaaagttaaaatatctctcgaagtgaacagtattgaacaataatttgaacagtaatcagccgaataaacagtaaactgaatagtaatcagccgaataaaaatcagccgaataaatagtgtttttgaacagtgtatattgtctgaagtataagtggtatcagagctagtcatcatagagaaatcaaattcagaagctaatattggaaaggtaattactaccaaagataatctgaatataaggtgtagactaaatcacattgaagaccatagttggcactctaacaatagtcaattaaatttaattgttgatctgatatataatttttatataaattgggataaaaagcaggaagatttagagcgaaggattgaagatttgtttaaagaacaaaagcaatctgaagaacaatatttgcttgtcagtaataaattaaattcagtgctaaaagagctagaggaatataagataaggcagaataagatattacaaaacagtgactatatcaaagaattactagaaataataaattctagtaaaggaaaagagatagttttggcttcaacatgcataattacctcgtctcaagctattaattcagaaaaatggacctatctaggagtttgtttagaagaatagcaagcagagacgataaatctttaagttgtattgataaacaaaaaggtaaaattgaagacatagatgagcttgaagatattcagaagtagacaaacagctcgaaagatatcaaagagatactctgagggcaataagacctcaacaaatatattgcatgggattttttgagaataaaaatgggttatacagaatatctacagaagtagagttaagcgttttaacaaagccagttgagttaaaaattgtagccaaggaatttgaaaatggattaaagtattcagggtataaatatattcaccaaggtatgtatataataggaatcacaggtatgacaagaaagaaattaggagctaaagttttaataactctgttagataaaaggtgggacacaatagataaagcagcattaggatttttagaaagtgatatgaatgagaatatgttgataacatatatagccccagatctaatgatgcctataaaagaatttatagataaaatgagttttggttttcaaacaaagggatacgaagaatttaaaggaacaaatttgctagtaagcatagaatttataggaagattaactaatagaagtgcctccaaatacaaaataaatgtaaatgacgtgattgaaaatatgcactctaagggaataactttcatgagccctttaaaaataagttctgaagaaagggcaggagaagaatggaaaattagtgatttaattgaaagcaaaactttgaatcagcctgaaaattatataagttatcaaaacagtaaaggaaataccagcattagatttataaattacaaacccagaaccacagatgacttagaaacagaagcatctgatagaaatataatagataaaagaagacatagtatttcagagtttatggaaaagttagatcaagaaagtgagataaaatattacgaaaataaattaaaggaaataaatgaagaatataataactctatgaagtgtgagtggcctaaaataagagataaagaactttatttctatagagaattagctagagtaaagaaagtaaagaagaacgaagatatggcagtagaaatttttaaaaaccaagaaaccaagatagaacagataaagaggatagagcaagataagcatggcaaagaagagcaaaatcttggtaaaattttaagtgaagaagagcaatgggcagagaatgaaagattatttcttgaaagttatgaagaagaaattaatctaataaatgagatggagaatatagaaaatgaaatagacaatgcagaacaatataatgattttataaacacattagatgaagtagggttacataatcttgataatgcaatggaagctatggaagtggacttaggaacatgaaagagaaaaagatatggagaaggtactgtgaaaaacgaaggagaaagagaaagaccagctagggcagcaggaaaatggccccctgataaagaagaattttcatataactatataccaggacaatataggcacatgggtactaagagaagagactttgagaagcctgttaaatttcaaaaccagaggagtgatggtgctatattaaatttagccgcacatgaccctattgattggcctaatattattagtatttggaaaggtttaatagttcaaaaatatatacaaaaccagcacaatataggaagtaaagttgaagatatgataacctacatagaaacatttttaggtgaatctgctaaggttctatgggaacaatgggttgaaaagaatcctaataattatgaagaattgaaaagagctggtagcaattcgcataattttgcaaatgttatatctaacattattatagctgaagatccggaattaggttatacaactttgcagaatgaaaggttaaaagaaatagaaaaattaacgttaacaagttggaaaggcataaaagaattctcccaacattatttatataatgctacaactgctaaacaaggatataacaggggaatagttgaacgttatttcaataaattacctgacccactaggaagtatgatatttgaagaatataaaaaggaaactgaagga

SEQ ID NO: 22414 - DNA, 1969 bp, Oryza sativa
tagcctacaccttatattcagattatctttggtagtaattacctttccaatattagcttctgaatttgatttctctatgatgactggctctgataccacttatacttcggacaatatacttgttcaaaaacactatttattcggctgattactattcaataaacgaagatttcagaagactactcaagaaggaatccagaagaaggaatccagaaggacaccctatgaagcataaaggaataatatagggtgcggtgaatgacatatccctgtgaagaataaaactttcggcaggaaaggcctcaactttagcctgctctcgtgaatccacagtagtgaagagataagcaggaggcacaggcgacgccacccctgacctctataaaaggaggggcctgcccagctgaggggagaaaaaaacaacaacaacaaagacaccattcagagcaaagcttccaagcacgctctcaccctccattccaccgttcttagtagtagtgactttagcttaccttgcatagtatattgaagcaaggagttgtgttataacgctgtgtaaggtaagaacagcttgcttgtacctaccttcgggtttatatatatatatacacacacacatatatatatatatacatatatatatatatatatataggacactcatatggggcaccatggtgcccgggcaccatggtatctaatgcacaaaattactcaaatttttcaaaattttcaaattgtgagtatatacctagttataataatttgattcatacctatacttatcaacaaaaaaactcaaatttaactttatttcacaatccatgattacatacctaactaattatatgtatggatgctatatacctagaatcaaaatctaacaaaaacaagttcaaattcagttcaaacttgctttaaactagttagtaaagtagttaatgttaatacctaagtaattgaaaaagtttcatactcatttgaattgggtatatactcaatttcaacaatggtgcccgggcaccatggagcaccaaacaaatttactatatatatatatatatatatatatatatatatatatatatatatacatatatatctatatatatatacatatatatgtatatatatatacatatatatgtatatatatatacatatacatatatatgtatatatatatatatgtatatatatatacatatatatatatatatatatacatatatatatatatacatatatatatgtatatgtatatgtatattggagggtgagacacttatttgaagcataagtgtggtatacactaattaccaatatatgttaccaatatatgttacgtaacacttatataatcaaattcagaaatcaaattcagaagcataatatgttacatatatttatataccaatatagtgtttttttaagtgtatgttacacttaaagaaaaaaactttcgtacctctgagatatatggaacattattttgatatgggataaaagtaattccttgctcatgtattactgtggtttgtactgattgttgaaggaaccttaggccaattatcatgtcatcattaatcattgacaaatctcttattgtaatctcatctattatatatttagttgcattaatgtaaacctccatattataagctaactgattatgaattttctttattccggacatgtctgtggaaacttctgccttattgtcgtcaattgtgtgaactatttcaggacatcttatgaaatatttgtcatgaataatattctttgtacacccggtgtctactagtgctaatattttataagatacttttggtgtcaattttattttaacagggattcttatacctaatatttctttgaaaggcaatcttactatatatttatttccaaaattagttatggcctctcttagttgaattattttagcagtattactgtcttttaatgttat

SEQ ID NO: 22415 - DNA, 10040 bp, Oryza sativa
ctttcgtacctctgagatatatggaacattattttgatatgggataaaagtaattccttgctcatgtattactgtggtttgtactgattgttgaaggaaccttatgccaattatcatgtcatcattaatcattgacaaatctcttattgtaatctcatctattatatatttagttgcattaatgtaaacctccatattataagctaactgattatgaattttctttattccggacatgtctgtggaaacttctgccttattgtcgtcaattgtgtgaactatttcaggacatcttatgaaatatttgtcatgaataatattctttgtacacccggtgtctactagtgctaatattttataagatacttttggtgtcaattttattttaacagggattcttatacctaatatttctttgaaaggcaatcttactatatatttatttccaaaattagttatggcctctcttagttgaattattttagcagtattactgtcttttaatgttatcaattgctctttaaattcggtgttttgtatgtccttattctctggtagtgccttaatatcgcaattattttttaggttctctaattctacttctagtttatttagtctattttctaacactcgtactctactagatagtcttttcatctgattctaattctatttcttttctccatttttgtttatttgcttttatacattcagcacaagcttgttttagacatatactacaagtcactctattttcttgacttgggtaatatatgcaaaaagcacatttgatattatagtcaccctttcctctaatccaatcatgttcacaatttaattgatccatcatttcaacctttagacctgctaattcgtcaattaaatctaactcttcatcggatgattcatattcttcgttgatagtttcaacttcgtctgtttctatgatagaatatattgattcgtcatcttttatttcatcatcacatactaatatgttttcgtttacgctatctataattagaaccctctcttgttcttcatatttactagaatatctcttttgatctttatttgggcatgttctacttaaatgatctggcgagttgcatataaaacatctgcatattttgtcataggttttctttggattatatcttcttacatttcttttatgtaagaagggtgctctattatctgatcttcttaagaaataccttttctttgttctaatattattgttgtttctattttgatgtttataaatccttttacttctaggcttgtcttctccatatgacaagggtatttgaactattttattgcagaaattgtaatccgagtgtttcatagatctttgggcttggatacccgtgcatatttttcttagttgcttaaacacaaaagttatggcttgagagatgttgatttcagctccttcagtttcctttttatattcttcaaatatcatacttcctagtgggtcaggtaatttattgaaataacgttcaactatacccctgttatatccttgtttagcagttgtagcattatataaataatgttgggagaattcttttatgcctttccaacttgttaacgttaatttttctcatgtctgacactatacactattgtatagtgttttttacacactatacactgtccataaatattaaactatacactatacataagtgtgtatattatataaatattagcactagtagacaccgggtgtacaaagaatattattcatgacaaatatttcataagatgtcctgaaatagttcacacaattgacgacaataaggcagaagtttccacagacatgtccggaataaagaaaattcataatcagttagcttataatatggaggtttacattaatgcaactaaatatataatagatgagattacaataagagatttgtcaatgattaatgatgacatgataattggcctaaggttccttcaacaatcagtacaaaccacagtaatacatgagcaaggaattacttttatcccaaatcaaaataatgttccatatatctcagaggtacgaaagcgtggtggagtctcccccaaactccccaaactcgacaacttagaagtacccaatcttgagcctgaagaaataattaatgaatatgagcttagtgagaatatagacaactattatatatcaaattccaacatagagtgcataggattacaagcatttgcaccaaatcggtatagagatattaagtctaaaagggatatagaaaaaattattcaaagattagaagatatccaaattataggagaaattcctatgaaatattgggaaaaaaatgctattgagtgcaaaattaatataataaacccagagtatattattaagactagcccaatagaagcaactccgaaagacatagaagaatttaagatgcatatagaagaactgttgaaactaggagccataagagaaagcagaagtccatataggtctgcagcgttcatagtaagaaatcatgcagaagaagttagaggtaaatctaggatggtcataaattataaaagactaaatgataatactatagaagatgcctataatatcccaaataagcaagaatggattaatagaatacaaggtagtaaatatttctcaaaatttgacttgaaaggtggattctggcaagtaaagatggcagaagaatctatagaatggactgcatttacatgtcctcaaggacattatgaatggcttgttatgccattaggattaaaaaatgcaccagcaatttttcaaaggaaaatgcagaatatatttaacgaaaaccaagaattcatattagtctacatagatgacctgttagtcttctcaaggacttacaaagaacatattgctcatcttgaaatattttttagaaaggtggaacaaaatgggttaatattatccaaaaagaaaatggaaatatgcaaagaaaaaattaacttccttggacatgaaataggagagggcaaaattcatttgcaagaacatattgctaagaaaattttagaatttcctgatgctatgaatgataaaaagaaattacagcaattcttaggacttgtaaattatgctagaaatcacatcaataatttagcaaagttagcaggaccgttatatgctaaattaagaaaaaatggtcagagatattttaattctgaagacatcaaattagtaagattaataaaagagaaggtgaaagaattaaaacctctagaattaccattagaagagagttactttattattgaaactgatgcatcgcagcttggttgggttgctgtattaaaacaaaggcctactaaatattcatctaagtcagaagaaaaagtttgtaggtatgcttctggaagctataaattaaaaaccgtaggcaatacagatagagaaatacttgcaataatcaatgcgataaatgcctttaggttatatctagggttcaaagaatttacggttagaacagattgcgaagctatatgtagatattataatcagcttaatagcaagaagagttccactaggaggtggattttatttgaagatatcattactggcaacggatataaagttatatttgaacatattaagggaaaagataatcatttacctgatctactctcgcgattgcctattttgcaggaatgaagaagtccatgaattataatggagttgagttcttcacgtttggagaagacaataagctcaaagtattcccacagaatacctataagtttaagccaaaaacccacataatattagatgaagtccaagaatgcattttagataatttctggtatcaatacaataataagagggaagaaaaaggctatatgctatcaatattaaacagtcttgctgaatatttccatctaatgaatgatataatgccaacatcagaaaataatgaagtaatacagcaaaaacccatatatgttgtttttgacggaaagcttcctggagtgtacatatcttttgaagagatagtagcccaaaaaatagatgcaaaattaatgggtggattgtcatggaaaaaatatatagattttgatgaagctttaactcaggccagaaaaatattaggaataaactactacttggaaccagcagcaaaagaatatatacaaaaatgcaaaaaagccaaaaataagaaagctccagagaacccatattgttcaaatattaagaatgaaggatcatcctaaaaacctacgtataaggaatgcttgactaagggagtagatcctttggatggcgaatatatcgattggaaaataattgaaaaatttgaagaagcatccccccaaattaaaaaagaattgaaagaagaaatacttaaagaattaaagaaagaaatgaatgataaatttgaagaaatgaaaaaagcatatgatgaaaaatttgaagtctccttttctgatgtagatactatggatttaggtggtcatgggcagcctgaccaataaagcaatataatataaattgataataaatatccattctttgggcgtgggaagactatatttgcgaatgaccaaagtatgaattgaatttgaatcaatccaaaatgcaaggacagtgaatgacatttgactgttaaaaatactgtggagaatattactttcggcggaaaagaaaggcgcaggtacagaggtgtctccaccttggccaattcaaggacaaagtaagccaaaaagaagataagcatctccatggtgcgagccagctcgtgaaaatacagtatctagaagataagcttgaagcacagtcgagcctcccgagctcctataaaaggaggggtttgctcagctgagaagaacaacgaagacaccattcagagcaaagcttccaagcgtgctctcaccctccattccaccgttcttagtagtagtgactttagcctaccttgcatagtatattgaagcaaggaggtgtgttataacgctgtgtaaggtaagaacagcttgcttgtacctaccttcgggtttcccgaaagtgaaaaccgtatgtaagcttatctgtttaatatgaagtaattttccttaagtattcctgcacgtttgttctagacaagtgtttatgctaaggaccctataggagaaacctcttcggtttgttctcgtttttagcctgcatcttgcataggcgtctggagaatcggtatacgtagagaagtgttcccttcgggtggaactgcctagggagacgataaactcttagctagaacaagtgtggcttggaatatctttttaagttgcttctaaaaagacagataggtgaggcatacggtgagtaccgagtaggactttacatcatctgaagcaagcttctgaggctgtctaaataggattcgccaccctgcaaagatcctaaagttaaaatatctctcgaagtgaacagtattgaacagtaatttaaacagtaaactgaatagtgtttttgaatagtaaactgaatagtattcagccgaataaatagtgtttttgaacagtgtatactatctgaagcataagtgtggacagtgtatattgtctgaagctatacactaattacctcgtctaaatacagcaatgctatttaaataattacgcttaaaaataattagtgtatattgtatatacactaattatttatatagtgttagtgttagtgtatagtgtggacagtgtatgctaattagtgtattctatttatattgcttgtataattacactaattaccaatacagtttcaccactacagtgtccacagtgtatatgtatatagtatatatatatacatacatatatacatacatatatatatacatatatatatacatatatatatacatatatatatacatacatatatatatacatatatatatacatacatatatatacatacatatatatatatatacatatatatacatacatatatatatatatacatatatatacatacatatatatacatatatatatatatatatacatatatatatatatatatatacatatatatatatatacatatatatatatatatatatacctaagtaattgaaaaagtttcatactcatttgaattgggtatatactcaatttcaacaatggtgcccgggcaccatggagcaccaaacaaatttactatatatatatatatatatatatatatatatacatacatatatatatatatacatatatacatatacatacatatatatacatatagatacatatacacatatacatacatatatatacatatacatacatacatatatatatacatatatatatatatatatagaaaccgttgcaatctgactcccatggcagtattggtagtagtatttgctgatgcgatgtccacgtggaatcccagacttcaaagaaaataaaaaagtgtaggacccatcagtcctactcccctcactctccctccttccttccctatcccactctctctccctcgttttcttagtggcaggcgagagcaggaggacaatggcaactaaaggcgtaggccttccacttcaagcggtgccccgacgaggagctgtaggcctgagcacctccttgttcatggcacgattctaacattagagacgatgatggagtggtggaaggcatcagggggagatggggagcgtgctccatgccatcgctccttgtccctgcttggcggcatcagtccagttggtgtcgattagatctatatgggtatgtgtagcacagcgttggaatagctcgtgagcacgtatgtggagattggttgcgtgtgtgtctaaccccttgggtttccccagcgccgggtcaccgggtgaatatggtacggtatccctcataatccatgtacctaccatctatttagatatgataggattgattatcttatccttaatccctttcttaaattacaagtaagccgcatggacctagggcactcggcccactgttggtatttcttaaccttacaaataaaatccgcaagcgcatggaaaatactgatgtagcacttcacccgagagtattctcagttatcgatttacacagggaacatgtgtgtgaactctaaatcgggttcatccaaggacacgaagctacagataggcaatggatagagaggattcactggtgagaaacagtgtctatagaaagctcaactttaatctaacgcgatacttcgggcactggccagctcgctgttcccagatatcgctctactgcgcacccgaacatgaaggacttcagtgataatgagggctatcaccacctctacacccacctcacacctactgtgggatgcggagcaaacaccgaaaattaaccacctagacacagcgtctaagcagactaagtacttactttaatgtttctcttagtaaatcattatattttagtttattatagtgaacgatgatcccgtatggtaattaggaactaaccaagaaataaatctcactaagcaaaactaaattactcgaaagatatttctattataatcagagtaattaatagagcaaaagaaataataaggggattatcgacaactccggaactcctccgacttcttctactctactgtctccctattctagtatacaataaagtacgatagagcctcttataattcagctcaagcttggagcgtatgttcaagttagtgaagtgagatctttatatagtggcaggtatgacggttgcacgatgcgaattgtcagttttgccctccaaccgccatcaggagctcatccggaccgtccacgccaaaacgtggatcgaacggttgtggaagtggttcggccgaacccatgtctggcccaacaggccccaactttggcctattgctccttctctgtctcctctatccatttctgcgaatgaaggcccttggagtctttttgagtgtagttcctagcccactctttgtatgaataggatttcacattcacttaagtctatttttggtccaactttgacagtttattacctgcatacaaatatacaccaacactcatggaatatgtcagaattaaccctatcactatgttggatgttttatttctttgattgatgcaggtattggtggcataaaatttgtcaataacagtcgccaacacccaccccttactatccggcataaaggcccaacatgagataattgcgtaccatgtaccctacacaaggacaacaacctaatataaactagctagatatatgattcctatgtcttctaattaattacttaagttaaagataaagctctatcgaatacttcgggcactggccctaagtttgctaggatgagtctagccttgagctctatgatgtacccgaacatggagggatacgaaggacggacagagctatcaccacatgccacctacctcactttccgtggagcacccaacaaacgagggtaatttatgacctagatatcacgcctaagttattaattactactctagccttgcacgagaacttccttctttatccagagtcctagtactagagcactcggttgcacactaagtgactaacccgcaccgatgagaatatatctcacttaaataaataattaaagaacataaagaaactcgaatgcttacataaataaagaaagcatccgctgaggtacaaacgagagaagaaggccgacaatctcggctttctctgaaactccgttggaagaatgccaacaccccggcactcctctgtaaaaattctcggaggaacctcgatatttcggggcactccttccagagcttcccctcactctctactaagccaacatactaaaaatgatactacaagtgagttgtactctacttgagctcaagagttgtgtgttgtgaagtgtgaaggcatcctccttttatagcttggaatgacggttgtatggcaattgtggaggtcggtgcgcccttaaccgtcattggggagctatcagggacgtccacgtggaaggccaagatcagagatgccagtggtggttcggccaaacccctagtttggccaacccctaggccccacttcctggcctaacctttggccaagagcctgattggtggggcccttatgacggttaggatggttcggtcccattttaagccagtttccactgacttgtgggccctccaatcctgtactcacacatgattggtcggatgttcattttcatcgcatgtcaagtatattttctccttaattaacctgtatacatatatttaccaaaactggtggaagtggttagtagtaaactcctaccaataagttttgataagaaaattgaatatcttttatgcagaagttgacgattaaagtttgcacttaactaccgtcaacactcatggagaaggatagtcacaagttttggtggttgggagcagaagttccaaagcgaatgtaacttccgtttcaagtgtttaatttctatgaacgcctattcaccacctcctcccctaggttcagaccaagtcctttcagaaagggttttctccatcgatgccctctatcgactttaccgggttcctctagtaatctcctccccgatagctcttttcatttcgctaccatcccgtggccttgtgctcttcattgcttcctcatttattgcctatcatcctaactactagaaacttctccactacctcccctccaaattctagcaatcgacttaaaatgtgttcactacacttatttgccttgtgtccgccgccaacccacccctccaaacacacacatgcacacacaatctctaataccacccccgcctcccccacccacaccccacatcaacacgcacacatacacacatggccacaccaaccattttctccatggtccatagtgccatttttcttgattccttggatgattggtcactgctagtcaatgcctggaagaaaggacaaacgaggaagcaatttacatatgaggaagcaatttacatatgttgcaatcctggtggctgatattaatattatttcagatatcaaaattttggaaactgg

SEQ ID NO: 22416 - DNA, 1463 bp, Oryza sativa
tcccgtccaacaaaaagtacctcgaggtaccggtaccaaatcgtttaagatcgttggatttgtaagttagatccaacgaacgaaaacaatttggtatcgtgagataccgatacctcgaagtactttttgttgaaccagagcaaatctcttatttggtatacgaggaaataaatgaagggtgaaacttcgccatgcttcttaacatgtgaatatttttattatctaactatatattacctatccacagcacatcgcactactcgtgctctttctcccatcaccacattctgatgagtttttccatgttggtaccacatggtggccttgcgctcttcactcatcctatcttcctatatagttggtacccactaaagagcatttactcctataaagcaaaacatgcaagaagccacatcgtcaataattttaagccatcagatcatatatatactttctatatagttggtacccactaacaattattagaagctaaagctcaacatgcaagcatgccacattatcacccactagcaattactattctagcccatttaaaatcccatgcaagtgtgacatcccggcccagggcttaataggattgatagaatactcatatcaacaagttgcaacttcttttccggaagccgatctcgaaagaactatgaggttaagcgtgcttggcctggaccgaccgggaaattcttcccgggtgcgcacgagtgaggacaaagtgtgcagaaaaggctagtgttggtctgtgagggtagtctatgtcctaggatagctgccagatgtaagagcgaccgggaaattcttcccgggtacacacgagtgaggacaaagtgtgcagaaaagactagtgttgatctgtgagggtagtctatgccctaggatagctgccagatgtaagagggctcggcctcgaagagtgtggggcgttacagatggtatcagagccgacccttgcagctatacgtatatatgaacatgtacgcggcatacggtgcatacgggatgatccacgaagtggtcgtatggcatgacgtatgtgcgccgaaaattgtctgtatatacgtggtgctaataggggacgttcctggcctggattgaccgacgattacgttggtatcttaagggggtgagaatgtgacatcccggcccagggcttaataggattaatagaatactcatatcaacaagttataatttcctttccgaaagccaatctcgaaagaactctgagaggttaagcgtgcttgtcttggagcaattcccggatgggtgaccgaccgggaaattcttctcgggtgtgcacgagtgagaacaaagtgtgcagaaaagactagtgttggccagatgtaagagggctcggcctcggagagtgtggggcgtcacagcaagcatgccacatcttcactgtgtggggcatcacagcaagcatgccacatcttcactcactagca

SEQ ID NO: 22417 - DNA, 2366 bp, Oryza sativa
cgttctgctcgccattaattgcgcggcgcctcatttctcttgcctcaccgcccgttctcggctctcaagtaaaggttgcagtactcgcgtgcatgcttgcctgctcccttcctctccgcagcacgctctcgcctcccttcgtctcctccagcacgctcatcgccagcatttagggttcacgcacctgcctcgccacccggcacgcttgcgctatggagtcagtagaggcgcagcactccgtcgacgcgttggactcggaggccatggagtccatcgagtcgcaggaatccatcttcggcgtgctgctggactcagtcgtggccatggagtccgtcaaggcataggactccatctctggcgtggtgctggactcgatcgtggccatggagtccgtcgaggcgctcgactccatcgtcaacacgctggactcggatgtggttccggactctatcgacatggtgccgaactacgtcgacatggtaccggactccatcgaggtgttgccagacaccgtcgacatggtgctggactccgtcgaggttgtgcagtgtgtgctctctgcggcacgttccacgctagtggcgtcttcggagaagcctgctaccaagctcgccgcgaagctcgcaggtatgcatgttgcagtcttgtacgtagcgattacgatctcacatcatggttgctttatgacatagaaaagtttgattgtgagctctacatccctgatatggagatgcttgaaatgaatggtgacacaataattctacccgatcacgttcaaatgaagttggacgagatctacaatatgaagaagttggaagatgcaaagctgaagcaagatgcaaagaaagaacatgtcttcttctaatttgctactaatatgcttgcatcttgcttcgactagcatgctgcaaagagaagaggcttggcatcttctaacattctatgactaatgggctgcaggaaggctagcaattgcttcggctagcaaggaagcttcacaagagatttgcaatggcagccgatcttctttctctagttttgcttttcgcatgtgaggaatcttgaacttgttgcatcctttcaccttcatagcttccatcaaaatactttgtagtgttagaaacattcagtttgctttgtgtgccgcatactctatgaatgcctacaaaacaagtgtgcaagaaatgaatcaatgagcaaatttgttgttgaagaaacaatgaaacatgtgtgaacaatttttttttactaaaagtactgccagtgctttgcccagtagtttaaattttataaaataaaaatatgtacaaagttacaaagggaaagaaaaacaaatatgctacaaagtttgtatccaatcagaaatggactgcttgagtggatctttcattctacacttatgcagaagaacttctatgacaaacatagatttccatgactgaagtgatggctggacagattgaaacattaacccattcctttgcttccaaatatgccatgctaccatgaaaaaaacttcaaggaaaccctttcgagcaaatctgattctcgccaagacaagcatttggaaaaactccatattacaattccaggaaatgcccatctgctgccaacaagccacactaaagggacatgtaaaaaagagatgaagcctagtctctctttgatgtgtgttgcacaaggcacatgtgagatcatcatcctcttttgcacaatgtcttctgtcaagcatgtcccttgtgttgagtctatcacaaaataatagccatgcaaagacctttatcttcatgacacatttggtcttccacagccaaatcatgggcctgggaggatgtagtgtggagaaattaagattataaaatcttttcgctgtataagcatttgatccccaaatgaagctccaagcatcacctcttcctggctgaagctgtgatcaaattacctcttgcactgctggaactagagcttctattgtttttcattcttcttgtattgaattgcttgaatagctcgaaaaaaaccaagtaaagaatgttgaaatccggagaattgggtggtttacaaattaggcgaatattgaatccttcttacttagcagcctcacaaaaaaccggatcatccaattttaaatgggaaggtgcattatcctgttgaatgaagattggtttgcccacatcttctcttggccatttggctcaaatggcaggtaacactttgttgatcatgaaatctctaatcacatctcttgtgatcgaagttatgggcttcataaccaggtctccacgaacaaggtcggttctctcattacctcttctagccggttcataagtaacaagtggaaaacaaccaatcctaccatcaaaaat

SEQ ID NO: 22418 - DNA, 8834 bp, Oryza sativa
aatatttctcagatttttgatagaggtagaaccatttttcatcaatgaacacaaagtcaaacaaatccttaaactttggatcatcaaccaaatcttgctcaatcatatcaacacaccacttcaacctagccttcttgttaaaatctgtgaggtatggtttgatgctactagagtggcgtctaagcaatcctttttttgaaatacctttgtatcctagctttgcttataccaactttactagacacatcttctatggtcattctttgcctgagaggaatgttgtgcaattgttccaaatcaagagggactgccttacaaccacttctacccttctttcgactagcaaccacaaccggaatgttatgagcaagttggattttacctcgcttccataagcgctggactgtccgaatgtgcactccaaagtccaaattgatcagcaacaattcttgtatcattcttgtgtagtatcccattcttgcttttagccaacaatgcttgataaacttgtttcctgacgtcttctgtcatgtattttctttgatggtttgcttcaatgggatcaacatgttctagtaaaacaaaaaaaagaatcatttgttagccacggcttacaatacaaatagtatatacagcatgcacacggcgcatgttaaaaaaaagcatgcacggtagatgttgtatgaaaatagtagaaacggcatgcaggtttaccaggtaggttttgtacgaagtgaaaatcaaccgctccatattgatctaatggaaagttcaaatcgattccagtccaaaaagtaaacaacaaactaagaaaggatggaatttgaaggaaataacaaactcaaacaaggaatcacattaccattctcgtcatcttctaaggcaatgttcagatcaaagccattgtcattatcttctaagcgaacgtttagatcaaagccgttgtcagcaattacatgcgatacatggaaagagaagagagggaaagtgaagagatggagcacggtaatggaaagagaagaggccgggggaaacacccccatttaaataggcacggtgaaacgttgcgcgctaaaaatacggcgccattgcaaaaatcacgtgccaatcaaaaacgaatgaaaaatggcgcgccaaaacatgtccaagcgcgcgctacgcccagccgatgcgaaaacgcgagcacaggcgcgccatgtagggcccaaacattcccatgtaaaatgaagcaaccagcaaaataaaagtggccaccgggaattgaacccaggtactcgcaacacatggctcgctccaagagccaactgagctttagttctttctcgtatgaaatgcacccacaatcctatttaataggggtagacagggaaaatacctcctagttaatcactccttggtaagcacaatcctatcctaaacgacatattttacgagtatggagggagtacaaagataaaaattgttggatcaagaaactacttattcatccaattcaatcatttattagttatccattcacctcctttgctccacctcatagtcacacatagcactgttacatattttgtgcataacaccatgttttccaaatacaactcaatttttgtttaatatgtgtgttttgtttttattatacatgataagatagcatataattattagatatcgttacctgaatctattttcagaaaaaacttcagtgaagtagagagatgcaaactgtctaactacaacgatacccatattgtacatgaaaataatattcatatattatagcaatacacactgacacttggaaaaataaagcatgaattgtattgtaataacataaggcatatataaatccacattattatatattttatatagagagagagttgcacctaaccatttaaaactataattttgtttgacgataaaactagaaaacacgtgacaaagacgcagggtgccaactagtttactgtttcttggttcaaaattttgccaaatagcttaagtggtcactacaactcccttcccaaaaaaagaggaaaaaggaaaaagtaaacatgcgcgcacacatggtcacaccaaccatgttgtcacacagccagtagatccaccatcctaacctgtttcctgcctggattgagatcctctgactttagggggttaaagtcagaggtgaacagtatcgtgactttgagctgcttttagccatccgatttgtagggaacggatgagatcgattgctatagtgatttgtgaatagtgactatgctcggtacatctcactgttttgcactgtagcaacatactcatttcactgtgcgtctctgcctttttcccctaaaggcggaggatccggatccttctcacccaccacatactaccctctcaagtgcagttaacattaatcatattatttgagttttattattaatttgaaataccatacaacaatactaaccatatttaagtttaattaattagttatgtgtggagaaggtactacgcacccatttgcttgtttgtaataatatcattcttcagtataatgttcaacattcagaactaattgattgggtgcattatatgaatcttacaagcttttaacacttccccaagtcctcttagcactctcgttcatttcaattcttagctttttgaggcttactttgtgacttgcatgtcccatcgtaaataagtactcacggaggtctataccgatatttgctgacaactatctagaaaaggatccagttcctccacatgcagagggccactgttgttgtgaggagaactgtaaataaatatagtgaatagtaccacttcaccattactacaaaattcttcttttgcatagtggtcatcgggatcgaagaagatgccatctttatggtagcagttgcggtggatgaagtggcacatatccaattgtatgttttcaatgcttttaccatctatgtggcggtcattttcaattctaggcctccgcatcagcagcatgagaagaaaatacttgttaatattattagtcttaccatcaattgaagaaaatccttcctcaaatctcacatatttttgggtcattggatgcgctttgtgattcatgcttcatgtgcttctcctccaacttcggcgacctcctctttttcttcggcgccgacaacaacccaaactctagcagacaacctacaacttagggtctcgggttgggcgagggtttaaggggtgggaaagggagggataagaagcgggtggttgatagacttagagggatggccatggaatacgacgacttgaagttagacggtggaacggctagtgttggtgacgggggcaatgtggagcaacccattaggagacgacggccaatggtggcggatccggttgtggggagctgtcagagacaaggaagacaacagcgtgggggctcctcactgccgttcgatagagggggagtagagggaagaggcctgactagggagaagggactcgccagcatcgttaatgcctcccagcgacgctgggcgatggtgagaagccagcaccatttcggacgtgcgggcgttaaggggaaaaggaaaacgaatctcgaagccatccaacggctcaaaaattgtaagattttgagggaatgattcatgtgaaatgtgtaatagacagtcccttctttattttggtttattatagttagtgcatctttgatttttttccccttcctttttttagctaaagcatcgtcggtatgtataccttagaaactaggtgattccccacgctttgttgtgggattactaagcaattctcagtatattttttcaatatgttgataagtatatgttaaatactataaaaatgatagttctatttgttaaaacattgttcaaatgacatgaggggtgatgattggatatacttgcatattgatttgtagaattaaatatattgtagatgatgattttgttaacagtgaaatttggttttttcgcgtcaacggatgtatgcttgcataaggctaaatatataatattgctagtgggtgatgatgtggcatggttgcatgttgagctttatacttagtgggttataattttatagaaagtaggaataagttcatctgaggtccctgaacttgtcagcggatccaattttcgtccttcaaccggaaaaccagatacaacgggtccttcaactatcaaaaacagtgcaacataaatcccaaagtggtttagaaggcagtttggcagttttgactgacgtggcgcatatatggctcctttgactaggtcttcgtcctacgtggcaattcatctcgaaaaaataataaaacccatgggacccacatgtcagctaccacacaatataataaaaaatagtagggcccatgtggccccatagatcatccttactactcccatcctatctatcttctctatcctctctctcccagcaagaaggtgggcagagcgacaggacggagcagccggccggggcgcgaagcgagccagtgaagcgaagcagggagaagggcggcaaccgctccactcctctctctcccttcccctttcagcatgtgggcggcagagggcgcagagcggcagcggccagagtaggccagtggagtggagcggggcgagcggcggccgacagcaggtagggtgaagcatcggcaggcgatagagagatgggcgcggcgaggccaatgggcgaaggaaggatgacgagttgtgggccttccccttctcctttccctccctagccacggctgccagcggtgaatccttgtgcgcatggaggaggaagaagaagggatcaggtcttcaccgctgcgccgcctggtcacggggtccactgcacgccgcatgaccaccatcgtcacgggagtcgtcttctcactatcctcctcatcgtcgtccccttcggcgccgtcctcccactcggcatcgcgggcccaatctggcgaggtggtggtgagaggactgggcgaaggggtggaagaaaatgtggttgtcgaggaaggcgtggaaagagtcatcgggaagcgtgcaatgggcatagaaggcgaggaggtggtaggcaatgaagccgatgagcgcgtgggagagggcagtgatgggccacgaaggctatagggaggagcaggccgaggatgtggtcggttatgacggcgggcgatggcaatccaccaactccacttcatccccgccaacatccaaatccgccatcccgagctcctggcgttgggatcctctttggcatcctctgcggtccgttcagtgccgcctccatgtacctcgtgtggtccatcatcgccggggctggcgccgcaaggtagaggaggtgaggggacatgtgggtcccactattttatcttcttgactacttcctccttttcacaatgtaagtcattctagcatttcccacattcatattgatattaatgaatctagatatatataacatcaatatgaatatgggaaatgctagaatatcttacattgtgaaacggatgaagtacctgtatattttgttttaatttttaattttaccacttttatttttggatcaaattgccacgctagcgctatgtcaatatcacgtaggacaaagacctagtaaaaggagccacgtaggcgccacgtcatccaaaaccagggaacaatactgccgagggaccttatttacacggttttgtaagttgggagatacgttatatccgtttttgcgttcagggatgaatttcggactcggcgacacattgagggacctaaaatgaacttattcctagaaaatatagatttgcccatgaagttgggctccaaccggcccatcaacccatctcgctgggccagatgggccggacttgtcagggctagtcctaccagcccggaccagcgaggcttcgtccacgtcgccattcacctctccgcacgcacccacccacccaccaaccgagcaaggaggaatggcgatggcggcggcgaggagggccctcctgagccacctgcgcgtgccggtgctggctcgtcccgccgcggcggcgggaagcgtccccgccgcgcggctcctgtcgtcggcgacggaggaggggtccaagggctcgttcctcgacaagggcgaggtcgccgaccgcatcgtctccgtcgtcaagaacttccagaaggtcgagccctccaaggtgagcacggtcgccgacgcgcaccgcacggcggattcggatctaggcgtgctcgggctgtgtagtgtattttttattcgcgtcgcattccttttgcttcctggaatggagaggattttcttcttccgaaaagagattctgtatatgcgtaagaagttgcaaagttttggtcttggtggatcaattggagccgagcctgaaacattaggggataggagtaggacaagaaacaaatcttgcactttgttagaagattagattgtatactagttacgaaaatttgattgaggaacatatgtcattcgtgattgatttggtccgtcctaggctgtcaatggatgataacactcttgtgatgacctagctccattaatccttgtgtgtagacaaattttgacattttggtgcctctagtgcggtttcacttgcactactagacgccacataccaaatttgaatagtttacccagtggccccatcttgattagaagcgatgtgttgcattgagtgggaatatgttttctttgtctcgtttttggctgctaaagataacatatagtattgtgttgtattttaattttctgcttttgttagcaaaatctggaagtagtgaacctcttgttggatgcactttcatctgatcgctgaagttggcaaatggttaatttactagaaaaagtcatcggtattagacttatctgtttgcacaatttgaaagtggggcaatatattatcaataaattttgtttacctctccacttgcatcaagatgttatgtttgatgaaacagttgttgtgactctgttccagatcaaaataattaatttaatttggataacaattataatcctttttttattaatagtctccataatatgcttaatgtatgtttgttagtcatcagtggcggatccaccatggggtctctggggtctcgagaccctactacccgtattgtaaccaagggagaccccatgaagaccccactaaaattttctgtgatacatctattaaaagaggggactataattttatatagtttgttcagaccctcctgttaatctttcctggatccgcccctgttagtcatgttagcatcatttgtttgatttgtcctgctactgtgttgctcttatttcaacctgttttgagtgtgttctgctactgcttgttttgatatttcttccatttgattaaattacatttccaaattctgtggactatttctaagggatataggtccttccatgcctaagatatgttagtctcaatgagcagctaaaaattgcgatgaagaggttacttgcatatgccttaatagccttaatagaaaccctgctgtggttcgtggatgttacttgtaccaggctccctgatacactggtacaacaaagaagtttgttcttaccttcaagaatttttagacagcaattcatgcagttgtatacttgcatacctgcattttctgttcaatatggcaaggcacgtgcagtttttaaaacactgagaattatctagcagccaaacaaatgggggaagtttttatcgttgttgggttatagtggtactattgtagtctgtctatattttctgttattcgctagacactgaactttcaatggcatggaatgatatttctctgttagtttagggaatgttggttcatatttgtagatgttgccactgtcgataataatcatttgtttatccaataaatgttgcaggtgacaccaaatgctcatttccagaaggacctcggacttgatagcttggatacagttgagattgtcatggcctttgaggaagaatttggcttcgagatcccagataacgaggcagagaagattgactccatcaaaacggcagttgacttcgttgcctctcatcctcaagcaaaataaggatcttgagaattctcagttactgattccattagatctttttttttttgttgcacgaaccaatctgtgtcaacagaggaccagttttcttgtgtttatctgcataacctttattctgaggttatgcttcttacacaacttgaataggaaatcagtttttttattaatattattggatgcgtgaataagttcgcaccattcggctgtttgtggttttatgatgcgatttgcatctaaactgatgctgcactgctggttgtagccattattgttgtgcaaacaaaggtgaatcgatagacccccccccccccctcccaaggggccttttcttttctggtcctttccagcctctcaacactgtataggaagcagagttggcgatatcatatcacttgccttcacatgaatcttgctaggcatttttttttttttggaattcatcctggtttttttactgacgcaccaaatcggtcatttcgcacgatgatgaactttcggatcacatgctagcaaagtgacagtttattggcttggctaatctattctgcacacattcgattcactggaaccgaacagatgatgtcgatggattgtcattttggtccatctctgctgctctcatggtctggacgagggttgtacattctgcaagatgcagagaactgagacacgggtggccgcagcgagtgacccgtgcatgcaacccaacttagatgctgtttcggagagtttctaccggctgtaacttttttcaaaatctttaactt

SEQ ID NO: 22419 - DNA, 21034 bp, Oryza sativa
gcctccccctgtactcctccctcttctctcccttcctcctccccttcttctctttttactacagtacacacaatttttttaaaaaaacaaaagttagaaaaatttatgtatagaaatactatatataaaaaatatttgaattcaaattcaaatttgaatcgggtatgtaaacttttgacttataaactttgggtctataaactttaggtgtataaattttagatgtatagaaatactatatatagaaaatatttgaattcaaattcaaatttgaatcggatataattcagattcaaatttgaatcgggtatgtaaacttttgatttataaactttggatctataaactttagatgtatagaaatactatatatagaaaatatttgaattcaaattcaaatttaaaacagtatataaacttttgacttataaactttagatctataaactttagttctataaactttaggtgtataaactttagatgtatagaaatactatatataaaaaaatatttgaattcaaattcaaatttgaatcggatatataaacttttgacttataaacttttggtctctaaactttatatgtgtaaacttgaggtgtataaactttaggtgtataaatttactaaaataggaaagtaatgcggtgtcaaaaaatgaaaccaggtggaggagtggagggagggaggggggaggggatcgatcgctgatccatccccagggcgatcgatcgctgatccatccccagggcgatcgatcgccaaacaggatttccgcatgtacaaaggtagagtcagatatgagctctacattatttagagactagcatcctacaacagttatagacaatatagtctctaatcattaatgtattaaaatattttttcttactcttctttcatttctttcaccaccatgcaacaaaatttgctctaataaatactaagagtcgactctaagacattgttatgcataacaaccatactcctttctctttcttccatgtcatcaaatttacctgcatggcaatagagagatcactaataaagaccgttgtacatgccctaagaaatctctttaaaaactcgcatactaacttaaaacaatcagacacctaactgtaactcatgattttctaacaaaatatacatatccaaccgaatttaagagtgaatctcatattaactaaataatataatataaataagattaaaatagtctttatccgttacaatgcacgaacattttctaatagctatataatttaaaaaataaattagaaatcagaagctgaaaaccaaacttttttccgattctttggaagctggctatcgacagggccaggttttgagagactggaaccaggataggcagcagcacacaggaattgaaacgcgaacgcgtgcagatttgcagagacgacgagggcgaggcgaggtagtctgcactgcacgcgtcacaggtggccggtgcagggagggagggagggagggacgcccctgcgccggccgggcggccggcaggtgtgacgaggagtggaggaccctgtcgcccgcaggtcgcagcaggaagattgatgagattccttctcacagatacagataatgtgagacatatgctcaaggtcacgggagaagatcgtctatcgcaaggggttctaaacgcaatctaagggcccttgaatcaaaggaaggaattatgaaagaatttagtaggattaaatcctatacaaaattttttatgtagccctttaattcaaaggattgaagtttttcacatcctacaaaatttctatgaaatgtcttattgcatataggttttggaggaaactgggcccctttgaaacacaggataggaaaaacataggaatagaaaaaatataggaattaaagtggcatgttttcctaatcctgcaggaatggaaaacataggaaatatgaagagagtccctttgataccaccacaggaaacaagcaaagcataggaaagtttccaagaggttggacctcttgcttattttcctatgaaattgacctataggaatgtaatcctatagaaaattttctatattttcttatgaatcaaagggttttataggaaaaatttttttaggaaattgaatcctctaaaattcctatggcaatcctccaattcaaagggggtagcaagaggtctaacttcttggtaaaaatcctttgagtatatctctatcatccgattcctgtgttttttctgtggtctaatcaaactatcattcctacgtttttctatgttttgcaatcctctgttttacacttacattcctgtcagaatcctatgtttttcctattcctccattttttcattcctacaattcaaaggacccttaaggaattgagatttgcgaaaccagatgtagtgtacgtggcgtttcactcgatcgtaaaacactactccctccatcataaattatagcaacttttaactctcaggatttgtcccaaaatataacaacttcttcactaacattctcttcccaaccaattgttgagaatataggcatataatgatttaatatatttcataaataaatcatgacattatataagtatactagcattaacacatcattagatctacacatgtaaattaagtagtaaaacatgaacagatcaaatatgcgcaacttgtcgaacacgtaccgaggtggcggaaagaccggttgctcggcaagaactactcgcggttgcgagcgtcgacgaaggcgcgaagcacgcgagcggagaggaaggcgagccgtcgcggacgaatagggagcagtcgcgcgaagcgcttcccaaaaaccttattgccgccttctcccggtgcaggacgtcgaaggcagaggttccggagacctgctctcccgatcgccggtgcacgccggcgagcgggatggaataatctacgagcgacgacgcagtacagagtaggaggcaaaccctaaattgattttgcgtgtgttgcgtgaaggcggcggctcggtttatatagagataggtcgcttgatcagggcgccgcacgatctccactccgcataaccgaaccggataagtgaattttcctgcagcaaaacaaaaatgcaaaaggaggttgcatctgcgcaagggtgaggagccaattttgcggaccattcgacacgtacgtcgtgcaagggtgaggagccaattttgcggaccattcgacacgtacgtcgtgcacacgcgccgcatgcctgaggcgagcttgtgttccccctcttctctccaccacaacatgcttcgagtggctaggaggtcattctcccttttaaggaggtccccctctcctagaataagcaaggtggtactaaactccacatgcatgccatcccatgaggtgggcttttgtgattttctaaagaattaatcttcgaatgggccttagcccatctattaattccaacaccaatcacaacgctccaccatttactttccccatctacctccactactcatttaatcacaaccctccaccactcacttttacctactacttcttaataaccgtgtccaaccgtaaaattttttatattctaggataaccgtgtccaaccgtaaaattttttatattctaggacagatgtagtacttactttttatttgctgattcttcaacatcagcaggcagggtgttattggacatctacgtacctgtaattcttagtttcatccgagcttccgattttgtcatttagcaattctgaaagtagttttcttttcccacttttttcctgcacgcgcgaaaggattacacgttaatatattaggttttgtttccccgcttagtggaaatgccaaaggtagaacacgggccattgttttcccagataactccacagaaattctctcagaagttatagtacttggatttggacagctcaacttcaaagtacgtgaggtgaattagagatctcgtcagatagctccaaagcgattttatgcctccctgactgacctatcacgcacggtagttcacttcagcagaggagagaggcgcccacacgcacggggcttgttttctccccattctaggctagctacttgcatgcggcgagacggcatgcacggcgctggtcctcgatccaccacagtcgcctttggttctttctcctgcgcatatatacggggtgcatgtgcatgtgagcaaaacatgcgtcgatagacagcatcatttcaacatcaattcttggcctcctgtcctgtgtgtatatatatgcggctgtggtgtttgttgttttttctttaattcaaacaaaaattgcgcaagctgaattaatccaagacaattttaatctttttcggtgagattgattggatagagctcctaccaatccactttcttgtttggcgtttcatgcagtcttaaatattcagagttcttcacgacccaaaaacaaacaaaaaaaaagaacttttcatgtggccatcgaccaagtatataactgcgggaaaataaaaaaaaggaacagtttcagggagcccatcaggattcaggcattgcatggctctctcaccggtgagaactgtaacagtaacagcaccaacaactactacacaccggatcaggcttctccaccttccaaatcacctgactttgacactaacatatgagttcgatgaaccatagatccatatgtcagtgatagagtcatggtgcttttgaggtagtggatctcagtgcccacggcggcatgccacgcgccggaaactaccaaaccgaggagaaatcgtccgcttccaaccgcctgcgcatgtgtgcaaccaccgcaccgcaccatgcattattgcccttctctgcaggtgattgcttaggaaacagaccaagacacagcgttatatagcgtctctgaccatctgcgttcttgccatttcggtgctttcggctggctgcacagcacagccacaggagagctagctctcatcacgggccaaatccaagggggatatcgtatttcctgtgcatcgatcgtttgctcattcacgagctcacagactcagagtctcacagggagatcaaggagtcggagaaacctcctctgccttgcatgccagtgagtgagtgcgagagataggttcacttcagggtggttattggggtgagcacctgagctgatcagcagccatggagggcgtcggtgttggggttagaattagagcgctgctctgctgcattgcgatggcggcgatgcttctcagttcctaccagcaaggccaggttctctatcttgctgatgttgtctcttaagtctctctttgaattggaaacaattgtccggcctcgtgtattattctgatatcttctccattgaaggccgaggcctcttacatgccatggccgccagctacgccgccgccacctgctgctgccgctgccaactccacctccaccgcggcggcgaacaactcgtcgtcgtcgtcgtccaccaccgcgccgccgcagcagccgaccgccttccccatggtacgcccatcaaaacgatcacagattatgaaattaatccacattgcgctcatttcgtcctcctctccgatccgttcttgcagtacggcgtgacccccggcagcctccggccgcaaggtacacgtaatctccatcgatctctcgctgaattaaccaatcaattaagcattgttaactaggagtaattaagtagcaatcggtggaataatgctgtttggcagagtgcgggggtcggtgcgcgtacaggtgctcggcgacggcgtacaggaagccgtgcatgttcttctgccagaagtgctgcgcctcctgcctctgcgtgctgccggggacctacggcaacaagcagtcgtgcccctgctacaacgattggaagaccaagcgaggaggccccaagtgcccctagttaattcttttttttttcattttagcagcaaattaaaccaccattgttgagggagggagggagggagggaggaaggaagccgccatggctgcaagcttttcagcctttgctctgagctaaggcacggccctcatgcatccagagtttgtgaaattcagatgcgactctctgtgttcttttcctcttgttttttttttctgttctttttggggtatctctgctagagtggttgtttgtctgtattgatttcgtggatcttaaggtagaagatgagttgtcgagatgaattttgatcgtgatgtgtttcgagtttgtttgtaatttgtatgcagtattgaggagtaatttgtatgctactatgggttcttttctctcatttcccagcttctaccttttcatttttcacgtgcatatttgtcgaacaattaaatagttttattcaaaaaaaattctatacgtaagttgtttcaaaatctgttcaatctccctccgttttaggttataaaacgtttcgactttggttaaagtcaaattacttaagtttgactaggtttaaagaaaaaaaatattttcaactcaagacaaatttattatgaaaatatatccaattattgatttaatgaaactaatttggtattataaatattactatatttttctataagcttagtcaaatttaaaatagtttgactttaacgaaagttaaaatgtctcgtaacctagtaaaacggagggagtattaagtactccatccgattcatatataacgttttgatttctttccaagtctaatatttaagatttaattaaatttataaaaatatagcaatgttttaaaaatacattcactattatatttaataaaaattatttggtatacaagatgttactaattaaacttatactctcttaatccctaaatgtttaacgccgttgactttttaaatcatgtttgaccgttcgtcttattcaaaaattttaagtaattattaattctttttctatcatttgattcattgttaaatatacttatatatatatatatagttttacatatttaaaaaaatttcaaataagacgaacggtcaaacatatttaaaaaagtcaacggggtcaaatatttaggaaaggagggagtagtaaataggaaaaaaaagttaaagcggttaactaccggaactttttatattagcttcttaatttttggaaacataatttccacgaaagggaaaaatggcgctttactcgcacgcctccttcttcccgcgcgaaaatcccccctctcccgcccaaaacaaaataaaactccaaacccacctcccctccccccaaatctcgcttcccaaggaaaccgtgagagatcagacgccgcgcgccgcgctcgagctcctccaattccccacgccgcgatccattccgaccagctagggatctcgcgcttctccttctccttctccgatggggaggccgcggaagccggcgaagcccgcggccgcggcgtcctcctccgcctccgccgccgccgccttctcgatcggtacgtgaccggaaaccctagccccccacgcctcgatccatcggatccctactagtgtttgtttgcccgatcggattgcgtgatacggaaaatggggcgcgcgtgttggcaggcaactgcaaggtggagatccacgggagcagcctgaggtgccagtccacggagcaggaggaggaggagctcaccatttctgggcccaggggcgcgaagatcgtcgtgtctggtcagtgcgccgggtggcaattagtggtcctatttatttctttggtcgcagatcatcttgttcttgacatttttcttttgtgtgatctttgtgcagtcgacggggccaagagttcttcagttggtgagttctagagtgttcaaatggaggactagtggaaggggagtttagtctgtatttcttttcattgatgcggtctgatctttaagtgttatctgcaggtgacggttttgatttcatccttctcagtccgagtgatgtcaatgagcgaaacaaggcattgcttcaggtggttaaattatacagcttctgcattaatcatttccagtgcaccagcaaagcaagtgaaagtggtacattatctcgattttatatttcttttgctggtagagtgcacttgcttgcagagctagaaggtttacatggccgcatattggctgtgcacactactattagtagatgtgtaattcctttttgcacaaatcgatttaaagaaaagaatagctgtatccatggtgacaataggattttcaaatactacctctcagtcagtggctgattccatattgcaaaaccattgatcatcgtatcagaaatatttggaataggataattcattggcgttcttatactgattttcaggaggtactattgctttataagcaagaactcccaactatggattatgctgctaacactggaaggaagtcagggtttctcgaaaaatgcgtgacaaatgggtacaatcttattctcttctttatcataaagtatttccatacccacggtataatatgacatatattggcgatgctgatactactattcttgtgtttctttttatttgacacaactactgcattttgattgtaaaagtataaacagtttacattctggttgtatgtcatgtacccaggaagtacaagactctagttctgagctctactgcaggttatgaagaggtaagcattaagaaccagtagcatcatctaaccatgtacatctatttcacaatgcataaatactactccggagtctgcactgatttcttggattgcttgtttgatgttaataaatatcttagacatagcatatgatccttaagatcagtgtggcaaaaaagttattatgacaagatgagatagaagatttgaagtgttatgcttctacctaaacttgatattttatcctcagaagaaaaaacctaggatgccatagatggttgagtctaccaaccagctcatttccaattatgtgcttactatgttgatttaatgtaagatagtgttacttttaaaccttgtgcctgttttcactttggttaattgattattggctcacaagtaggcagcagcacatatttaatgattacatcaggccaggtatgaagtgcttaggtggcaataagaaaacatccataaagggcaaggagataaataagtctcttaagtgatcacagcttcaattcccctgtcatagtttccaattatctaaaagatatccccgattaaactgagtgagccattaacttggtatggcaacttctgatccaactattctcattttcctttcatctcacacgagcatcctgcttagcgcttgagaattaatttagcacttctaaaaaattctgactaagtaaactatggatagtggctaatgtctaatgaaacagagttttctctaattagccttgaagaattttctgttcgctgcaggccttgcaattaaactacatttgattaaagctaattaatctttgacacaggtaacagctgccttatcatatcagctagtgccggctgacacacagtatgctgaaatacctctggcagtcgtgagacctccttatcaacgtgtggtatgatcaatgtaaattatatttcagtatcaaaactagcatccgttgcaagtttcattcctatcctctttgcactaagttttaaatgaattgcctctgcaaaatttcttggtacttggcttcttttcctacatgagatctgtaggactaacaccccgtcacccaaacttgaaaaactaatagatttcttcctgcgagttgcttatactctgtcctatatatttgcagtcattgatcgatgaaattccttaatcctttttattttttaccctcttaagcttcataacttatgtaattctttaaatgtttatctcagggtataggtcagctcttgtacaaggagcttagccagaggcttcgaaatgttggcgtcacaaccatattctgctgggcagataatgtctcagaaggattttggcttaaacaggcaagccaaaatagatatctaaataaatccaattgttttcatttccatttgcataatgaatatgcctttattacttatggtcagcaaatgctagagactagtaatctaatgttggcactattttaaagatcgtgtctcacttaagaaactaagctactaagcaagtctatgtcctctaagcatcaaaatctggaaatatgacaatgtgagttttcttatggagtgttctgtcatcgtgatcagtagaaaagaaatgcctgattagtgattgtttatgtattctgccaatcattagctcctaaaatcttatactccatctatcctgagttaaaattataattggcaagtgccgccaccagtcacacttaatggctacctacaagcgacccaagtaatgtcaaccgtgggcaactaaatttccctttttgtagcattttagttcattatttgttagtggactattagtcttattaacagatatatcctactttatcagcacagataatcaattaagacttggaagtctatgctaactagatgcttggtctttgcttgtgagtcaattgcagggttttgaatctgttggagaggtagatactaaaggcaagatttgcagaattccagtaagggccgatatcaagagggcattatgctttccaggtggttcaatgcttatggtttcacatctgaaggatttgccagctcctcaaaagagtttactttcatctcagcaaacatatcagtttcacacgtttgcaccagatagtaagtctaagtgaattcatattgctaattttcttttgggttctggtatctcaaacccgctatttcctggaactaattgtctaggcaactataattgtgatatgacatagattacatgcaatttagcaattatatgcttatatattatacaggcttcctgtagttctgagccacttttgtgacctattacttggttgcaattttattataatcacatgaatacaattaatctaagtaaataaaaaatgtaaagaagatcgtagtagcctaatatgcctcacatggtagaccagtatccatttatgactcttcatttgtcttattaattttgactctcaccaatcaagctttaaccagcaatatttttaggatgtctaataacatagcataaagtttgtatggctagatttgtaatcaaagttagttaatttaaattttgtatatttagagatattttcttttgtgatgtttaaaaattaaccgtcaaagttatatctgtcagcgccaaaattgggctgtaaatgtgagcagtgatggaataagccttgtggtctttggtccttgtggtccttcttttgcttttaggttgtttttccccttttaggacagcatcctttcagttttgcttttagcatctttcggttttgcttttagcatccctaggacagcatctagcatctcctttatgctttattcagtttggatgctctctaggacagcatcgcgttcaaattttagactagtgtgggcagcaattagctagcagccatccagccaactatagctatatatatgtatccaacctccctcgggaaggcatggcttttgtgtttgtgaatgaagaaaaccagaaaattgcctcatctcgagtgccatcctcttctcaatgagagtaaccattgaaattctaacatctggtatcagagccacactttcctgtaggctaaacatctcctgttccaccccttcccaagctcggttgagcactcagccagtagcagcagcagcaccagctgctcctccttcccctttcccttacccctctccacacagtagccccccggaggcgcgccatgtccgacgttcggtctcggcgttcggtcgcctcgagcactcggcgtcagcaggacgccgagctcgccgcagcagaggagcgcaggcgagcaacggctcagactgctgcagcagcagcgagggcggccagactggcggcagcggagttggcagcagccagggcggaggcggaggcagaggtggcggaagatgcggcacgtgcggcggaggtagaggttgagaccttgcgcagcagcatcaacggctccatcgccagcgacatcaccgctgacagggagcttgaggagctggcaagaggaagggcgcgggagcgggcagagcggtgggcagcagtccacccccacggcggcggcggcggcccaagggaccgcgcgcccgccgacgggaacccggacgggcgcgggcgtgccggcggcagcccggagcccgcgcgcggccctcgcaggcagcgcggctctccctcccctgaccggtgccatggtcaccacggcgtccagacggtggtcagggactttggtcccggcggtgggtggcctaccctcaccaaaaccaactacatcgagtgggccgcggtgatgagggtgaggctccaggtgcggcacatgtgggaggcagtctggtacagcgacgtcgactacgacgaggatcggcgggcactggatgccctcatcgctgcagtcccgcccgagatgcagttctcactttcccagaagcggactgccaaggaggcctgggacgccatcgctgcggcacgcatcggcagcgaccgcgcctgcaagtccacactgcaggcactccgcaaggagtgggagaacctggccttaaagccaggtgaggatgttgatgactttgccctccgtctcaacactcttttgcagaagatggtgcagtacggcgacaacacctacaacgaggagagagctgtcgagaagctcttccgctgcgtcctagagaagtacagacagattgctcgctcgatcgagtctctgctggacctctccatgatgtcgatcgaggaggcgttgggtcgcctcaaggtcgtcgacggtgatgagccacagcctctctcggggcctaccaccattggcgggaagctccatctcactcgggagcagtgggaggcctctcagggtgacagaagaaagggggagtcttctccctcgacaggcggcctcaagccacgcaaggcacgcggaggtgtccagctgcggtgggcgcgaagacgcgccgagggtggcgctcgcagaggcgcccagggcggcgccgccggcaaccacaagccggcacgagacgacacctgccgcaactgtggcaagcttggctattgggccaaagactgtcgacagccacgacgtggccaggcgcacgtcgcacaggtggaggaggaagagccggctctgctcctggcacacgcaagcatcgagcttcctccagcggcaccggccgcagtggctttcctccaccttgatgagccgaaggtactcgtctccctctgcaacggctccagcaacgacaaggctgatgggtggtaccttgacaccggcgccacccatcaccgtgaccggccgacgggagttcttcaccgagatcaagggcgttgtctccgtcaccttcaccgccaagtccggtgagcacaggctgctcaccggagtctactacatccccgcgttgaggaattctatcatcagcgtgggacagctggatgagaacggctcacgcgtgttggtcgaggacggactcatgaggatttgggatcgccgtcgtcgccttcttgccaaggtaaccagaggtactaattgactctacatcctcggcgcgtaggtcgcacaaccagtttgcctcgacgctcgtcgggacgacgaggcatggcagtggcacgagcgcttcgggcacctccacttcgaggccctgaagcgcctcagtgccaaggagatggtgcgaggcatgccgtgccttgaccacgtggagcagctctgcgacgtctgcctggtaacgaagcagcggcggctcccttttccccagcagacgaacttccgagccaaggagcggctcgagctcgtgcacggggacttgtgtggcccagtgacaccggccacaccaggaggatgacgttacttcctgctgctcgtcgacgacctctcccgctacatgtgggtgatggtcctcggcagcaagggagaggctgcggatgccatcaggcgcgcgcaggccgctgcagaggcggagtgcggccgcaagctgcgcgtgctgcgcaccgacaacggcggcgaattcacggcggctgaattcgcgtcatactgcgctgatgagggcattcagcgccactacaccgcgccgtacaacccgcagcagaacggcgtcgtcgagcggctcaaccagatggttgtggggatggctcgggctctcctcaagcagagagggatgccggccatcttctggggggagacggtggtgacaaccgtctacatcctcaaccgctcgcctaaaggccctcgatggcaggacaccgtacgaggcttggcatgggcgcaagccggcggtctcccacctacgggtcttcggctgcctcgcgttcgccaaggagcttggccacatcggcaagctcgacgacaggagcaccccaggggtgttcattggctacgcggagggctcgaaggcctaccgcatcctcgacccggagacacagcgtgtgcgcacaacgcgcgatgtagtgttcgacgaagggcgagggtgggtatgggacaaggcggtggatgatggttcgactctgacgtacgacgacttcaccatcgagtacgtccacttcgagggagctgggggagtaggcagctcttcttcaccgagcgtgtctaccccagtcctcgagcctccaccgactccaacaccaacacactctcgggccacgacttcgactacgacgagctcttcgtcgacaccaccccagccggtgtccccacgcgctctagtaccaacagccactcctccgggcacgtctactccgacgccagctcgtgttgagcgcagcccggtggagttcgctacttcgctctcccacgacggggagcgcatcgacgcgtaccacgacggcgagcagctacggtaccgtacgatggaggatcttctcggcgaccagccggtgccgggactggtgcctcgcgacatggaggcgcagttgcaccttgcgtgcgacgacggtgagcctcggtcttttgtagaggtcgagaaacatgcggcatggcgtgccacgatgcagtcgaagatggacgcggttcaggagaaccgcacctgggagcttgctgacctccctcgtggtcaccgcgcgatcacccttaagtgggtgttcaagctgaagagggatgaagccggagccatcgtcaagcacaagactcgcttggtggcacgcggcttcatgcagcaggaggggatcgactacgacgatgccttctctcccgtggcacggatggagtccgtgcgactccttgcgctggctgctcaggaaggctggggtgtccatcacatggacgtcaagtcggcatttctgaacaacttgaaagaggaggtctacgtgcaccagccgccgggattcgtgctccctggcaaggagggcaaggtgctacgcctgcacaaggccctctacggcttgcggcaggcaccgagggcgtggaatgccaagttggattccacgctcaaggggatgggcttcgagtaaagcccgcacgaggcggccatctaccggcggggcaatggaggaaatgccttgctggtgggtgtctacgtcgacgacttggtgatcactggcaccaaggatgcggaggtggcggcgttcaaggaggagatgaaggccaccttccagatgagtgatctggggcctctctccttctacctggggattgaagtgcaccatgacgactccgggatcacgcttcgacagaccgcctacgccaagcgcgttgttgagctggctgggctcaccgattgcaacccagctctcactccgatggaggagagactgaagctgagccgcgacagcacgacggaggtggatgctacacagtaccggcgccttgtggggagccttcgctacctcacccacacacggccggacttggccttctccgtcggctacgtcagtcggttcacgcaacgaccgatgacggagcaccagcaggcagtgaagaggatcatccgctacgttgcggggactctcgaccacggtctctactacccgaggtgtcctggcaaggcacacttcgtcgggtacagcgacagcgaccacgcctgcgacatcgacaccagcaagagcacgagcgggattctcttcttccttggcgagtgcctcaagcagcaggtggtggccctgtctagctgcgaggccgagtacatggcggcatccgccgcttcgacccaggcgctctggcttgctcgactgcttggtgatctcctcggcagagacactggagcggtagagctcagggtggacagcaagtccgctctggccctggcaaagaaccccgttttccacgaacggagcaagcacatccgggtgaggtaccacttcatccgaagctacttggaggaagggagcatcaaggcgagctacatcaacaccaaggaccagcttgcggacttgctcaccaagcctcttgggaggataaagttcctcgagctctgctcctggatcgggatggcccaactttcccacaagacgacacacaagacttagggggagaatgatggaataagccttgtggtctttggtccttgtggtccttctcttgcttttaggttgtttttccccttttaggacagcatcctttcagttttgcttttagcatctttcagttttgcttttagcatccctaggacagcatctagcatctcctttatgctttattcagtttggatgctctctaggacagcatcgcgttcaaattttagactagtgtgggcagcaattagctagcagccatccagccacctatggctatatatatgtatccaacctccctcgggaaggcatggcttttgtgtttgtgaatgaagaaaaccagaaaattgccccatctcgagtgccatcctgttctcaataagagtaaccattgaaattctaacaagcagggggagtatttaaggcacattacaagcctaaattacagaaactgctagccaaatatgctttatccattcaatgttgagagcaatctacttacatttagcttaatggtatgagcacttgtgcatttgcacaaaataagttcaatttatctggagtgattttttgtggtctttttcaggcatctctccaagtgataccggtacttcaactccctcctgtgaaaaattgcttccgcagacagttgcatgccacaaggtcagcaagactgcagcagtggaaaaaaatgaagatttccatggtaccggaggatgttcattttctgaccaacaagaaaataaacgtacacatgaaacctcatcatcttcactaaagtcaaaaagagtaagatgttcccaacattctgaccatcaccaagacatgaatcaaaatgagatctgtggcaaacccctttctataagcaacacccccatacatgaaaattcagtgcatctgatgcccaacgaactttctaatccaagcatggtaggtcatgttaaaagcaaaatatcaggagatgcaaaggccaatatcagttccaatggaagtccttctgttatgctcatgaatattgccgatgaaacaaagaagacacaacttatagaggtaatttctgtgacaatcttcatctttgagaaaatataagcgccatgtctaatgttaagggaatatgaatcatgaggatgcactcattgcacaactaggcaaactttgatgcattgaataaaatgcattattctttcccttccttttttgttactgcaatgcaatttctcttctttaagatgaagtaagttgtgaatcatgtcgcaggtagttgagatgcttggcggagtagtcacttgtgaaggaaattcatgtactcatgtcattactggaaaagttcgaatgactatgaatttctgtattgctttgtgctctgggttagttttcatctaatttctccttcaacaaaccacagacgccttatgcttccatcttatttcaaactataagaaaaatatggtttcttgtgtttaccctcacttaattcaaaatttcatgtatgatgttcaaacatggtactcattgtagagtactccctccgtcccaaaatataagcatttttagctatgaatacctgtgtccagattcatagctaaaaatgcttatattttgggacagaggtagtaagaattttgaataactagaaaccatatactccttgcagagcctggatagtttctccaaagtggctgaaggaaagcttcaaaaaagggaaatttgtaggtgagcaaaaacttgataactgtaggtttgatgtgtttttgtgctgtcaaatatatgaaaaaacatgagcaagaaattttcatagtttctttagttcgtggaggctggagctcttattgtaattaagtaggtgtttaaacccctagtactccatccatattgaacaaatgtactgcatgaatgttcaaagttaaaaaaaagcattattacttaaagtccatggtaaaaagcaacgacttatctccttccattctcttgctcttttctgctttcctaggagaagcagaatatgtttttcaagatgatgaatttaaggtgaaatacaagtctgaactgagagatgcagttgtgagagctaaagagaggccttgctcattattttctggctacactttctgtctgacgaagaacatccagccctccgtcaatgttctctctcgcatcattaaatcttctggtggcaaggtaacttcatattgtcaagctgtttcaaaatcatgtatacccaaacttctggtgaatatatgccactttttatatttgggattgataccttaactttagaaggtgttgtatacagctacataatccctccgttacacattataagatgttttggtctcttcatccttcgactagattcactatcattcatatgaatttggacacatatgaagcacattaatggatgcattaatgaatctattcaaaacccaaaacatcttgtaatgtgaaacggaggtaatatttatttgagattcatcatgacccatgggaattatgtagaacttctatattctagtgtcagacatgaattttttgcaatgatctttcaacagcttctattaccagtgatgttcaaatgtaaaaagtcttatacttcggttacagaatagtataaaatatttacataaagacgatagttaaactaaatgcatcgctttgatgaattactggcaaactgctgcctgtgtgcttaaatggttgaatgtcaccattagttctgagttagcaaatgcagttatactagtacttcattgaggagtattattcaaatatatttactttacagctcatcaataagctggatgacataactcagcccttgaagacaatcttcttagcgtgtgaagaagatatggaacttgcattggatgctgcaaaaagaggcatcaaaacattcagcggtgagtggttcttgagctgtgtcatgacacaagagcttgaccttgaggcccctcagttcactgaatctctctgatagtaggcctgtagttttagtcaatacagacttcatcctaactaatacctcgttagttggaactgtaaattattcttttggtatctgaacggttaatgtttatgtgtaaatatgaacattatatttttttagacctctataaactatcgagctatatttatgctcggaaactttggtgcaattgttgtatgatttgaatgaatattcttaagttctaaccgggctaatctggtaaatataaatgcaagaagatttcagacacattttaacattagttttgttgcatattgtggtttgcaacagtttttcttttagcttttgtgttgctatattaattggttgccatgtttgtgagcagtaagttacataaaaaaaatactctatataagaggcatatacgtttttcttacggatcatgagcctttacatggtgttttataggcagtgagatgatgtttggtacatatccttgaaaatgtagagtagaaagatagcataggtttcaaaaatcatatggagatggcatggaaaactaatcatatactatcatgacaactgaatcatatctaatccatcagcatggatccattccattagcgtcctttccactccccatcacctcatggcttcacctctagctccactgtttctggagctagagtctaaccaaatgctccgtctgtcctagaaagaattagcctaggagaggaggggatgtgactcctcctaggttgatgtatgtggatataaggggtgtccacatcccctcctaggttgattcttgtttgtatggagggagtagttttagatctaccaaaaaacaaaaaataagtgaaagcgagctaaagtgatctgaaaagataaactagagaggtggagcagggtttaggctgctgtacaattctactccagatttcgtttctggggagtttggattctgctgaacataaccctatttaaaattgcattaaaatatgttattataaaaatgataaggttttgtactgaagtagtagtatttgggataagaaaacgaaaaagatagagcaaattttgctacaaaacttttaaaatttatgtaatttgttggcaaagatgtttcacacctgaaagacatcttagaaaattgataatttgctagtggacacttttggcttaattgaaaagagagattcatcaaatagatgagaatgccccttgggccataggcttctaacataggattggagtaaaaatttgaaaattatgcagctctaatttcgccatcacttaaagtatatcgctaacgtagatcatattccaacttcaccctagcattaggttataagcttttaaccctaagagcattcttgtattttttaagcatctctttttaattgagtcgaaagtgatatttagcacattaccaaatatttaaaagtgtctgtcaattactaaatatttaaaggtatctgtcaatcatgatacttttttcgatgtctactggtaaatcgcatgaatttcaagtgttatagtatgtagcaaaaattgcttaaaaaaatggatgacctcacccgagt

SEQ ID NO: 22420 - DNA, 4663 bp, Oryza sativa
aaaaaaaaagctgaaccctatgccccacgttaggttagcctctctacacaggcgcatgaactactctagcacagtttcagcaagttccattctggctttgaatggaatggtttgcctctgtctgtctgtgtctatgacagtatcatactatcttgtgagcacctttggaattcatgaattttacagaattttcacatgatgaaacagttcaagtcacatgaaattcctcgaaaaatcatacgtcccaaaaggacgcttgaacaaaacacaaaaacacacacacccaaaaaaaacccgaaggaactgcctcaatatccttccaaatgatactgtgtgcttctttctgttataaaaaatgaaaggaaaacgaactgttgtttcacctataacctattgatgtgctgttgctgatgatacataaagaactagtctaccaaagagtggagaacagaaccagaacgccattggtaatttggtatagaatgaatcatggatggaagacaagtatcctgttcatgagcttgtcagtcaactcccacggtcttgtagctcgttcatgagaggaatcaactccacagtacccgttccagcatcgaccactttgattctttcatcttcgacagccacattcagagcatgacagctagaatcatctgcgacaaggacggaaaattcagcagtgtcttgacctcctttcctagcttcagtagattcattgtcctgaagcatctctgccgggaggagcattgagttttggtcactctggggaacaagaaacagcagcatcagcgggagcagcctcgacaagtttctgatcaggacggcaacccagaggttactgaactctgttcgagtcacattcagcaagtgcagcatcaggccaccccaccagccagacatcagcaacccggcattttggatggacatgagcagcgcatagaaagttccttcgatgcctggaggacaaagcttggagcaaagcacgaggagcggcaaccatttgagcctcccaaccatctgggagacactgttgtcgatcaccgcaaagacgtaatccggaatgccgattcttgtgttgagccgggtcaccattatcagattgagcattcctgccaggcttgaaagaacttggccccagaatagcacgccgcggaaagggtagtccttcagtgaaatttggtatagtaaaactccgagcagcgaaccgattgaaccgaccgaatacacaaggccaataaattcctgaaataaacgatcgaatgacgcaatcgaagtgtcatcagatgattaaaattagaagaaggtcaaataactgaatttatctaaaaccacacctcattatatggatttaacagtggtatgcattctcagtattacagtccatgcaaatgatgcgatgaactgatgatatctagcaaatatctatatgcaggaatgtgcatacctcagagaatcctggtcccactattggatcagtgtaccagtagaacattcctgcttggatatccaggcttagactgagagaaacatacatatacacacacggccgccaaacttcagtgttgcccccatggactgaattgctttgtagaatttcctatgaacctgaatccatcaaagcactcaagtggcatcactgtccatgcctgaattcagcaatctcaacacacaaaaggaaaggtgttcaaattttgtcttgacattctgacctgcttgtaatcgaaatctgtaactcgcctctccttcagcaaaacaccagccaagaacaccagtgcagaagggatgcttagtaatccaagagcacccttagaacaagaaaagaaaaaaaaagcaagaatcacaatcatatcaattgacattgtgtgagaaaacaaatgatgatgcaaatcattatctaaggtcagggaatatcacacctgagaccctatggagtggacaagaagaccgctgatggagaatccaagcaatgccccaacggaggagctgaacccacacaggctctgcatgtctgcggctagcggctggtgcgtgatgctgttctgagcaaccagcgcgtccaccgtcacgtcggccaccgccgcgcccgcgctctgcgccgtcagcgccaagatcgccggcatgatgcccagcttgcggtggagagagagcgtgagcatggacgacgccccaatcactcctgaatgaatcaccgagagaagtgatcaagaaaggcgaaagccttcgaactgcgagatgggatcgaggaggcggaggctgcaatcccctcaccggcaggaggaagtacgggcggcggcggtagccggcgacggggacgacgtcggtgagcaggccctagatgggcttgacgacccagggggcgctgacgaacccctggtagaactgcgccgccgacggctgcacgcgctgcacgtccttccagtagtaccccgccgtgacgccgccgacggcgtcgccgacgccctggcaggccccgtagacggccacgacggcgagcacgaagctccagcgcagctcgcgggacagacgccggagccagccgccggggaaggaggcgccgccgccggcttctcgaagcgccgcgtcgtcgtcctcctcttggcgatccatctgggcagcgatttcttgccgggggtttcttggggatctacggcggaagcccgccggaattcgcacggctagaatgcaggtctcgcgattgctcggtgggagagattgacgaggcgcatcttggcgttggcgagctgagcaagagcaagtgtgcgttgatgggtatctgcgctcaaggttttgacttgacaccccccccacccaccttgcaactattatagtactgtatactcctactaatttaaccatggtaattttgcaccattaatctatgtactagtagtagaaaactgggcaacatgtcaacactaattttgcctttgtgccttttactattgcgcatcacctctttgcactgcgttattactgcgtagctgcttacgacctgatcaaggcccgacaggaattaataagtgaatatgaaataagttcactttcgacatttaaatgctgagtttgaattgcgtccttatccacaataccagtataatatgtcagttaatttataatatcggtgtacccgagattctaaaacagtataacaccccattttaactgacatgattagccaactatgatcataatgatcgagtaagcgtgagacccacatgagccccatatatcagcggtcaactctttttttccttcatcgccccttctctctacccatccctcttgccaatttctctccaccggtggagaaggccagaagggcggtgagcagcgggaagaaggatagcggccaatgggagaggggtgacaaccagtggactagaagaccttgagcttgccacgcggctgctcgagcaaccctcaccctcaggaacccagcatcgacctcgattgcgtaacatcatgttgccccctcggcttaccccgatggcaacacaagctacgtggccaaggtcactacggggttcttgagcatgatggcttttccagcagctgctccagttcctgtcgggagagagatggggaaaagggatgggtagatagatattaggtaaagggactcggtagagagagttggctgctaacatataagacccatgtgggtctcacgctgactcaaccagattgataatagtcaactcgtcacattagttaaaactggatgttatactatcatgtgacctcggttacaccgattttgcaaattggttgaaggacacaatctaaactcatagtcaataagagagacctaaagtgaacttattataatgaatattgactattgagttggcccagcagcccaccatgttcataagaataaggtccatgacaaatagtgctcacctacttccgcctctcccagtctcctgttcgttcctctctcccaagtctagggatgaaagtggttggaaatggtcggaaacggcatcattattttattattttttaaaaaacaagcagaaacgggcgaaaaattttcatattcatgaattcatctatttagtgtcaacttcaatgccacgccgatagaaattaaaaaaactaaattttaaaaacgataaccatcgataaaaatattattattatattagtttttcggaaacggtatcggtacggtcggaaaatttccataccgttttcacccccagccaagtcccaacaacgttccgaggtcacagcgctcgtccgggcgtccatcgctgccaatttcaggcccgttgttttggcgcccgaatccccctcccgcatttttccccttcagaaaaccccgcgcgcgcggccttctcgattcctgcccgtccgatccgccctcacagcctcaccgcctcatctccgccgtcaattggccctaaccccaccgaccacccgcggccctcgtcttcctcctcgccgcgccccctttcacaacggagccgggcgctgtccccccctccgcgctgcaccgcaaaccagccgccgcctcccgtcaagaccgtccttcgccgctgcagccgtgagggcatccctccccctccccgccgagcgagctacaccggcctctttccccccctgccccgtgctggacggtgagtggcattcttcttccccctttaaaagttttcta

SEQ ID NO: 22421 - DNA, 2615 bp, Oryza sativa
gccggattccattctagtagcaaatttctgcaatattccatcaattagagcgaatattaaaatcgctcgtcaggttggaaaaaaatggttgttgatttagttctcgttaattcccaagcatgctgtccgacattggcatgttcctggattcagatttgataatggactgatcaatctttgttgatttggtaagtggcggtgacacgcatagggaaggaacctgcgggacggaggtgaagaggcccaagagctgtgcggatggcaaggtcctcaacaagaagaggaactacgcgcagttccacctggagcttgggcagcccgattttctcctccacatgtgctcggtttgtggcatgatgtatgcccgcgggaacgacgacgatgagaaggctcacaaggcataccacaagagttacttcgagggtgtcccgttcaaggtgttgcacctgatgtatatttgtgaatctcactcttctgttcatctcgtgttataaatttctgtgaagagtttatgacaaatgtttgagttgcagggttggcgcaatgaaaccgtggtcgcgaggtctgaaggtggggatcggataattcttgtgactgatgaaaattcatgtgctcggaacagcaaggtattttgcctgaatgactaactgtattgcctagatagttgaaagaaatcactagttggggtcttggggaaatgaatattgaaaagagtgggttcctcatagttctaaactgtagaatgtgtgtctttactaactgcgaagtttctgatccaattttgcaaccactttacatttacgagaagttcagaagcagattgcagacattttatgattatgtaatgtcatgtgaatatttcaggtccaggaggtgatcaaagtggtacagaaggagctggggtttggtgaaggtcagctccttcacaagctttgtaaggtaacatcagctcttagttcaaatatgacaacatctatgcacatatattcatcctaatgggtaaaacctcatttgcgttgcataggtatatttgttcatatctagtcagaggatagtgggatgccttgttgtggaaccaatcaaaacagcacataaagtgattccaggctccacagaggaaaacggcagtgatctgcctgttgataaaattgaaccagtcaaaacaaaccatacattagcgttcgggaaaatcagttttaagagggaagtcctgaaacggcatgatcattcagacaagaacaaagaagagtaccgagatcctggtgctataatatgtgaaaaggaagatgttcctgcacattgtggatttcgagcaatttgggttgtaccgtcacgcagaagaaagcgaatagggtcacaactgatggatgctgctaggtaagttctaagtttgatgcgcattctcacctactttgcttcacttagcatctttctttttcgcagcattcctgcaatgcccgtcttgaactcttgatagcatacattgttctttttggggggaatacgcaaaaggcttgcgcatcattgcactaagagaaggatagcatgcattgttctctgtaacaacaatgtatagatccatcatagcatgcattgtcaatttggacaaattccaagcttttgaccagattataggactaataaaactatttgttaactgacatcacactgcaaatatcactgaattatttatctgtctgtccagttgttctcttctatgctctgcaagcatttccaagagtttgatattatcttatcttgctaaggcactctccattcgtcttctgcagaaaaagcttccttgaaggcgagactttgtgcatctcacagtgcgctttctcaccgcctacttcctccgggaaggcgctggcacgcagctattgcaagaccagcgcattcttagtctacaaggagcaagatgcataggagatgctgcagaagatgttacatatctgaaacttctcttcccattgtaaaaattgttttgctggggatatatgtgaaacataaacaggcatgttctgtttttagtgtaagtctaagcaccagaagcagtgcgtttttgcaggatctctatgtattgacactttggatttcctgatcagcagcattttctgaatatcatttcatattagtagcttgcaatcttccttggggaagatgagatctttatcttccttggggaagatgagatctttattagtccttgggagttattaacaagcagagttatcttctagtgttaacctctgtctctcaatactctcaaaacccaagaaaaacacaggggaaacagtacaagccgctgcaatcatatgggaacatgtcacaactttggtcaatatatacagcagaccgatgatacaatgttctgataactagtcagaatcaacaatgggcgacactgatgcttgtgcgccagaataatacatcttttaatgttttctcctcgtcaatggaccatggatggctgcatttgagtactcatcaaccactgattgtgtaagtgatggacgcaaggatcttagcgcggcctggaagtgaatatcgtcacatacaaaacgttctgacctcagactttccctcaaggccttcaagatctgcgcccgtgaaaa

SEQ ID NO: 22422 - DNA, 1743 bp, Oryza sativa
agccaatacaataattccctacatcaaaaattgcaagatacttttttagtacaaagaaagggcatatatgagatatgacaaggagagtcacatttgaatgccatcgtcaatctaaatatgtaagaggtaccgtagccagttctaaaccatccatttccgtcaatagagttgataagagtctttctccaaccgtggcattgccactagagttcccgctgggaccagttctgaacgattacaaactccaatattaacattcactggtcagatgtggaacatgcgcagaagcaaagttttcataaattgattctactatatgaaaataacatttggggaaccatatccaacaaaatatgcttaacacttctgacacctcttcaacttcctaatcatgtacaccatggaaaagatgcaaatattattattacgtaattatttttttattagagaagggtattttttacccggcctctacatccaacagatatatacggccattaaaatagggaacttagccccgcaaacaacccaatctgaaattcgctccataggacggccattgaaatagggaacttagccccgcaaacaacccaatctgaaattcgctccatagaagatttgaactcaggaccttggggtactactcaggtcattataaccactaggctataattattacgtaattatagaagatagcctataacaattcatgcacattcttatgatgactgtacagaatcatttttaccaatatcatgcatcatgtatcatagatctcactagtatgtgccacaggacaacaagagacaagatataaatgtgcaccttttaggggcaattgcatcagcctcatcaaaaaatataatgcttggagaagcaagacgtgccatctggaatgtacgtcgcaacaaagcttcaccttcaccgacatacttggagtataactcagcaccactgtttgaaaatgtgtaagaaatttagaacaacatagaagactgtatactgaactcaaaatgatccggttagcatgttctagctatattatttggactagcgtacaggacaacgattcaagcagcagaatttgaacaaattatgccagcttggtcttaacagtacatgaaataaacatgttaagttcttttgcttcctctaataactccttttcagtacatctgagattaagtgatgtttattgaatttattacaatataagcatcacatcagaaaatattatgcaattcacaggcttctttttgcatgttggaaggatgaaatgagaaaaagagagaacaatttttacgcagcaaaccttaatgaaaagaaagaagcttgggcagcatgagcagcagcctttgcaagggtagtctttgagcaccctggtggaccatgcaatagcaccccacggataggtgatattccaagtctatcaaatgaagcagcatgcttgatgggccattcaacagcttgctgaagttttttctgaagcatagcaacaataaccattaaaggaggtttgattaaagaaatcctaaaatgaggcatattttaccttaacagctttcaaacctcctatatcatcccatgaaacagctggaatttctttaattacccctcttgtcacactatttttggccacagatttagcagactcccaatcctccatgattagcgttagcacattctcactctctgatgagcttgataatctaccataagcacgtcttgcagcttctcgacata

SEQ ID NO: 22423 - DNA, 1106 bp, Oryza sativa
ccggccagagccaactcggcctgctgtttgttgccccagaggaggacaacatggagacgatcgtcgcgcaggatgcgcttgtaatcacgtggaactcgtcgccagacaccgcagatcttgcccgtggcattctgatagacactgagagtgcccgccaaggtggtctccagttgatgctcctccaggattacacccgcatcatcaacgaattgaatggcacgcggacgaccgattcgcgatgaggtgtagaaggagtagtatagattcttcttgtggaacaggaaacgggcggtggccaccacattctgcggattgtaggtggtgtacatggacttcatttcctcacccttgaggaaataggaggtgcggcccgttagcaacgcagcgtaatctataaatagggatcaaatgaaaggtggagataatccaggtgttagataaatacaatagttctcttgttaattaaatgtaggagctggtgaatgggattacaatttcccgcaggatttggcggattctattgggatctgggtgggtgtccggtacttttgtacttacgtttcatgttgcgctcttcctcttcattgggcacgggcacatccaaggctacatccgtatctgaaagatggagggaatacaaatagagaataagatgatgctgggcgataaggtacgaccttaaatggaatttagatagcaacaaatgcttcaaagcaaccgaaccgccgccagccattcaccatccatccagccagccatccagccagccatccagccagccaaccaactatccatccacaatttgtggacacaattccggcattcaaccaaaattccagttgaatgggtgaatggtgaatggctgaatggacgaatgccaggggatcatcatgaatggcaatgcaactatcaggtagagatcccacctccgaactaagaccttccatttccacctctcgcttccacccaggtggcattcattaatcgtgcataaattgagggcaggtagaaggtagagtttctcgaacgggaagtctaacctacatctaactagggaagtgctttgtatttgaggatgtgcggactctgggcgttctgaattcatg

SEQ ID NO: 22424 - DNA, 529 bp, Oryza sativa
gatgaggaaatcaccattgccgagcgcaagccatggcattagaggaggaagcggctgagccagcgcgatgtggcgccacggtcggcacacggctctgaagcgaatccggtcggccaaggagtgcagacggtggagcacaatgtccagtagctcaggccggagatctgaccaagccgaagactgcgcggtggccatggcacaagcctgcaaaaaattaagatgattaaggtttcagtgttagcaaaatttcatggacaagattcagaatccctgcgtttcttgttatcatcaggagtaaatcaattcgcattgcaatcacacagagtaaccaatcaatttgcaagagcacctgttcctacgcgcgcgcgcgtgtgtgtcgccctgtcgcggggaggaagctccggagaacggggagatgggcgcggcggccggtcgtgtatggttggctgcagaggaaggggcccggggagccgccgccggcgaggccgcgatcggcggagaggcgtccgtggtgattggggaatttggg

SEQ ID NO: 22425 - DNA, 11189 bp, Oryza sativa
attctcaccagtatgacacttccctttcagctaaacttccttgagctcctccaaactccaaacccacggatctgatggctcccacagcaaatgagctgaagaacataacgcaagcaacatgatgtgcatctcattcccatctccaactcttagggccatgaagatggaacaaatttgataggcaataaagtttcgagaaaaaaaatgttaggtgatatgaatgtttgaattcaaaaggaactttccctacattataggtgtcacatactttcaggacatggacttttgctataaatttggagggaaaacaaaagatgaaaattaactatagaagttccagagttctatgtctattttccgctgctcagttgaagacagcaagcgttctccttactgttaaaagcaccaatgttccatacacctcttttgagcaaacactgcatttcctatagcattatattgggaatgccatcgagtttctatgttttttatttttcttcattcgagaaagcaaacatttgcatacaagtatcgcagatgctccaacatcatcgagcgacttagatctgaatgtgtttccttcatcttaccaaaagcaacctgattacatttacatctgaaccatcagtaaaagttaattgacacttctcttatgttcatgccaaaactctactatcaggagatgccaagaagagaaatcgtaaatataacacctggaagcaagaatactatccaactaagttcaagtttcagaggggaaaagccaagttggacaccatggaccgccgtgtactgcaagaggctccgccactagagtctctgtcaacaatggcgccactgtcccgtctctcatgttgtacacgccagagtccaaaaaaggatcttcaggcttcccattcttgatgtcctcatgcatgaagtagatgcagtcttcttcagctccggcactgagcgacttggagcagcccttgctaacaaagagagcatgccccatcaatgtatccaccttgatccaccttccacagccactgctcaggtctgcggcttcaaagacttcgaaccgccgtgttcgcttaacaatgccactgtcgcttggatagattggtggaagattgatccaccgtcgcaccatgagcagccgatcgttggacgcgacgagatatcgctccgtcgcgtacctttcggtggagcaagggccaaaccatgattcctcgcctatatctttcagggtgctgcttatgcatcttatgccaatctgcttagcattatcgactccaaagatatagagctcctcctgacgtttccttacgtcagatgttaggtagtagagcttcccttggaaggatgcaatgtcgacgatggagctagggaaatgtgcaagtggaggtgaaaatccaatagtgacaatgaccttccaagtgcggtttccgatcagcaaagcggtgaagttatcagacaccaccgccttgttgatcagcgggacaagtcgttgcctatcggcggcgaggtatttgtacctgatgtatttagggagcacggcggcgagggcggcgagaggggtcgttgccaaggaggacgggttcatcagggagagcatgccgtcgccgtgcacgatgaggaggccgcttcccgtggaagcgaggtgcgtggcatcgccggggacggcgggcaagcggtgggccgcgccgtcggggagggtgatgaaggcgccgccgcggaggaggagccacgggaggggcggcggaagaagatccagctccacccgcgcgctggagcgccatgggcggcagacggcgcggaggcggacgcggtcggcgtgggacggcaggcggaggagcacgaggcccaggagctccgacgggaggtccggccatgggcgtccactgcagggctctggtgtggccattattgcctgggttggcggaggctgatcgtcggcgtggagctctaccttccgtttcttcgagggcatagtctcgccgagttgtggggacaggtgcatcgccggtgggagccgccggcggcgaggccgcgataatcggcgatcgccggcgaggttggggaattggggtttctcgcgtaggaggaaatcgtatagctgctcctgcctctttttattattttttttttgagagagaggaaatcgtatagctttcttatatggagaaatcgagaaaggccgagtacgagtaggagtaggccgtaagccagtaaccggggctagtaggccctaataggcccatctatgggttggtttgtgtataatctctcccgtataccttaccagttgattgatcaatgtagcacatcatgatatggagctaccacgattctttggtacaaagaaacaaggagtaaactgtccagaatgccaaatagcagaagagcacaaaaccatatgagtaactaccgaaagataatcagatgaaaacacatcatgatacaactacaaaacacgattatagggtccagactgatgtcaacgtccaagccattgcttcaaagcaaattattttcttcctcaacagtatgaaagttcctttcagccaaaatatatgtgaatgttgattttcttttcagtttgctctgtagctgaacaattgtcgtttccagtaatggaaaaggggagcgctgtgctcttctgtttcaaaataaataaataaaaatatgcaattcataaaaatctgacagttcccatagcaaatgtgcaatgtcccgctgaataaaaaatcggtgcacttatacacactgcacacaagttggaatttatcttctcctatggtcatatagattgaaggaattttataggaaaaaggaggattaaattcaaaaggaacttccctacattagaggtgtttacattatgagattgcaccatcgagacccctacagggcaggaaattttgctatgaaatttgaagggaaaaaaatgaaaatcaattggaagtttcatagttctttgtctacttttccctgctcagttgaagacaccaaagcattctcctaaaattttgatgttaaaagcaccaatgttccaaacacctcttttgagctaatactgaaacactacacttttcctacaagcattatactggtaatggcattaagttcctacatttaccctgtatatgaattcgtgttcctgcatttgagaaagcaaacatttgcatacaagtactgcaaacacatagcaacaaaacagtatgctgcaacatatttcattaagggacctagatctgatcatctttttccctagtctttccagaactcacctgattacatctcaaccatcattaaaagtttaactgacactttgtccttatgttcatgccaaaactctagaacaggagatgccaatcgcaaattgataccttgaactccggaagaaagtatacagtccatcttagtttaagtttctgttggaaaaagccaagtcgaaaaccatggaccgtcatgtgcagcaagatgctctgtcactgcagtctctggcatcaatggcgcaaccatcccatctctcatgttgtacacgccagagtccgaaagaggatccttaggaatcctattcatgatgccatcattcatgaagtagatacagtcttcttcagctccggcagtgagtgactcggagcagctctcgctaacaaagagagaatgccccatcagtgtatcaacttttatccatcgtccatgttcgctgctcaggtccaccgcctcaaagacatcaaatcggcgagtccgcttgatgctgctatctctcggcagcatgggcggcagattaagattaatccaccgtgccaccatgagcaaccgatcgccatccgcgactagatatcgatggaacgtgtacctgtcggtggagtgagggttgaaccatgcttcgtcttcatcgcccacatctctaggagtgctgtgtatgcatttgacatcagacaccatgggctcctcatcgcggacttcaaggatgtagagctcctcctgacaattctctatatcaaatgttaggcagtagagcttcccttggaagagcgcaatgtcgaggatgtagctagaatcaggaggactccacttcaccactgtatgcggctgtccagaagtgatgatgaccttcgagctgttgaaatagaaagcaatgaagtgttcagacaccaccgccttgatgatcggggtgattctccgttgacccagttggaatgcggtgtcagggtatttgcacttgatctcgccatgaaagaccgcggcgaggtcggggagaggggtcgtcgccgaggaggacgggttcatcagggagaacatgccgtcgttgtgcgcgaggaggaggccgctccctgtgggcacaaggtgcgcgacatcgccggggatggccaagcggcggtgggctgcgccgtcggggagggtgaggaaggcgccgtcggggaggaagagccacgggagcggcggcggcagaagcttccgctccagccgcgcgctggagcgccatgggcggcagacggcgcggaggcggacgcggtcgccgtgggacggcaggcggaggagcacgaggcccaggagctccgacgggagatccggccacgagccaccattgcatggtcgctgtgcggccatcgcgccggtggaggagatgctgcagcggcggaggccacccgcagagtacacgtcgccggcgagcgatcgaattggggaattggggtttgggtttttttttctttttctttttcttttttctttttattttttatagagagagagggtggatttgcggaattattcacggcccatttgttgattttcatatgggcttggaagagcggccgtgcagtgtgggccggtagtgcaaacgtctcattttcttagaatttctcctctctctttttttttttagcttaggtcttctttaatgtttacaaactcagttcaatttatacatgattcagggcaaatacatgtcctatgttcaaaattccaaattaggcttagacctgtgactgttggttggcatgtctcttgccgtataccttaccagttgattgatcaatgtagcacatcatgacatggagctaccacaattctcaggtacaaagaaacatggagtagactagcaatgtcccactgaattccaacgataaattcgatctcagcaaacaaaacaaaggacagaccccgggtatcaagcatatacacggaataagatgatgaactctacactttctgaagcgacagccaaacatttcatcagaacagagtgattaacaagtaccacctctatattttaatgtatgacgccgttgaccttttgtccaacgtttgaccattcgtcttattcaaaaaatttatgtaattatcatttattttattgtgacttgatttatcatcaaatgttatttaagcatgacataaacattttcatattttcacaaaaaaaataaaacgaatagtcaaacattgctaaaaagtcaacggcgttatacattaaaatacggagggagtactaacattatttaagcatcatccatcagcctatctacatgtaatatgtccatataggatacttcaaaatacatcaacagccgcatgccacacagtacgacggattacattcagattacgtagcaacatcagcagggaagaaccatgcaggatccccccggcctgtaggatgcagcctcggcgctgtggcatcctgcaacaacggcgtgatcaccccgtttctcatgttgtagacgccagagtcacaaagaggatcaccagcataaggcctccaataatcacacatgaagtagatgcaatcctcctgaggtacaccacattctgcagcagggagagactaggaacaatgtgtgccgacaaatagtgctcgaccccccaaagatgtaacccttctccacatgcgagagccggtggtcaagtccgcttcaaagaccttgaatgaaagagtacgcgaatgtttgaaggagttgggctctgcaagagggagcacaatgccaacataccgtgtcaccatcaacaggccaccaccagactcaactagatagtacctccgcataatgagataatcttctggaaaggattggggttcagtcgtcgaatcatcctgggagtcaattatgcattcaatggatgagatctttgggttacctatgtggctctcatcaatctcgaggatgaagagtttattgaaattatttaacacatatagcttcccatccaagaaggtgaaatcctgcatgccctccattgtagaaccctcgactctgaatgactcagtggcaactggaggctggcatatgcacaatgccttttgatgagaacgattcatgatcagtgcaacaacgagggaagttggagaaaagtccaggggagagggcactgccaacttataaaagagaggaaacttgggcgcagcgtaccatagatgatgacaccaaatggtatcaagtttaggaagctgcaatgtggccttagagaacaggttcataagcgagaacccaccatcgtcgtggctaaggaagagccagttgtcaatggagcaatggcaggaagcatcatctggtaaaggcatgcagtgaatttcaccatctgaaatgctaaggaaggtcccgttgaggagagtgagccaagggagcggagggggaaggggctgcagccgagcattggagcgccatgggcgacaaactgctcttagtcgaacacggtcagctaaggagggaaggcgtgtgaggacaagacccaggagctctggctggaggtctgcccaggatgaagactggacagctgccatcatgcaagacttgaaatctaacaagaaaatacaaagagttcagaatttaacaaactactctgcacttaaaattactaagcacttacactatttacactatttctgtttttttttttttgcggggtacactatttctgtgtttgatgaggctagaacagaaaggatgattctttcaagtaatcagtatcatcaacagcacttctaaaactatcatcaatagcagcagcatcattaaatcctggcgcattcccattttcctttcattagggaaaggggcttcttgttccacaggaaaagaatgaaagcatatcatttcattctttcatacactggcggttttttttttttttgaatttgaagtacttagcacactaaaatgtgttctttgtagtggggtagtgaatggaatgctaagacctgtatacagatgcattgtggatgcacatatggaccaatgcattaaaatttctagtcttaaatctgacacgtttccccgcaaaataaataaataaataaataatctgacacgttccataccagaacactagaacagatcagttaaaaacaagcacgaattcggagagaaacctgtagcaatctgctcagctaggggaagggctggaggagattgaacatgcagaaaaccacagaaccactcctcgcacagactagcggcggccccccgtacccaccacccagctgcggtggggagaactgccgccggtagccggggagagaacgccgcagcggagcgaggtagacgaccgccggcgaggatgaggagggtgtcagctcatcgagggttcgccgtcctcggtgatgcacctcggtgcaggggggttttggccaagttgggccgcggcccacgagtcgatggaatctagaaattttacccctagttttctcgtaagctagtgaaggctcctttaaaatggagaaaattttacatttttacatgaaatgaattcaattcttataaaattgcaccaaaatttctccatttcaaaggtccaaaacttaggatgtgttcaccagttggagttgggaacacttccccattgcacgcaaaacgaaacaacgaaatcaagtattagctaaaaaaatgaaaatggaataatatgatttttgaaagcaacttttctatagatttttctttttgtaaaaacacaccgtttaacagctggaaaaatgtacacacgaaaaaaaacaagaaaggggaagttgggaaaatagactaaagaacacagtcttagccattagggctgcaaggccgtggacatcaccgtttagtcgctatctggcgcaacaacgattcatcaactaataccacctggagtagctcgaattacatagaaagcggacattgcaataatttactgaaaaggattgatcgagactcttaattagttccatgactataaaacgccagaattcgaaatgtatcctttttccagctctaacctctagtttggttgatcagtgactcagtatgaccacactatatgagttcttgtgacttgtaacatgcacatccgttgccttaaaaaaatgcatttctgtagtaattgtcaatctcaggaaaacataagaaaggatggataagtcaagtataaaatgagaaacatgaactcaatgctttctgaatccagagcaaatcattctagcataagagtagacatgacaagtagcaaaatattaagcaacatccgccggtttacatgttgcaagtgcaatgagaaaacccaaatcaaacagtcaacagagagtgccatgaaatggggctgattacatttacatagcaccatctgcagggaagaaccatgtcggatgcccctcgcctgtaggatgcagtcgcggcgctgtgttctcctgcaacaacggcgtgatcaccccgcttctcatgttgtagatgccagcgtcgcaaagaggatcttcatcagatcggaagtagtcatcacacatgaagtagatgcagtcctcctgagctccaacatattcagcagcagagagagacttggagtaatgtctgccaacgaagagtgcttggtctcccaaagattccacccttctccacatacgagagccggtgttcaagtctgcctcatagacctcaaatgaaaaggtaagtgaatctttgaagatatcatcatcatcttccggagggaatgggacaccaacaagtcgaatcacgttcaacagtctgccaccagatgcaactagatatggccatgtcacacagatatggttctcaggacaaggttgagaatgggattcagttggaaaatcttccactatgcattctacatgtggaacctttggcttttctatatgtacctcactcatctcaacggtgaagagcttcccacaactaagtgcatacagctttccaccacagaatgcgatatcatagaagttgttcttgattggacgatcatgaaatctgaatgagtcagtagaaattgatcgatgaacaatacaaactacactgtgacgaagagggtcattcatcagcacggcaacaagggaatctgatgataagtccaggggcaagggcactgccaacttatagaaaagtcgagtacatgcattgtacgcatttcccctctcatgatgccaaatgcgggctagcttaggaagctgtagtgtagccttggagaaagggttcatcagtgagcacccatcgtcactatccgtgaggaagagccagttatcaatagagccatagcaagaagcatcatctggtaaaggcatgcggtgaatttcaccatctgagatgctgaggaaggtcccgtcgaggagattgagccaagggaatggaggggggagggtcagcagctgagcattggagcgccatgggcgacacactgctcttagtcgaacacgatcagctaaggagggaaggcgcctgaggacaaggcccaggatatccatctggagatctgcccaagatgaagactgggtggctgccatcatgcaagacttcgaaactaacccaaccaaaaaagacaaagggttcagaattttacaaaaaaaaaaggacactaaacattacaacaccacttcaccaggtagtgtcatactatttaacatggcaaaaggaattgtacttagtcatttgctaaaaaaaaactcaaggtgcatgactaaataaaatggatgacctgacatcatgcaagactgcaagtctaacaagaagtgacaaggtgttcagattctgattaggtaaaaactgacatcatgtatgcaaagagcactgtatactttttttcacaaggcaaatgcaactcaactaagcttttgtcgaaatctcaaggtaaatgagtaaacataaacaatgattctttcaactaactattatcatcagcagcaacctaaacgggtaatgacgtactccctccgtcccaaaaaaaaggcaaaccctgggtttccgtgtccaattttgactgtctgtcttatatgaaatttttttataattcgtattttcattattgttagatgataaaacatgattaatattttatgtgtgacttgtctttttaatttttttcataattttttcaaataagacgaacggtcaaacgagttggacatggaaaccagggtttgtctttttgggacggagggagtagtgaattagacgatgcactgatggtatactaagtccaatattcagaaacgatgcgcactatatgatttcatatgacaaaaacactgaaacaaggggatatgctcatgatcatcggtaccgcgcattaaaaaaaatccgtggttctcttacacatcaaatgctccatgccatcttagatcaaccaaaagcgaacactaatttggctaggttaaggtatgaactaagcaccaatccggtcccttccggaaaggaaagtgtagcaaccgctcgagtaaaggggtgtacctgcggggcttactcgtgatcgcctacttgccgccggtcgccgagagctggaggagatgggactagtagggggtagcgcgcggcggagaagaggaagcggcgcggagtagcagcctccgaagtaggcgggggcgaggcagatctccggggagggggatgaggaggaggagcgcgtcagttcgctggggattcgccgcctccggcgaggggcatcgccggcgagcggttcaggaggcggagcgagtggtcgaattgggaattgaggtttcgtgttttttttaaataaaaaattgatgggaaggttttggggaatttgtgaagcgaggagatgaattttttgggccatttgttgccactgcagggtgggctggtgcctggtggcacaagccacagcccacaaggcctcctttacagtttttttcttttttgaaaaattaggcatcagtttttttcttttcttttttttgagaacgcatcggttcagttgattccatggagaaa

SEQ ID NO: 22426 - DNA, 6846 bp, Oryza sativa
aaaggccttaattacggctccctccattttttcaataaataacgcttttgattttagtataacgtataactattcgtcttatttaaaaagttatataaatgttgtttgttttgttgtgaattattttgtcattaacatgcattgtactctaacatatttacactaaatttttgaataagatgaatgattaaatgttatttcaaaatgaatgattaaatgttattccatgtctataaaatgccagaattttatatgtatccttcttccagctccagcctcctgtccgattgatcactgtgaataagtgaccccagcagatgagttctcgtgacttgtaatatgcatatccgttgccttaaaaagaatacatataggttattgttgatctcagtaaaacagatggttcaagtatgaaaataaagagaaatatatcctgtaatttctcactgacaaatgctcgatcctacggtttacaatcgacaagttctacaaattctgtaagttccacaaaatcccagcacaagtattttctttctatttgtccgtcatacataaatgcttatatttcggaatagggagcaggtgttttggaacagcaagccttgatgctcctatttttctttcgaatcatatacacgttgctgatgtgaaaaggtaaaaaagaaaaagtagtaaaactgcaaccattgtactgcaatcattttagcaacaaactgcatctcagcattggagcgccatgggcggcagactgctcttaatcgaacacggtcagcgtgcgaagggaggcgcctgaggacaagaccaagtagttctggctggaaatctgcccaacttgaggactgttgtttagataccataatctaagaagaaaatgcatcgaagtcagagtttaccaaagtaaatcatcatagtaaattgcacatgtttcttccatgtttagaaaaaaaaaatggtgcttattgttgtctacacagtaccaacattaatcagcatctcttgagaacagaagtgcgcttagcagaagggttggtcctttccgcgctaataataactatgtgatggaagaattagcatagtaagtgactatatgatctgttaaacctatcagcctatttatttttttcgacaaaattataaacaagggcatctttctcatcaatactaggtgccacagtggaaaatgttacgatctccgtcctaaaatataataatctagaatctaatggttctggtattacgaatctagacaggaaccatccgatcctagggagtagtagattcagggaaattgaactccagcactaagatcaaatcagctacaaagggcaacagaatctggcatttggagtatcgatttgtcgaaataaaattagggcttagtgtaagggagctcacctgcttagtggttaggacctgatgaacggtcggtgagaggggacgaagagcagggaaccaaccaagaaccaactccgtcgccggagatcgactagtagcagcagacgctcagtacgtacggccgtggaactcgtcgccggagatcgactagccggcaacagccgctcgtgtccaggcagtgcgccgtgcgcggtggctttctccaaagtaggtagcccggggaggagagggttgagggacggcgtccgcgcgccttggtgcgctccggcagggctccctcgccgtcgccggcgagcgcgcgatcgtgtcgcggcctcttggtgggaacagcgaagagcaggggaaaaagatggcgtacgaccctagcatagattggttttgatttgtgtttaaaaaaaataaatttcgtaaaacccacctattatatgctaaagtagtagtacaagtagagggcacttgatatagatttaaaaaaaatggataaatgcgtaaaaccacgctattgattattatccacattttctgcagcatattagagcaagtttaatagtatagccaactactagctctaattcatctatagccaatctaatatctcattcatacaatagttacatactacactattaatacatggccccacctttcatacacacaccgcgtcttggagtccgtgctatagctggctataaatctgtagcccgctgcccttctctctccttatttatcttcttaaaatatatttgtagctggcttatagcctgctattgtacctactcttatagccttagatattatagctattagtttttacaaaaccatgctattgattattttgattttaatctatcatacttctaagttctataataacattaaatttatgagtttttttatccatcatttaactgatacgtttgtcagagttatggataacacatatctaatagtagttaactaaatctcggcaggacccaccacatatcatgtcttatacggaaacaaccttcggatatagaaggagttccgcataaggaatgataatagagttctacatggaaacgacaagtactactcagattgtatccatattagttttcctagttctacttggataaggggacacctatgggtataaacataagacccctaggaggagaggggggacggaacaatagatcaagacacaaaatcaacatacaagccaacatacgccaagacaagacgccggatatcgaattcagagataagcatagctagtcccctacggtgtctacagattctgtcaggagagacatagcgccgtctgtgatctcgccgggcacggattcgaagaggaagactaccctattgtcgactacgtgatgatacttcagaccaccaagtcgataacagatagatatgctaccccaaatattgtattggtgtaattatggtgaataagagcaacgaccggcttcggccaacgggagtaggattattacctgacaatttagggacccgaacctgtataaaaatcctcgtccccatctgttttacctcagtctcgcatataccctgataccaacaatccccatactatgcaaataccggaatcgcgacatcaaacgtcgacaacgtttatgtaagcatttttttaaaaaagttctgaacttctgatatacgaatatatcaaattggttaatggtgtggtttatgaaactttaggatcgtaatacctgggttatataccacgtgtcaaaattcatatagttttgtgcaacttgaaaaaaaaatatgtgtggctttatgtaatatacttaaaaaggttacattgtatctcgttaaaaaaagggttgttaggaataatatttgaaaaaatttagtaagagatcctttgttctcaaaatgtacatattatttacaaatttgagtctaaaaatattttgagttcaggcttctagcagtagtaaggagcactcattactgaactatttgaagcatacaaaggataccattaataaaaatgaaaactaaggttaatagtcgttgtgtgagtgtcggggtttacccctgtcacgccccgaactagtaccgaccggaactagcccgtgacgctccaaattaacctgttaattgataccagtcccaggaaacagtgctggtatcacaggaagacagattatcacaacaacagaggtctctttattatagagtagaggtacagtcatgttgggctgcggacagaccccgagctcacaactacattataaaagaaaaacggaagccaagactaggaccaaacatcacaggcgcgacttgggaactaggtcgaaaccctaaaactcatcgtagccggcttgctcctggaagaactcctcatcaacaggatccgcttcatcttcttcagcaatgggggggattatttatatagaacaagggtgagtacgggagtactcagcaagccatgggaaataagtgtttaatgcaggcttcaaggaaaggttgttgtttttgcaattgattttatttgaactcttttctaaaaacaactaagtgagtgcttctcaaacgacgcggataagacagtgcgtctcgtccggtcggagtatgtgtaatgtatcagtctttagaattgattcaaggttggcacccggccaacagcttttcaaacggccactagggccaacaactttcaaacggccacccgggcctagctgatcccatcagctgcagatttttcaatcatcgaacccctttacacaacagcaatttcacaagcagtagtcaaacaaaactacgctaggaatcacctcacatccgcccatgaccgtgggcacggctgttcgaacagtttgttaacctctgcagagggggtacactttacccacacgacattactaacccggatcacccagcccgtggggatcagccacgtcgggagacctccaagctttcatgacaaggcatttcgaaagccgacacaggtttaccatatgccgacgagaggggtcccagaccaacaacaggttaggtcccagaccatactgtgccaggaagcccaggggtcctccccgacaccaccccggcgaatccacatgtctctcggcatcaaggctcccctgataagctagttactcagccaggggtgtcccattccatccatgtggtcgtacttgtcttatgtttgaatgaaattccaaggaaacggtccttaagtgcgagagcgggaaaccgtacacccggtacgttccccggtccgcggttttggaaattcatttagttcgcaagcaccgacccaggtgtcgggttttccaagtcttttgtaaaacccaagttttacccaagaagtttttcagattttaagtttgaaggcgtccgtcgatactcgcacagggtgcacgaatatcgagacgcaactagatggttacaaggggacacgatataacaattatcaaaggaaggatcaaatgcaacaaattaggtaggtccgctaatctgcattgcagacgggacaacagattaagtgcgatcctatcaatgcataatatttttcaagcaacataattaaatttcaaatataggctcaagatgttcaaaggtggcttgccttgctcgagatctggagcttgatcctcgaaatcctcgcgatctgccttgctcgagatctgggtcttcgggctccgaaactacacgcgaaacgggacaactcaacaaacggccaaaataaagccctattaatgacctctaagcgtgccattagatagatctcgagatttgaggaattttggaagttgaacggagtcaaacggatttacggttgggaagatattgaatttctaagattattggatttttagtctaaaggaaaaggatttaattaaatcctttttggaaaagaaaagaaaagagggagggaatatagacttttcctcggcggctagggcgcggctcgagagaattggggcggtccggccgagctaaatgggccggccggcccaaggcggcctagggcgcacgcgcgcgggagggaggagagagagagccggtggaccgggctcaccacgcgtggtcccgggtgggacccgcttgtcggtgactcggttcaccgtgcggagcgagcacgcggcgcacgcgcgcggccggggctgggacgcggtgcacgcgcgcggttcgcggtggaatggatgcggcgggcccacgcgcagcctcacggctcgcggtggaacgcgcgcacgggaggggctgaccggggtcggcccgacccgatctcggccgagctggtgccgacgtggcgcctacgtggcgcctacgcgggctggcgggaggaagacgaaggcgccggccgcgaatggacggcgggcggcggcggtttctccgggacgccttgcgacgatgaggggcgacggggcgtacaccgggatgacgagggagaatgagagggagcgagcgaacgtcttggattcgccggagggtgtccgtcggcggcggattgcggcggcggcacccggcggagagaaaagggagaaacggcgacgaggtcacgaggggccaattcccggcggtgagagcatctacgcggctacgggaatctgttgctagcgtcggattgggcggagctacgtcgagcgaggctggcgacgagcgggtgctacggagcacgggcggcgacggcggcgagcacatggcgagcggcggcaacggttggggcggcgccggctagctacggggaggctacacaagctactaccgaaaactaaggggggagatggagcgaggaggaagaacggagggaggcactaccgtgcgggcggggcgcagtgacgagaggccgacggcgcgggagtaatctctccggcctcgggccggggaagaggaggaagacgagcgcccggagtcctcttccgcgtccacgaacgcaccggttctcccggcgcttggcgatgaacggcggaggcaagacagagctcggaaggcggcgacaacaatggagtggaggcgatgggaggagaagagagggagggcgcctgggctttaaagggcggcaatgtcggtttggaaaccgactttgggcggtcaaggcgcgagctggcgctccggctagcggccaaatcggcgacagggcggagggaggatgacgccggcgggaggaaaaggggaaaaggagggagagaaagggggctcgccccttgcctctttgggaaaaggaggaggggaacaggggcgacgcggcagagggaggaggggctctgcctccgtcccttggcggcttgcgctcggagtggcggggccgaggcaatgacgacggcgatgactgcggggcggtgtggagcggaacggcgacacgggcgacaggcgcgggcaggcgctgacgacggcggcgaccaggcggtcggccaccacggcacgcgcgcgcggcttgcaacgggaggcgcggcggattgagcggcgcggctcgggcacgcgcgctgg

SEQ ID NO: 22427 - DNA, 32158 bp, Oryza sativa
attcggcccatcgaccccgggggaggcaaaatagacttttgcggaggaatttgatttggaaggatttggattcgggattgaactcgacgatagatcggggatttgagatctgggatggcacggacactagacaacaagcaaagaaacaatttcgcaaatagagtttttatgagataattttcccgctaggcgccacgacggaacaggcgctacaacccctcgtcggcaagtggttcaccctttaaatgttttgagctacagttgataaatcgcagaaaaaataaatgaagcaatcaagaacaatttatgaatcctctaaataaattttgctaaaaaatcaagattggcaagtaggaaaaaacaagggtttgttgtgaatatggaatgggagagttggtctagacagttggatcagaagaataattgactgagatccatagcgagttctcttgcaaaagatcaacctcatcttttcacttatcttgggacggagggtggtacagtacacactggtcaccttaaagaaaatgcacatcagtaataattgttgatcacatgaaaacataagaaaggattggacaggtaaagtacaggttgtaatatgaattcaatactactttgtcctaaaaaaaacaatcctagctacgaccctgaacaagcatttgtccagattcgtagttaagattatgttttttataggacggaggggctactgctgaagccagaaccaaccattcaatcaggacgcaacaagtaacaaaacattaatcatcatccaccagtttacatgttgcatgtgcatatgagagaaacccacaaagagggccatgcagaggggctgattatatagcaccatctgcagggaagaaccatctcggatgtcgccactggtagtagacgccagagtgacgattaccacttaccaaacgcaccaacggcgttatcatctcgtttctcatgttgtagatgccagagtcgccaagaggatttgcagaataaggccggttgtagtcagatatgaagtagatgcagtcctcctgagctccacattccacagcagggacagacttggagccatgtgtgccaacaaagagagcttggcctcccaaagattctacccttctccacatgcgagagccattgctcaaatctgcctcatataccacaaatgaaagagtacgcggatcttcaaggacatcatcatgtgacagagggaatgggtaaccgaaaagccgaatcacctgcaacaatcttccaccagattcaactagatatcgccacagcatccggggatgactctcacgacaaggttggaaatgggattcggttaccggttcttctgccaagtcaaccatggaattaatgcatgaaacctctggttttccttcatggccctcactgatctcaaggatgtagagcttcccagaagcactcagtgcatacagctcccaccacagaaggcgatatcataggtctgttctcgagtgaaaaatcatgagatatgaatgaatcagtagcaatgggttgatagcaaatacaagcggcgctcacatgaagggggtcattgatcagcacagcgacaaggggaactggtgatgagtccaagggcaagggaactgcaaacttataggaaagtagagtatattcgttgcagagaagtataccagatccacggtaggcacgttccatcttatcatgccaaatgctggctagcttaggaagatgtaatgtaaccttggagaaaaggttcatcagtgagcacccaccattactatccctgaggaagagccagttgtcaatggagccatggcaagaggcatcatttggtaaaggcatgcggtgaattttaccatcagagatgctgaggaaggtcccatggaggagagtgagccaagggagtggaggggaacgggctgcaaccgagcattggagcgccatgggcgacagactgctcttagccgaacacgatcagctaaggagggaaggcgtccgaggacaagacccaggagctctggctggaggtctgcccaggatgaagaatgggtagcttccatcacgcaagacttgaaatctgaccttccaaaaatggaaaaaagaagggttcagaggtttacaagaaaaagaaagacactaagcgttgcactacttatacttgcgatacttggtaatagcatcagaagatagtgacatgtactaatatttaacaaggcacactaaactgtactagtcatttgctaaacaaactcaaggtccataactaaataaaaaggctgacctcacctgactgacatcttgcaagactgcaagtctaacacgacgagacaaaggtttcggattatgattaagcaagcactatttaaaactatgtattctggtcacacttgacaagaacatcaccagaaagcagtatctaacttttttcacaaatcaaaaggtaaatgcatctgcacttactcctttacccaaatctcaaggtagatgagtaaacataaataatgttttttttatttttgcaactaactagtatcatcagaaacatactagtgggtgatgacgtagtgaactagatacggactgatagtatactaaatccaatattaaaaaatgatatccacctatatgatttcgtagcaggaaacgctaaaacaaggggaacgtgcacatcggcactacacattgaaaatatgtacttctcttagatcttacatgctcctccataccagtttagatcaagcaaaaaaaatttggtccaaaaacatttataaacacatccaaatatccaatgggtaaatagtggtatatctccaaatgtgaatagtaatggtatttttttcaaaaccaataaatttataatgacaaggatccaattaacccttttctggggggttcaaccaagttgtagagaaagacattttctcatcgacattagtgccgcaattcaaaatgtttgtggatttaggccaaatgatctccgacagaaagccggcagctaatatcaaatcagcaacgaagggcacatgaatgtgggccatctagagcatcgattcgttgaacgaaattagggctagtgcagaggagctcacctgcttagaggcgatgacctgatgaacggtcggtgagagggggaggaagagcagggaaccgaccaccaactcgtcgccggcgggagatcgagcagcagcagccgctcgtgtccggctgcggggagcacaggctgtgcgcggttacgacgcggcggcgtcctctagaggaggcggcccggcgatgagaggtatccgctcgcttgggtggtctccggcaacgccgcaacggcaaggctcgccgtcgccggcgagcagagcaggcggcgatcgggaagtggaagatggcgtgggagccggaggaattggggtttttgcttcgattctgtgcggcgttattttttttatttattttttatacctttttggtctttcacctactcgcagtaatgagcaccccctgaagtaattagtgaagtgctgccagctactcccatgtttgttgatttattactagattattatataatgaattactatttaattataaatatatattaaatagtttaataaatactgtaaaataaatggtttaaacaatatgatagtaaaaaaaatgagaaaacattttttttaaaaaaaaacatgaagtaaataatcgatttgaactagctatccaatgaataatatgaaaagaacgaggtcgtagtataattctctgcataatataaaggatgaacgtattagactttatacaatttaatttaatagaattccctgtaaaaagaagtgttgaaatcatctgagtatattaatacgacgagacaataaaactttcaaacaaaaaaaaatgataagtacagaaaccttcaagacctactcccagtttatcgagctgtgtataaaatttaaaactgtaaaacatcgtcctatattgctgggctgatggcatgcaacacagcgacagcccgaaacaccctcaactccacatcgacacattttagagctgtcgctgccaaaccaccgagcaaacattattatcattattctcatttataatcaaacaggtcgagtttgaagcctgtgttgttcttgtcatcgatctacaatgcagccctctgctggctgaaagccaccggaatttatgtgaccaggttgatgccctcggcgaggagggagtcggcgagcacctggttcgccgcctccgacgggtggacggcgtcccagaacacgtacgtcgtcgcgttcgggcaggtgccgatcgacttggggttgcacagaagcaccgtcgtctccaccgtccctgtcccgcagcatcccctcctcgcctccgtgaatcctaccaccaccaaaaccatcatcaatggtgatgaatttttagcagggccggccaagataggccaaccaatcaatggtgatgaatcactgaatatgcacagttgcagtttgcattgatcatgcaagatgagatacagatttgcgtataagtttgttgttataccttgggattgaggagaggtgacgaggtcgtagaggggcgtgtagatgtcgaacacggcgatcttgaggtcggagtaggtcttcgaaagcgagtcgacggtgacgttcatcttgccgttgaagttctgggcgtcgctgttgagcctcgagacgcacccgctgctgccgtagccgaacagcgtgatcgccgccggtaggcagcccaacggcggcagcgacgtcacgccgatgcgccgtgctcccatgctgtacagttgctacaagaagcaaaggtcccaaagaaattttcacatcatctcaacaatccgtgttcagaaactatatctctaattatactatgagtctagtctatgactatctatgtcgatgaggaagctggttagttgcttactgccacggtgtttttgaagatgccgacgaggcggtcggagaactggtcggcggtctgggtcttgtagaggaaaggattgatgtagtaattctggacgaaatcgctggcaccggcgctgatgatgtacaatgagccgttgatgattgactgggcctggctgcttccggccacggctgccagcttagattggtactccttgaagtactccaattgttgggacaaaggaatagcatgctgcattacacagttttgtccaagttagttaagagatcatttacaccgccacatggatttgcaggtacaccgacgtccgaaaaatagcaatgatagagttcataatttatgaggcatgcatggaggatgtaactatgtattaacacgcagctgaaatatttcaattcagagcttctcttctccttttcaaggttattggtgatacttacatacagaagtgcagtgtggtcatagtagccagatcctgcagatgcaaagttggctccaatcagaaggttcttccctgacgcatctgggctgagatacgcaggtgcgtagctttcaaaccccaacgtctcggctgcaaccacaggaagtagcagaacaggatctctattagaaaatgcaactgcaactcacatatacattggaaagtaacaacatttagcaagagtgagaatgtgaccagtgatatcagtagccagcttgccgttgcagaacctccccgtgggtacctggttcttgaagtcccttccgtagggagggaagtttgccttgatgatggttttgaggtagtcattgttacctacgtccaccgatgagtcaccgaacgtcatgacggccggcacgagcggctgcgcttcaccaccatgtgttcctagcagaaggaagagagccaggagcagcaagcacttcacctccattggagctatccttggagtcttcttaggagtgtggctcgaaagagaagcgtgttctggtaagacagaacgctgtgagcttgtttatataagtgtgcctgcaaacatatatacacaaaatgagatgaaacgcactaattcagtagttaatgaagtttgttatgaaccccataactatactcatgagacaagctgtcctgataagaccagtaagcaactaacttaatcagtagtggggcctagttgtcatccaatgtagtagtataaatcttctttcggtgcaacctttggtgtagtgtgtggcatgacagtagcacattgttagtatagtacctcatcgtggcaatgtgccaaattcagtctccatgccctgctttgcatggttatccacattaattcttccatctgcaatggcgactatttattagattgataaggaaacaaggggcagttgaggtgctattgaggcacatcggcactagaagtgccaggaagaaggtgtaaaccccaacagctactaaacaaccactaatcagttattgcacatgttgtactaacacaatatatgcagttggaactcgagcattgggtcccaactggaaagatctttaacactggttataactgacatggtttttgacaatgtaagaaaaataaaaggagttgcaagacttgacaataaatatgcaaatctttcaagtgctgtgtgccagctagtaagacttatcatcattgaatgcaatgctgccactcgtttccttcaatgccagtacttccccacgaaaataagtactccaaataagataccccctccgtctcaaattacatgttatttagatttattctaagtcaaacatatatatctttgatctctattttttaagatatttatgtgatctaacaacatgtgaatcatatattataaaattatttctcatggtgaatctaaaaaaaatatatctcttatgataataaactatctgagtttataatgtgaattgatggttaaagactaaaatgtttgatttatgacaaatctagaatgataagtaatttggaacagaagttgtaccagaaactgagacagctcagataaaatattgtgggggaaagctagtaggaattcgatggtcaaaatattgataaaaatgtggcagtatatatatagcaataaaatattcttccaagattcttatgcttgtggattcttgggaggctgggaccaaagatgtatactacgtacctttcatgctgtttctgaacatggatcaagagcatacctaatataaaaggtggtgatttagacacataactgaattctgtacatgtcatgctttcaaaggttattgtccatttctctgattgagaattgaaaaatgaaaataggccagtgtgagactgagaaacacaaacagtttagagatggagcgtatgctatgaagtttgatcattagctaaaaaaaacttatgctgtggtcactgtttatttacgaatactgcaatggacatatgatcgctattatttttatgataaaaaaagggtgaatagtcaaagtggtcatccaagtttcatctgaggctcagtttagtccttgatatttcaatctatccatattagtccttcaagttttcattttagttcaaacttatccttgaaaaccaacaactctcttcataaataacacttatacccctcatcattcacatatataagagagaaattgcatgcttgaatttttttatagataatacatagtatattatgtaaaacgaaaaaaaattatgtactagcaagtgtatacgatagcaattgcttaagtttcatgtgcacatgtcgaaataatggaaagtagatctgtaatattgtttattcatgttggctttctcttttctagtatatagatgtatacaaattaagggcaaaaaggacattttctaatagaaatattgactataaatagccatatggcatattaagtggacccaaggatgatttcaagccaaaacaaatatttgaaggatctatgtggacaaaatgaaacgtgaaggaccaaattgagccttcgctgaaacttgagggactaaattatctattcacccataaaaaaacttataatcttacactaagaaaggaatataagatttgttaaaatatgtcaaaagaaagcagaactcggaattaatgcacaaaaaagaagtaaactagctattcataggaaaagaagaagtctggggaaagaagataacattaggggcaataaataaagctacataacttaagatattttattttcattcttaaatgttcagcaaccacatgccatgtaaaaacaattggaatattgtttagtgcttaacaaagcacaacattcaattgagatgggttctgaaagtgatgaaaatctcagaaaagaacctggactgtaaaagtgactctctgaatattaagtagatggagtttctttgaaaggaggaggatcatacttcaaaacaacatattacaaacacatttagatttgtaatgaatcttcagagaagcaacgagctgctatgtatcaaattaacatttttttcaagatacactcgctgttatgttagtatcaagaatggacccagtgtgactgattaatttggatgtctacgaaatatgttcaaggtcagatatgacaacaattgtacttacatagagagtgacaagtacgactcaaataacacaaaaaacacactttgccctacataatacagtgtatgtatgcatagcttcgattacctgattgtgtaaaaaataaaatcataatagcaagagtaaatcaaaaggtataatgaaaaacatgagcatttagattatcaccagtcaatcggtacacataaagcatgaggccatcataataccgtggaaaggactaccttttcgaacaatgctagtaacaacaaaatagttgcaaaattgggtaactagacattggccaagctgctaaagtcaattattcaatttattcaaaaggttgaattaacacattaagaagacgaacatacatgtctgaaacaaatgtctgcagattggattgaataatgaacttaccattgcaaggatatatggagaaaggacaatccttgtgtgtttagcatcaatactgactgcctacttcataagaatcattagtgttgcaagtttagtagacattatgtagtcatcacaaaaaatactacggcagtatggtcaggtagattttagtcacattttactgtgttgaaatcatgtaaaaatattccctacaaaaatgagagaatgttgaggaaatagtatgtgtgaaagctaatagtgaatgcaagaacggtaaaataaactaaagttatctttctctcagagtttcgaatgtttaaaacaggcctgcaaagagataccatggcacaatcacaggataacatacttcgaattctactgtttcataatttcatataagaataaaaacactagctttggaaacaattacagataacatatagaaaagctagagagtgatgagctggcattccatgatgaactgaggaaagaattgattggaccatgttgtacttagttccaccaatttcagttctagaagactatggggtatcaaatgggtaataatgtcaaatatacataccttacacaaatgcacaaaatctaaagagtgtactagcattcaacgattacgttcctttgtatctaatttacccagatttacataataaagaaaccattggccatagttgtcatatatgctacgctaaagagttaagatgtgtaataaaaatgtgcatgcaactgaggtttatcaggtaaagcagaaacaaatataaattcaagtggggttttagtcctaaatggaggaagagcattgatattaaaggataatgatacattactgtgtttattagcagcaaaattcagttggatgttatcatcaatgtattcagatttcagcaggaagtcagaaacaaccttttgattttttttttgtcacaaacagtacatataaatgttatgattcagaaacagaaattggaaaaatatgttaatcacagggtgaatatgatggtgatggttccgtttctttcattcatagcagcaaaaaagcacttgttcctatggcactgcttgaaacatgggaatttttcccgataccttgggaattaaattgttccgcataaaaaagtcttgtactccaaacagggtgaagaggatgagtttcattaggacagaacagttatgggaaacaatgacagtacaactaacacaatgaaacaaacaagaataaaggatacccttatcatgcaatattttaacagtaagagcattcagtggtcctagtcatcatttatatgctatggaattccaattggaagtacaagaataccccactcgtgcagatgcaattatcagttagatagaacatctatatggttattaaaagactctgtccatgacaagtccaaacaggactgagtaacttctgattagcatccaaaagaacagtcaaagaaatttgacatttaagacacagaatatgaaggataaacacgagcatgtgcctcaggttaagcctgcaatgttttactggttactgacaaagtgataattgcagcggcagcagcagcagcaaatagtatacgaccttctccaacacctaagttttctcttaaagatactccactgagtagccaagccaccatcagcattcagatacaggtttgccatgaaacagcaagctgtatcagtaatttgttctcagatgttgatcattacaaactctttctgtaaagttggtaaatgttccatccaaagccacagtaataatgatcaaatttgcatgtctttcgctgtcgatcttgatcatcatccaccaccaaaatttgtacaatcttaaaatggcccaagctcatgtacccagtttagcaaaagcaagcacaaggcttcacgcatgtttcacagcagcttctgtcgctgcgatctcctcccatgccgcgcccatggcaggaatggtggtaacatgagcccagtcaggtcccaaggccgcccaccaccttcctcctgccgcacaccaccggcatctcctccgcaatccatccaaccattggagccagcatccatctccaccttctgatcaccagcgattgactccgcctcgccgttgcgcggtgccgattgcgccttactaggtttggacgcggcggcacccctcccgcagcccggagggtacctccgcacggcggaggcgcggcgcacgagcaccacctcggtggtagcagcggggacctcgattccggccaccaacccattcccctcgccgtgatcgggcccctcggtcgcgaccgcgaggagcggctgccttgccagcttgggggatttcgtcgccgcgcgcgccgatgcgttcggaggtggtcggaggaggttggtggcggtggtggaggggccgggctgccccggtgggtgcgcagcgcggtggtcgcggccgcatcccggcgggtagcggcggacggcggaggcgcggtggccggcggcgagcatcggagcgtgggcggcggaggtggtcgggcggaaggaagtgcggacttaagtgaaatttcgaaccgaacgaacggaggattgcaggagaaggaacgtgaagcttgtactgtttcaatctctctcctgaaaacgcggaaccagttttgtgtttttattttaggttagttgtaaccatgtcattacagatatatctatttcagataaatattattatataattaatttatttgtagttgttgcactgaaattttataaaattaagatcgccactgccatcatgtttttcatcgatcttcttcattcttcgtcttctccctactatcttcctatcttcttgcattgcgacgggggcagtagcatgcgagcagcagtggcgacgattgccgacctaggggcttggctacttgctacccaacagcgggacaggtggcagatgacggtatagagaaggttagggccggatctagatagcgacgtgatggcgatgacctgggaacgcgaaggatgccaccagtagagggcagtcccatcccccctgtggtggtgttgggggtggttccctcgggtgaaagcgcggtggtcgagacgggtcccacagtgtcggcgacctccagatctaggtggtattgatgggaggcgcagagaacgacaggtggaggcgcaagacacgaaaggcgtgaagaactggcgttaacgacggggatccgagaaaactatacactttataaatgtgcttttttttttcttttgaggaacattggtaaatgcatgacaaaaaaatttctatataattttgtgctaatatgcattttccttgttttgtttaaaaagtcaaatttctacccgtcctaaggttttatgcagtataatatactccctccgtcctaaaatataacaactttttactataaaactaaaatgcttataatttgggacggaggtagtaacttttagcggtatactgtgctatagcatccccttatcttatgatcataatatgttcggcatgtacccaatgtaactttaaattaacattgacaattacttaaggagtgcacattagtctccattagcgtatgtatttttttctggttcctatggggatcaaatgatgtaggtgaaaaatgcttaaaaatcttatgaatttatggtttcttcttatataaaaaatctaataaaatattccactgttctccagtaaactaaagctgggccgtatcctgtattcatgtgggctttcttgcaacaataaacccaaatactccagtataggtttctaactctgcgtcgcacgcagcaagggccgaaggccgcatcttcgccgtccccaactccttccaccgcgacttcgccgccgtccacggtccgccctcgccgccgtcgatggccgatccctaccgcgcttacgcccctccctcctctctcggccgaggtacgtgtttgctcgctcacgccctccccgacccaggccgaccgggtctcttctgcgtggttcctgtgggggcgttcttgtgtcgattggacgaatcttcgaatgaatcgggagctcttgctgggttcctgttgttactgctttggatttatagattcagttcctgcaaggctcaattttgggtggctcagatggttttcttgtcagtttggtgcgcaatccgggtagttcagtgagttttacttcagttggtgcacactgcaaaggagggtaatgattcgcatcgtgtagctgaattaatagatttccatcatgttgtgagctctaatgtcattaggattcccgaccaaattagcaccactagtttctgattgctcctgattcgcagctgctaggttgatgtcttaatgaatggttggattgagtatatgctataatcttctgcgagaaattctgtgtgaatgttaaggaatcattgcgctggatataatccatctggatgcaatgtctgtgcttatgttgagctagacaaattacaactttttggcatcaattatggctcggggggtgccatgatgggagggttgggaacttgtgacttgtgaatttgatgttgtttagtttaagtgaacaaaagattcctttttcccagtattctaactggacatcttgctattttgaattttaataaaagggtaggacgtattgatgtaagatttcactgaattgggattttgttttgagggatcatgtggtgtacaattcacccacataaatctattgttgaattgaactagtgtacaaagaaactacctttgtggatacaagacacttctttccatatatgagcagttaagaacttttgatgatttggggaagaacggaatgcatggttgttatgcatagccttgaggaacactggtgtcaacggcggaccttcttttgtcgttggagtgggttggataaattgttgatgcattgttaaaagtatataagaatatctgaaaactatatagacagtttgaacatggggaggttgaatatagaagggattggttttcatttatttgaacttgtgtcatgtttttccttttgttttccttttcttgtttgttctgagattgataatgacacttatcattgcattgggaagttgaatatagaaaccttttatgttcatagcaattttattgtgtttgcagatccgcagggtgattttcctaggcatcctccatccgagggctcttattatgcttcaagaatggctgctctccatggaacatcagatatacttagacatgatgtaacgactttatttttagtggatttgatcgcaatataaaagtagccaccatgttgtcacacaacacgttgatttgatctacaggtaccattacagccaagagcttatggtttggatggtgcagcaggagcaagtcatcctgctttggctggtcttggtggactggctgctggaactacagctcgggggcctagtccactggaagacccagctttagtaaggagaagttcttctctaggaaaaactgctagtattccagatgttgagcatcccagaccccttctgaaccttgatggtccaagagaagatgaatccaacattctctttgttgatggtctccctactgattgcacaaggagagaagtggcccgtatccttcctacttagtgttcttatgctctgtgtttatatctctttcttagtttcctttcgtgagccttaacttcccatggaagatttgttccgtccttttgttggcttcaaggacatcagactagtgcataaggagccaagacatgtacgtgcttttccttttcaatgcatcaatttttttttcttagttgaaaaatatggttggacagttctccttttgaataactcacaagtctatgcgtgtatttgcattcacatcttggaactgagatatgttagaagtaccacatatattatagaatgcaatatatgcttttctgtccttaacatatataattcaggcagagctgctttttagcttaaaaaatatactggtatatagtatataatgcaatatatgtttctagccattacatgaattaatttaatcacaaaagtagcatatttagttagactatttatgtatttaagtgggtaagaaattacattgacttccacatgtacttttattgccgtcttttttccacgggccaacgtcagtagagctgttaacatttgtcgccatgttttccctaggcattatcttatttcctgtggtaatgaacctacagttgtttatgcttgttttgcatcacagatccccattccattcatcatttatctgttactgctgattctattagtgctagtttgaatttggatcaacactaacttttcatactgctgcttgcagagtagtgatagggcctatgttctatgctttgtggagttcagtgatgcaaaatgtgcaataactgctatggaggctctccaaggttattccggtgtcattgatttatcgcattgatattctcttgacagcttttcatatatcctggcagagtcggtttgctagtatgggattataatcatgttacattacatatagaattgaatggtgtcttgataattgatatgcatggtatccattggctttttttctttcagtagtatttcacagttcacagtgtctgttagattcttgtgacacactgatactaaccatatcttccttcaagagctgtagctatttaaacaataaggcagacagttcgctcatatttcatagcaaacctaaggatagtaggaatcaactttaaacctaaggctgtaacatgagcttttctttgttgcataagctgaatttttcagattattgattttgcagaataccgcttcgacgagaggaaacccgacgccgctgttcttaatatcaagtttgcaaggttccctttccggccggccgctgccccccatgatgatcggagacgccttaccttgcactgattagttcctaacttcctatcatccttagttagctgtgcccaacctgaccttatcattgcaacttgtaaatcttgtaccatctctgtcccataatacaagggatttagctcaatcctttatattctgtgatggaggtagtaacaacctgttgtcagtcgaaactggctagcaggaatcttgaacagcagcaaaacaaggaatgtacatttgtgggttcgaaacaccttcagattttttgctggtgccagttccagaaacaatgggatttgcttttctgcaggctaattactaatttggaatggaagatattttaaggatgttttgtaggaattgttccgattatcgtcaaaatcctataaaattcctgcgttccaaatgagcgaggatcctttatcgtaatgtcactactgttaccgtcactggtacgtaggtttcaccctttaaccccacacgtcaatgagtgttattgtgatagataatgtgaacccgttccaaaggagccgttaacgtcagcactgtgtcaattgctgtaagaacggcatcctgtccttttgagctgttgacgtgagacaggtttgacgttcaagtctccggtcctgcacaagaaaccaccaaaatgtgtcaggctcgttcatctggcggccgatctcgaattctcgatcaacatcgccgtcgagtctgggcgctcgtcgacgacggagaggtcagcgacgaccgtggagcgggggcggcgagaagctcctcctcctccgccgtcgctttcgccgctggaaactgccggcgaggtcacaggggcgatgtgctccgccgtcgctttcgcccgctggaagatgcttttgcccattttgcctgtggccggtgattgacgctgtttcttaccacggtgacgcttcgcgagtgaggtcattccaatattccatccacagttatgtcttaacacttgtcaaataaccaaaatttccaggaaaccaaacaagtttttttttctctggaaaactctaattacatatagatattattgcaaaaataagaattttcgtgtaaaacacttgcctgatcgtttgtcctataactgataagctgtaaaacgaaatataaaattatggcttatcagcaattaaaatataatttatggacaaaaatacacggttaaaaggttaatataaaaaaataaatcatgataaaaaaatcaaatcaactttgttcatttcttcgatcacgctataagctggatacaatttgccaaattgttaactgaaaagcacttatccaacacatgacatgacatgttcttggcatctcttacattatccttttttttcccactgtgacaagttcttttttttttcttttgatttctaaagctgatttgccattcttgcaatttgcaaaccactagtgccccgtgaacacatatatctgacgccgttttctgccgccaaattggatggcgcagcctttgcaatttgtcaggatagatagagagatttcacatcacattccctcgttgccacggtagtgagccgtcctgtagccggtggctgcaaaggctatttggattctagcactgtgctgttccatcatcaatttgtgtaagtgcactagcattactattctctgcatcccaatttactgcaaacgtagttttcactgtctattgtcagttttgtcacagtagatatggaatttatgctggaatactaatttagacgattgcggaaaacgatcaacaaatcatcctatagctattaaaaataaaagcattcatttaatttccaccatatttctctgtatttattagactgaacactacaattttagatgatatattgcgccttaatttacacaatactaggtgaaacattgctgtgggaatttagtatgataacaataaaaaaataacgtgtaagatagctagataacatcagattaagtaaattaatgtggtttatgataatttaaatttaaatagtatgtagaatggtgattcaaactaacaagtaaggtggtatgactttatggaagaagaaaaatagagagatagtttggaccgttgattaatcatctaaaggctaaaaacaattgatgtgatataacttaattagaggaaaaaaaggagaaatataatttggatcatagattaatcatttaagcactaactaagcgaggatgaactatataagtatataggatatcataaaacataataaagatatacattgaaacattatgtgaattatgttggatgataatttaacatgtttgtatttgaaaagctcttaaattataaaaactataaagatatagcatgtttgcacgatgtttaaatgtgatgattgttagtggataatgatgtggcatcttgttaattagtggatgatgatgtggcatcttgttagtagataatgatgttgcatctttgtatattaagcttaaagagttagtggaggataattttatagtaagataaaattccatctgtaacaactaacggtcttaacctgcctatgtaaataatacccgccatatttatccgtattttatttgacaaaatacttcagtacaattttagattatttcacccccaatattgggtgtacaactgtacatcgcaatagtgatggccctagatagtgttgcactatatgtgtgtctttcaaggcattgaccaaaacacacacgtgcccaagctgcaatttatctcaccatttcagattatgagaatcttcaattctcctagacagcaaagaaaaagcatatacaattttacatcaccattttcagattaggagaatcttcaatagacatcaaagaaaaagcatatgcaaattttacctcacaatttcagattaggagaatattcaaaagacagctaattagaaaaaaaaagagagttaaaaaaacccataataaaaaaagcaaaaggagactagtactagcaaggctagccagcccatggtgttcgactcgtctccatttcgcgtctcctcctcctcctcctccggccatctcaccctcccggcgagcagcgagcgggaggcctccgccaccgccgccgccgccgccgccgtcgccgcccgatggggaagccggggaagctagcgctgccctcgcacgagtcaaccatcggcaaattcctgtgatctcccgttccccccatctctctctctcccgcttttccgtgtcctctgctgctcgcatcacgcttgctgttgttgttggatgtgtgttgcttgtgctgattccggtggtgtttcgggggtttgggttttcgggctgcaggacgcagagcgggacgttcaaggacggcgatctgctcgtcaacaaggacggcctccgcatcgtctcgcagagcgaggaaggggaggtaaagtcaccagcggaaatgatatagtttcacctgtttggtattccgtttggcaatcgtaggagtgaactcgccatggttggatcttctcttgggttttgttgaggagatgaaggtgtgaattggatgatgggcgggtcgctagcggcgttcctggattcactctggagtgaattgttgttgagctctgattatattctggattggaatgtcatgcgtttggcaatcagggtgctgtttgcctgtttggtaatagggcagatgcatacgctaattttctacattaaaatgtgccaataatttgcaaccatttttatatggtagtgaagaaatcctgaaatagtttaattcacattttctaatccacagcgaactaggataggaaacagcatgcctttttatcttcattgtttcgatgagcgtcatacttatatagtggtttctcatgtggagtgtctagacactaactagtggtatctgcatatgcaataaattactgaaagcatatatgctgcatctggtagctctgttcctggtgctcacttatagtgtgagaatgttctttaatactatcattactttttgtactctccattcatttaatatgttcttttattttgtgtactcaccttctctctattggcatgctaaaattgttgcaggcccctcctatagaacctttagatcataatcagttgagtctagatgatctagacgcaatcaaagttatcggtaaaggtagtagtggaatcgtgcagttggttcgccacaaatggactggccagttttttgctctgaaggtattatatgaaagtacattctttgctttttatgatttcttccactctccccttaccagttttaactacaatctttttagtgttcccaatagttatagcttcatgtgagtccagtgttttttcatgtggtcttttgcctaacacttgcaaaggatctttagttctttacctccattgatatattattgcgtttacaggtaatacaactcaatatccaggagaatatacgcagacagattgcgcaggaattgaaaatcagcttgtcaacacagtgccaatatgttgttgcatgctgtcagtgtttttacgttaatggtgtcatttcaattgttttggagtatatggacagtggctctctctcagatttcctgaagacagttaaaaccattccagagccctaccttgctgcaatctgtaagcaggccagtgacatgtggtagaagctatcacacaatttctttgctttgcaaatgttacttaagcaccacatggactttataataaaaataaataaatctttcctgcgcaggtgctaaaaggactgatgtacttacatcatgagaagcacatcatacaccgagatctgaagccgtcaaatatattaataaatcatatgggtgaagtaaaaatatccgactttggtgttagtgccatcattgctagttcctcggcacaacgagatacatttactgggacatataactacatggcggtgcgtaaaagtttctgtgtcatgaaatgtatctctgattattgcatgaaatgctatctattttgtttgtcttgttgaaccaaagggaaattctgttcttgacagccagaaagaatcagtgggcaaaaacatggttatatgagtgatatctggagcttgggcctcgttatgctagaattggccactggtgaatttccatatcctcctcgtgaaagcttttatgaactccttgaagctgttgtcgaccacccaccaccttctgctccatcagaccagttttcagaggaattctgttcattcgtctctgcatggtaattgtacttctttgatgatttctcttatccacttacatttgcagtactagcaatttgttttaatttttagtttacaatcacgtgcttctaatatcccaagttggtgcctgttttatacattttacatgcaaaatttaagtgaaaaggtgactaccttcagagtgtgtttggtaccctgtatgtcattcagcctggcttgcatcagcagagcttgcccaaccagtcctgtgtagatgctgaaaattgacaagtttagttacatgcttttgcttagctaggccatgtagggagtttgtttggtttacagcatgtatacgtgcaaagcccaaaatatatctttggagccagtgcatgccagcaatttcgtgctctcaccagcaggccagcaggaaacggattctgaatacggaaaacgtttctatggggccatgcccatacctcactttggaatgcgcagggattggcccatccaatcacacagaaaaccaaacattggaactgttccagggaacaaatgcccccttactgccttggtatgcagattgtagggacccaattgatgcatggcgggattacacccaactaaatcatttattgtgtggcgtgttccatactccctccatacttataaaggaagtcgtttaggacaatatttaagtcaaaccttgagaatataaatcgtgaataactctcaagttgttgagtttgaaaatataaaaattatatgtatagatttgtcttgaaaaatactttcataaaagtatgcatatatcactttttaataaatatttttatagaaataagaagtcaaatttgtgttttggagaccgtgttgctttcctaaacgactttctttacgagtatggagggagtacttcttttcttgagatatttttgttactcttacatgtgaaccaaataggtctaatgtctttcaactcttcatattcatatggactttcaatgttaagaaggctgctaagttttataaagggaaataaataaataaacagggctaatacagttcctctgtctgttctgtgggttgcagtatccaaaagaatgcttcggataggtcatctgcacaaatcttattagtaagtgaaaattcttatccacgctgttctttttaaggcatcttttgcacaagtctagctcactgatcttgttgcgtcctccctctgctctttgatacccagaatcatccattcctgagcatgtatgacgacctgaatatagatcttgcttcgtacttcacaaccgatggatctccgcttgccaccttcaatacaagtaatgatgagcaacttgtcttttttctttgtttttgccatccattttgtcatagacacatgttagtgccattctttatgattccagtggatgaaccatcaagggaaccttacattcttttttttcgtaggcaaccgatatgatgacagatagtctgatgcaacactgcgtcatcatctagctcgaaggatgatcctttggctgtccatctgtagaatctaccatctacctaactggccccaaatgtttcgtgtattttttgggagaaaactttgccctgtgtactgagctgggattgatgtctttgatatgtaaatttcgcgtaatttcatatgtagaacaattctaggatcattgggcattgaagttttgtttggccgtgcaccaggatgatctgttcttgatcgctttacctttgtttctcacttctgtaactaaaacctatatttaccatttaccggattgttcatggcctcttctgggcaagtcggtgtcgactgaaagtctcaaacaattgcctcttcctacgacgactggtgtgtttcatgcaagtttcgtgatcttttgacaaggtgtgtgagcactgagcagccggtgcgaagcaaacggcacgaagttggccttgtcggctgaggcacgtttcccaaccgtgttcttatcgtgtcaggtcgccattctggattgcgagctcgtccgttcaaacatgaattacatactctatccgtcttaagataccaaattaggattagatgagacataacctataacaaatctgtatatgttttttataattttttttgagggagtcattgcctattcgcccgtggcatttttaaatacagtagttaactatctccacaagcttatgtaggccagtaacgtgggctgtatgggccggcagtatgggcccgtatttaattatagcccaaaagtatggatcgtttttggttataatttgctggattctgttcatacttttgctttatataaaaaaccgcaaataaataaataatgaaatgttaaattaaccgtccgggtttctccaacagccaaagaatttatagtcgaactcgaggcgccgtcttgtgaattgcttgatattgcttccacacgaaaggagattactgattactataaaataaacgcatgcagaaccagtgccatgatacaaaactaaatacgcgtgaagtcacgtttcgcacatacaatatccgatcgacatgatgatcgccggtgatggccgtggctggctgctgccgcagagcgtcatggccgtcgcctccgccgccgcgctggcgctggcgctgtggcggcagcagccgggaggcagaggcggcagcggcgggccggcggcgatcctcctcgccgcggcgccgtacgcactcctcctcctgctgctctggtgcctccgcgcgttcgagcgggcggccggcgccggcgacgcggccgcgcaggggaggctcaggctcgccgtgtggctgctcagcagcgcgctcaccgtcacgttcgccgccagggtcgcgccgctgatgcacggcgcggcggcggtcctcgtctgggccatgtcggcggcgaccatttgcggtggtttctacatgctcgatttgtttcctctccatcgtcgactagatagaatcaattgaagatttaacgtcattttatactttttttaatcagaatatctgtgaaaatttgatgaataatttgctttaaaaataatattatcggtttctgcgaagctgtatttaaaaatacaagcggaacacaaattttgacaatttgaccatttacaaaaccttatttcaaaaataaaccatgacctcagcgccatcggaattggtgctgagatccaacatctcagcgccactaattttggcgctaacctccgtccgagatgtcatgcattagccacatcatcaggggtcagcgccactaattttggccacttacaaaaacttattataagaataaaccgtgtcaaaaatttatttcaaaaataaaccacgactttagcatcatcggaattggcgccaactaatttttacgctaaccttcctccgaggtgtcatgcattagccacatcatcaggggtcaacgccactctcgttggcgctgacctctgtattggttaaaattttaacatccttttatccaattaagaaggtataaagtataatagctcagtggttgaggtggtactctcattggcgctgacctctatattggttaaagttttaacatccctttatccaattgagaaggtataatagctcagtggttgaggtgatactctcattgctttatccaaatagcttagtggttgaggtggtactctcattgctttatccaattgagaaggtataatagctcagtggttgaggtggtactctcattggctgacctctttacctttatccaattgagaaggtataatggctcagtggttgaaagcaaggtccaattgagaaggtataatggctcagtgattgaaagcaagttgaggtggtactctcattggctgacctctttacctttatccaattgagaaggtataatggctcagtggttgaaagcaaggtccatacctttatccaattgagaaggtataatggctcagtggttgaaagcaaggtccaattgagaaggtataatggctcagtgattgaaagcaaggtataatggctcagtggttgaaagcaaaggtctaaggccctgacctctgtattggttaaagttttaacatccctttatccaattgagaattcaaactttcaacttttccatcatatcaaaacttttctacacacacaaactttcaacttttccgtcatatcgttccaatttcaatcaaacttttaatttttgtgcgaactaaacacaccctaagattaaaacccactcatgtaacttttttcttatatttttccctaccaacggttatatgcccaaaatatttgcatacccaaggcttcgaacccaagacctagggctaaaaaccaaaggagctaaccacttcactaatagtacatttgaagtaggaatcaccattacaatcttttagtctttgcaaaggtcggcgccaatgagagtggtgctgaaccttgatgatgtggctaatatatgacacctcggacggaggttagtaccaaaattagtggcgctgagacgttggatctcagtgccaatttctatggtgctgatgtcgcgattcattttacggtttatttttataataattttttttaaaaaaagtcaaactgtcactatttcggagcggatagatgcacgaatccacctatgaaaataggtacgctggctgtatcacgaggaccttgtgatgaggctgacacgttcttcggtttttcctgatctgaggggtgacacgttcgatcagacctatgcctgccagccgggttcgatcagacccatgccgctcgggttcgatgcttttgctacaccaaggaaaaaaaggttatacgaaagccgggatgaacaaaataatataacgcccaatatttttgtttaggctgagaaatattctactcatcggtatatgagtagacaaatacagaagttgtaagaaacatatgaatgggtgaaagttttatttcttctcgatttaagtacagacggtagaaagtaagacgaaaagttagagtcttatttatagacggaggaggttgacggctttcgtagtaagctggcttacgccagaaggttacttctcccgcaatctggctttctcgacaagctaagcttgtttatggcgccacaagctttcttacgctatgagatatcttttggtataaattttttctccaacttaagatttcttttgaagtaaacttttcactctattataattcatacacatagatatatgttttataacagttaccatttaaaaccatctcattaaattattctaaaactaaaccttctttcctgatctttttagccacgaaagtggtgccgacgtggcaaaatcatgctgccatgccagcacacgtggtgtggtacggcgccacgctcgcggggttagccagcctgatccgcattgattctgatgcatcagctatatactacactagacatgtttgtacacgctacactatcgggagtgagccgagcaatcatgtactgagttacttacatccgtttcaaaataagtgcagtcatagatatccgtgttttatcgttttgaccatccatcttatttgaaaaatttataaaaaatattaaaaaaattagtcacacataaagtactattcatgttttatcatctaataacaataaaagtagtaatcataaaaaaaaatttcaaataaaacgagcggtcaaacgttgggcgtgaatagtgctaaaactatacttattttgggacggagggagtataagactttctagcattgtccatattcatataggtgttaataaatctacatacatatataccttagattcattaacatctatatgaatatgggcaatgctagaaagtcttataacctgaaacggaggtagtaataattactaggtggtgtttgaatctcctaaagataagatgaagataaagattaaatgtttcacgtaaaacgatgtggtaataatgtgtgattaattgagttttaattattacaaacttaaaaaatagattaatataatatttcagaacaactttcatatagaaatttttcgcacaaaacgcaccgtttagcagtttaaaaaacgtgctacaaaaatcttatcttcattcaacttttatcgaagaaaataacgggaccttaagacggttagatttaagttgttctgtacagatggatgacgactaaaaaaagttgaaacgaactagataacctattctcaccaaagttccatgttataaatcctttctattttgtactttagttttgaattattttgtcttactgttttgtttctaccggtcccgtactcttttcttcaacatcaagtttaacccgttaccatagtcttctctttatagtactcttattttcactggtggagaaactatctttcatcggtcggccgaattccacaatagtcccggatgcaataaaaatcagggctaaagatgatctttagtcccggttcaaaagagtaacgggcatatttgatctttagtcccggttggtaacacaccaaccgggactaaagatctttagtcccggttcgaatgctgtcagggtatgtcaggccccttcgggatctttagtcccggttggtgatctttagccccggttggtgctaccaactgggactaaagtcccacccatatatatatgtcttcttcctcctccagctgcccgagcaagcttcaaaatttcttcaaaaaagaggggaggtcatgccaaaatttttattgaatttattttggtgattacatacaaatcggaggtgcctaaaaggtttgcaacttcatcgtccaatgttttttttttgtcatactacatttgcacctatgttttgcacactttttttgtctccaaaatttagttgtaagttgatgagagagaaaatgtgtgtgggaaagaaagaatatatagaaatttagttcatttgctaaacaaggttttataaaatagttgagaaggaaaactctagtgaaagttaatcttaaataatagaaaacaaactaaaatgaaaattaaaagaagtaaaacacattaaaattagtttaaaactttacaaatagtttttaagaattatttggtgtaatattttatgatttttgtattaataaagatatcttataattattttatgactgtcattattgtaagaataattatttgtgtacgattttttttgactcatgtagatggatcggcaatggatgtatgctgaccggcggtccaaagagtttattgacggcgtgcactattttttgagagtggccgaaactaacaggcaaaggggttttatttgttgtccatgcaataagtgtaagaatcagaaggagtattctgcatccaggactattcatttccacttgtttgagtcagggttcatgccaagctataattgttggacatcccacggagagaaggtgttgaaatggaagaagatgacaatattccggactttgctcagtatgttggatttgaagaaaatcaaacgggcgaggaggaaatagctgctgatggtaacgacgttgcggatgatcttggtcagatgttgcaggacgccagggaggactgcgaaagtgaaaaggaggcccataaattggacaagatgttggaggaccacagaacttcgttgtacccaggttgcgagcaggggcacaaaaagttggataccactctggagttcttgcaatggaaggcaaaaaatggggttagtgacaaggcatttggcgatttattgaaactcgtcaagaacattcttccggggggaaacaaattgcccgagacaacgtacgaggctaagaagatagtctgcccgttaggactggaagttcataagattcacgcatgtccgaacgattgtatcctatatcgcggtgaggagtatgagaacctagaagcatgccctgtttgcaaagcactacgatacaagattagacgagacgatccaggagaagttgatgggcagctaacaaagaagagaattcctgctaaggtgatgtggtatttccctataataccacggctaaggcgtttgttcaggaacaaggggaatgctagaatgttgcgatggcacgctgaagagcgtcaacaggacgggatgctgagacaccccgcccatggttcgcagtggcgaaacatcgatagaaaatttaaagaatttggaaaggacgcacgaaacatacagtttggtttgagtacagatggcatgaatccttttggagagatgagtagcggccctagcacttggcccgttacgatgtgtatctacaacctcccccctggctatgcatgaagaggaagtacataatgatgccgattattattcaaggccccaagcaacctggtaacgacatcgatgtgtacctaagaccactggtcgaagatcttaaacagttgtggaagaaggaaggtgtcccgtgtgggacgaggacaaacatgaggagtttaacctacgagcgctgctgttcgtaaccatcaacgattggcctgcatttagcaacctattcggacagtccaacaaggggtacaaggcttgcactcactgtatggataaacagaaagtacgtatcttaagcactgtaggaaggttgtatacatgggtcatcgtcgattccttgcagcaaaccacccggtatggaagaaaggcaagcacttcgaacataaggccgaccaccgtacgaagcctaaacatcacagcgggaaaacagtgtttgctatggttaaagatcttaaagtagtgtttggaaaggggcctggaagccagcctatagagagcgaagatggtcacgcggcgatgtggaaaaagaactctatattttgggagttaccatattgggaattcttggacgtacgccacgcaatcgacgtgatgcacctcactaagaacctttgcgtaaaccttcttggcttcctaggtgtatacggaaagtcgaaagatacactggaaacacgttgtatgatctgaagcatatggaacaacgcggcgaccttcacccggaaccaaaggagaaaggaagccattacttgagtccaggcagctacactcttagcaaggcagagaaggaaagtatgtttgaatgcttggagagcataaaggtaccgtctggatactccacgaatatcaagcgaataataagcacgaaggagaagaagttcacaaacctaaagtctcatgactgtcacgtgttgatgacacaactgctaccagttataataaggggtatccttccagacaatgtccgggcaacaataacaaagtatgtgcattcatgaacgcaatttcacagaaggtcatcgatccggatagattagaagcccttaagaatgaagtagtgcaatgtctcgttagttttgagttgatatttccaccttcatttttcaatataatgacgcatctactttgtcaccttgtgaaagagatccgtattctcgggcctgtgtacctacacaacatgtttcctttcgagaggtacatgggcgttctgaaaaagtatgttcgtaaccgtgctcgtccagaggcaagcatcgccaagggttatggaacagatgaggtcatcgaattttgcgtagaatttatcgaagaccttcgcccaatcggggtacctgaatcacgccatgaagggagactacggggaaagggaactctcggaaggaaagcaataatgagggtagacaacaatttattccgtaaagcccatttcactgttctgcaacactcttcattggtagctccttacatcgaggagcacttggctctagttcgcgccaggaacatcggtaagtccgatgcatggattacacggcatcacattgatactttccccacgtggctacgacaacatctcatgggtaacgagtcgatcaaccaacaacttgccttcctagcgaggggaccgtctgggtcgatcgcgacattccagggatatgagatcaatgggtacacattctacacgagagcccaagacatgaagagcacgaaccaaaacaacgttgttcgtgtcgatgccatgggacacgatggaacaactgccacgtattatggtgccattgaggatatatgggaacttgactatggtcctctcaaggttcctctgttccggtgccaatgggttaggttgtctggtggagacgtaatgattgatgacagtggtatgacaactgttgaccttaacaaggttggatactcggacgaaccttttgtccttgccaatgatgtaacgcaagtctttttcgtgaaggacatgtctagcaaaggaaagaagggcagagggcctgatgagcctaagcgtcaagtggttctcccaggcaaaagaaaaatcgtcggagttgaggacaagattgacgaggattacgatcagttggataggcaaccccctttcacggtgacgattgaccctagcatcctcctatcaaatgaagacaccccttactcacgcagcgatcacaaggagggaacaatagtgaggagaaagtacgtgcggtcaaccgtcaccgccgatgtaatgccacgatgtaaactattttggatgtattgattatccatataaattaattgatgtatggcataatttattatcattcatatgctacatttaattgaatatcattcatatgctaattataattgactagagaatttttaaaagtattaaatcattcatgtggcatttacagatgttaattagagtttttcacaatttaatttattatctttcatatgctacttatatatgactattcgaatttttaaaaggtttaaatcatgcatgtggcatttacatatgttaattagagtttttaatatttaatttaatataattcctacgctaagtatatatgatgattacaatttttattaattttaaatcatgcagtatgtacatacaaatcttaattagagtttttaccaatttaataatatcattcatatgctaagtatatatgattattggaatttttattaattttaagtcatatatttgcttattacgatttatccacttaatttattacagacaaaaataatttttcgaagtaattgtcattaacctttgtactttaaataatgttaatgcattaacttctattttagaaacacatatgtaagcgaaaataatatgcagagctataatctttagtcccggttcttaaccctaaccgggtttaaaaagaatttggaaatagcgggaaaatatctttagccccggttgatga

SEQ ID NO: 22428 - DNA, 5230 bp, Oryza sativa
gcatttatcctaatacatattttttgtatcggcagaaaagacgtgttgtcggagtcgtccctcaagccggagtggaagagctagccgtagaaggaattcgtgcaggcaagtgacgtaataatataaatgattgttatatttgtaatgcaattaagaatattagacttgtaattagacttagcatataattaagattgtgtagtgttctaatattatttgagttttaatataagattattttattgcaaattagacttagtatgtaattattgactacggaattggtgcgactcctagcaattgactattgtagtcttaattagacttagcatatacgcacgaaacacttagcatacatgactattttagtcttagcatgtaatattatttgagttttaatataagattattttatttgtaattagacttagtatataattattgactacggaattggtgcgactcctagcaattgacaattttagtcttaattagacttagcatatacgacagttacacttagcatacatgactctttcagtcttagcatgtaatattatttgagttttaatataagattattttatttgtaattagacttagtatataattattgactacgaaattggtgcgactcctagcaattgacaattttagtcttaattagacttagcatatacgacagttacacttagcatacatgactctttcagtcttagcatgtaatattatttgagttttaatataagattactttatttgtaattagaattagtatgtaattattgactacggaattggtgcgactcctagcaattgactattgtagtcttaattagacttagcatatacgcacgaaacacttagcatatacatgactattttagtcttagcatgtaatattatttgagttttaatataagattattttatttgtaattagacttagtatataattatttactagctagggttgtataatatacgtcacctagacttagcttatatcacgatttgtaattagacttagcacgtaaggttgtgtagggttctaatgtacgacatttacacttagcatacatgacttagattgttaaaacataaatgtctcgtgacttagcagatgtttcttgtatcaacagatggctgaccgcgatgaggaacaaatattgtacgatacaatcgcggagggaagcaaccagtactggaatgaagaagaggggaacgatgatccaaaccagtacttgaacgaggaagggaacgtggagagggatgcggaggggaaccagcaggggcacgtggaaagggatgtggaggggaaccaggaggaggaggctagtggtagtcaaccctccgttggacagaagagggcacgcgggcaacgaggtgcagcgaagaagcttgagggttggcacatcataacggaagtggaagaagatggacgtcctagtgccccggccgaagccgccaagaactatgtacatcacagcggttgggttgtgcgggataacgtgcctgtcagtacggtgtactggtgaagaacaagggcacgcggagatcatgagagctttgtcccagattcggagaaagagatgctgtggaccacaatgctcgagacattcacccttcccgcgggtacagaggacaaagtgaaaaggtggactctgaagaaaatggcagaacagtttcagagcttcaagggagagctgtacaagaaatatatcctgaaggggcagacaccgaacttcgacacattcccaaagctaagggatcactgggatgagttcgttgcatataagacaggtgaacaagggcaggtgatgatggaaagaaacaaagaaaatgccgccaagaagaagtaccatcaccacttggggtcaggaggctatagcgtcgcgatgccgaagtgggaggagttggaggctagcttgattgagaggggtatcgaaccggcaaccgccaattggccggaacgatcgaagttttggtactatgctcacggtggaacgctcaacccagctgatggctcactggtcttcggtgatcagatacgagaggctgcgcgatgactaacagatgcagtggaagcctcctctcagggcacgttccaaccggacagagatagggacgagctgacactcgccctgcagactccagagcatccaggacgaacacgagggaaaggggtgattccttggaagattggtttcaaggaggacatccacacgtacaggagtcggatgaggagtaagagagataccgaggcgaagattgcagatctagagttctgggtatcgagctacgaacttagcatgcaagaggaggtggcaaggaaggttgatgaacgcatagccgcacatcggtcccatgatccccagccgaccattcctcctgcaatggtgagcccgtcaggaaaccgtagcagctgcgcctcaacggggcaggtaggatcacagagcatggacgccatgcaaacacaggacgaatcgacctgtcccgttgatgacatcactcagcggacaccatgtgagctgcatattccttacaagaacttatcaataaaggtaagctcgtagtttatatattttagatttagccattccgctagttgctgcttatatatgttgattactaataaataatctctcacaacatgaaggtggcgtcgggcatggccatcccaacggacccttcaggtacttaccactgcaggccgattccagcaggatactcaaaggtcgaagttgagttggtcgaaggcgcgtacgaggacctcgagctggattatcctggaggagatggtgagactcatctacgagacaaaagccatgccattattctatggcgtagacggtatatcatcctccctgggcgacaaacggcgtctcgtgcaccatctcctccggctccgccatctcctcctcaggatcctgcaccgtctcctcctcatgatccgccagcaccgtctccacctcaggctccagcaccgactcctcctcaggatcctgcaccgactcctcctcgggctcctacacctactcctccgcaagctcctcttccggcaccttcaaagtcaagggccgccccagctccaccgcctgcccacacaagggcaacgaagaaggcgaaagttgacgccgccaagaacaaggacccggggtacgattgcacgcaagaggagcttgacgcttacgttgcatcagaagtcaagagacaattcaagcctcgaagtccagaaaagaagattcctatagaccccagtgtcaggaacttctttaggggtatgtctgcatctgtcaaggaggccatcaagctatcgaactatgagcgaacgctgaagaaagcatcttctggaaagtccaaaccagtccctcagcttggagagcaaccaaaccaggagatcgagccgttggtgaccggtaaagaaatgacgatagaacaatttattactgacaccggtctaactacggatcaattgctaggagtcgcaccaatcgaaaaggcggaagtgaaatacatgtacgaactcggtaaaccgcttgtcaagcctgagctgctgcagtccctacccacacaaatgtacaagttccatcagctgtacatggagatgaccgccaccggtagagagatgatcggagcgaggatcagggacacggacttcttgcaaggagatgacattctctggatcaatttcaggggaatctacgaactataccagctggacgccctcgacgtctctattatgagttgctggattttgtaagtatatcgttcagttagatttcttactatacgtctcctttaattaattaggtccctgtatataagtagactatagaaaataatatactcccttttatcgttatagaatggagattcaaagggcccgacggcggagggttttcgatactggattcatcaaccctcagagagtaaacgtcgcaatgctcgaccaatatccacaagaaacagaggacaatctcgtccatctcctgaaggcgcagcattacaagacgttcatactgttgccgtacaacacagagttagtttaattttacagtcttcctacataccaaatttcattcccgtacgaacttgctaagtgtttcatatgtaatgcatcccacgcacattgcagatgacactgggtgcttttactcttcgacctgtcggcctgcaccgtcaacgtatatgactcaatggataaaaaagagtctacgtttgacaaggttttcgaacttatagacaggtaccgtcataagttcctctgttaattaagaaaatcttgttatgttaattgctactacgaatcatagctttaaactctatgtagggcttggtatcggttccgtcatttggtccgcggcaaatggagagaaagacttaggcggaagttcaaatttcctgtgagtacacatgctctacttttatatttctccgattcaaatacatagaagtgtatattaattagatctctcgttgtttgtcatttatttgtagtgcgcaaagcaaaagcagggaactaacttgtgcggctattacgtatgcgagtattgccactgtaacaccctgattttcgttcgggaataaaaatcaattaataatacattttatagaaattaaacaaaagttaaatcaacttaatcaagtgaattattgagggaattaaaaatttcctttaaaaattattggccgggaatattttgtaatattctttgtgccctaatgtactctccggaattttccatgaactttcggagctcgagaaatagttttaatagcacaaagatcattgcatcaattaaaataaaaagaaaacaaataaaatcctccttcctctctttgggcccctttcggcccaatccctcctttctctcccgcggcccgcgcgccccctttctctccctctcgggccggcctcctccctcggcccgctcggctctctctctccctcaagtccgttctgcctccccagccggcctctccctccctctctctccgacaggtgggacccgtggaccccacctgtcatccctttcctccagctccaactgccgccatggccgcctgagccaccccacgacgccgcttcctccgcgtgcctccacgctcccgcgcgcatgcagacgtggtccaccccacgtcctccccttcctccactttctcccccatttcccccccccaaaaatcggcgccgttcgagccccactcgcccacgtcgccggagctc

SEQ ID NO: 22429 - DNA, 33902 bp, Oryza sativa
cctttccccgcccctcgtcgccgcgtccttggtgagctcctcgtctccctccttgcctccctcctctgtctcccgtgcgcgctgccgcgccggtggccgccgccggtgaccacctggccgtgcgccgccgccccgctcgcctgggccacccggaccctccttgtcgcgccgcgtcgatctcgtgcgccgccgccgcccatgcgtgccgcctctcccgcgccgcccgtcggtcgccgtctccggagaccgcgctaccgccgcgccatggctcagctaggccggctttgtgccgtgctgtgccccagccgcgccgcccctggccgcccgatcggcttgggccgatccggaccatcggttctcgtggaccggtggtggaccgcctcggtggtcccggtccacggtggaccggcgcccttgtgccgctgaccggtggggcccgcttgccggcgccgcccctcccctttgatgacgtcagcaaccatcttttcctttggaaaaataaataataattgcgtcataattcgttaataattctagaaattcatttaaatggctcaaaacttctaaaattcatatctaattcattcgaactccgaattgagccgttcagcttgcaaaattcatctaaaattgagctctacatgtttgtttactttttatgtactgtttccttggtttttattagagtttttcctcgttttgcgtgccagcgtgtagttcccgtcgtttcggaagatcgcgttcgcagggataagagttcagaagatccaagtgaagaagcaaggcaagtcacacattccccttgagcatgttgatcccaatttataaatgttttaccgtttacaaataaatatgcatgttttgctaattacatgggatccgggtattacctatctgctcgcttgtgccatgtttacttgatatctgttctttgtcaaccttgggtaatgaatcgactagctcatgttacttatgtgacctagctagaactatatgcttagccatgcttaattaccactagctcagttgatgggataattacagtattagacctttttagtatcagagtgagctgcgtgctcgagacatctagccatgcttcatggtcgtaattatccaactaaaatgcgactgaatggtgggctgtgggtgcatggttttgctagtcgcacccatgtcaattaaggaccggttcgcgggatgccctggaagaacttatcgtacttaccacaagccagcgtgggcaacggctgggcttgtagtgtagctttcctctagccgacgcatccaggcaagggtgggcgtgatggagcggggcgggccctgggacggcctctgtcgcttccggattcacctaggcacgagaggggactgcccgttgcccgctggggatgggggtgaaacctgaggtgtggtgtgcttggttagagggggttatgcgaagggtcctgtcacggcctctttccggtatgtcgtggtgacatgtcggcgcacggtaacgtgtcatggggctgtgtcttgtgggtacagttgtacacctctgatcagagtaaaactattcgaatagccgtgcccgcggttatgggcggtcgaccagattcaccgtgattagtcccatcttaataaatcgacccaatacactgtagttcaggtgggttggttgggcctattcaacttggtgtagcgttgatcagtggagattcaatattactttaattactcaacagttttactgttttgctcaataaaatgttttacaactgcctttatgcaaatagccacaaacccctccttgtatccccttgcacgtctgcatcgttggtgtggcttgctgagtacggtggttgtactcagtcttgctattattcccccttttcagaagtgtagtgcttctgagctgaagatggagttagaggaccaaggctcagatcccagttgagttttgcctgtggagtggagctgaagccccgctaggatcgcctttttccgctgctgtcgttctgtttctgtgtgaggactaagtgcctcttccgtaagtattttacgctttatttacgtttggaactgtatattacttgtcattttgtgtaccctggctggtcctggacagggatttaatacgcaaaatagtctggaaatttgggttaaatttctgggcgtgacagccactgccttgcagaccaaatcatcaccacaagagagctcgatgtacgtacaaataaattcaaaatttcattacgtaacgatttcttgtttaattactaatcaatttcatacattcatatagtttattcgcatgagggataacctgaccacacacaaggaatttatcgcggcggttcaagaacaactcatgggattcatcaacgaagaaatccttgatcccaagggtgaattctactacgacggaaacacaattcaccggtccttagcttctgagctagcagcaagtactactactacgtcgaaatcgtagctagctaggacatataatggattgtaattaatacatgactacatatgtttctatatgcatgtgtacacattttctataatataaatatattttggtcatatatatatatatatatatacacacacacatatgcatttgcataacatatatatgtataaatacatatatattatgcatgtacatatgtactgaaccatatatatatatatgtatatgtatatatatatatatatatatatatacacacacacacacatgtacatatatgtatgtatgtatgtatgtatgtatgtacgtatgtatgcatgtatgtatgtattgaatcatatatatgcatggtttatatatatataaaaaggtcaactcgatctttagtcccgggactaaagatggctcagccggccacgtggctgaggcattaccaaccgggactaaagatagcgatctttagtcccggattggtactcccggtttggaaaccgggactaaagggggttacaaaccgggactacaaagggtttctccaccagtgtttcttagtcaactttgatgttctccgcctccataaactggctgtgtttagattggcccaaagtttaaaatttggttgaaattggagacaatgtgactgaaaagttgtgtgtataaaatgtttgatgtgatggaaagttggaagtttgaaaaaaaaactttggaactaaacacacccattggctaaaagggtgtagaaaaggctaaaaatgtcccaaagtaagggtgtgtttagttcacgctaaaattataagtttgtttgaaattggaacgatgtgatggaaaagttgaaagtttatgtgtataggaaagttttgatgtgatggaaaacttggaagtttaagaaaaagtttagaactaaacaaggcctaaaaacaccggctctataaattaacgagacaaagctttatttacaaaaaaaaccttaaactgaaattttacttaaaacaatttaccccgtaccctaaaatatttttgttttaaaaaaaattccgtgaaaccttaaaaaagggccttccttttttttaaaaaataatttttttagggtttttttgtcccgatttaaggatttgtggagaaaaacctagaatttgaaattcaattggaattgtcgctattccaccttataagctaacaaatgtgtgttagaaaaaaaaaccaagaactatactttgttttttcaatcctttgaaaagcccaagtcaaatcaggctagctctaaatgatcaattcctttcaaacaacactttcgtttttcaattatctattttattaagcacagattcccattatattactatattttcgtatctttatgtgcttgtctatgttccaaccttattctaaagaagccttcgtacgaaaacaatggagactataaaagatgttcacgtggaacaatcaaataaggtttgaaaagaagggatgaatttgtatgggacaaatttcttggagatggccgaattttcgttgcatgtatcaattttctgtccttacaatttttctataaacttaagtactcatactagtcaaataaaattatcgatattatgttcggttttccttcatacacttatcccatatacacttttcaattctaggtttttaacactattatccgatatccctactgccaaagtttcacccgttcatacacttatcccatataaaaatatttaatccctcatatccttgcaattaaaagaactgatacgtaaaaaaaaatggcaaaaaaacaaatgacaaaatacctctagagaaagaccgatttaacaagatccattgtaacccacgagcataaggcagtgtttgtcaactacttttctaactttttactatgtttttcgcacgtgcactttacaaactattaaactgtgtatttttttaaaaatgattttataaaaatttgttttaaaaatcatattaatatattttttaatttattttagctggtgcttatctaatcgatcgctccgttttgagtgctgcgaacgcagagactagacttttgaccaccgcgtgagtccaacccttcacggcgagggaaccatgacgaaaactagcgatcccctcctgaatcccccggcgccggcgagcaatcgcggcaacggcggcgtgcgccgcgtcccgtgggcgtccctgatcggcttcgtcgccctcgccatcaacttcgcgctctgcatctaccgcgcggaaggggatcgcggcgcgatcgcgtttgtcaccttcgcctatctcaacctgctgctcctcttctggtgcatccgccagttcgatcaggcgccgcacggatcggcggcgaggggccggatcagggccgccgtctggatcctcgccacatcgctcaccgccgtctttacatggaaggtggcggcgctgatgccgctccccgtcgccgccgtggcgtgggtcatggccgcggccaccgtggtcggtggattctacggcttcttcatccatgaggacaagtgatcgatcgatccatgatcggatgatcaaatcgcaaaatcggaaaagattactgctccattgggtctactgcttttatggcttcaggttgtatatcggtcaggttaattatgtggtggttgatatcgactcgatcgccggatgcactgtgagagtgttgcatatcataaataaatgaagtctggtgctatatgcattacaacatgatttgtttggtcttacttgtatatgtatgtgttgatttcacctggacatttcaaggtctatctcacattttctcctcgattgcattacagggggaaaaagtgcaggacaagaacatacgtctaatgtttatatggtttcaggttgagccggcctcgatcgtttctctgatgcttgctgatcataagtaaataaattgagtctatacatcaatggtactggtgctatgtgcattacaacatcatgctatttctcttaatttatttgtattacttgtatatattgctcattgcaaccagaaatttcagtctctcgatatcattttcacctagatttcagaggggaaagtggagggtctgatgagctagcagcagagtggcaggggcagtgaacatagttcatgtcctgaagacactaacgaacagagattcttgagcatttcctcacttatagcattacattttcaacccaaggatttggacggttttgacattcaggtatatatgtgctgccattgtgtcgatatcatcttttttactgaccttggatacgacggtgtggtggttcaacaactttggtagggttttgagcagcagaagtcagtagatgtcatgatagttagctagggagattagaaaaatttttttttaaccttttcccggtgatagtcggttcaacggtgtgcagccatctaagacaagaaagagcatccaaaggatttctatcgtacatcactcttttttttaaaaaaaaaaggtagaaaaggctgaagttctgatccatttcatcgataaagaagagatacgcatcgttccaagaaaatgttcagccccaaaacaccatcatttctatcatgcatctacaaatcttatgttgtttcttactctagatgtttcaaacaatcaatgctgcttgcacaagaacacaattcaccaatcaccatgctgtgatataaggaatgcaacagaaagacaaaaggtgaccacacctctttccattctttgtgcactgaacgatcatgtctatcaactatcaggccttgtttcgtttacgcctagattcaatccgagccgggaatgacaagtataataaaaaatttataatagatacaataagagaccgggatttattctgggccggaaaccaatttagtcatgataggtacaacagaatatccggattagttccacacctcttaactagtggattgattcccggtctcttattgtccctatcataagtaaattgattatcagtccagaataaatcctggtttcttattgtatctatcataaatttcttgctacacttcatttctggtccggattgaatccgggtgtaaccgaacaaggcctcaaggtaggaacaaagctgtatgctgctttctgtggccgttgcggcagcagctgcatgtgttgcagcttccaatgacttgcatatgggctggctttcatgtcaggtttccaactgggcaaagtagaattagtcatatgatccggccggcgatatgatcagcactagctagctgcctgtttccagcgaagctaacgatagtatcgatcgatgatcccagagtcgtgcagaacaaagctggatgcacaaagtagatgattattccaaagggctggctcacatcgagcttttagttagctgtgtccaatcaaatgatcctgcggcttcttgctcctagctgtgaaagacgtactccatgttaagttgcagaatcttcagtggaaatgcacgtcgtgacagctaatttttaataattttttgtttcaacattttcacaaacaaaactaaggccctttttaatttttttctgacagaaatagaattgtgttatgtggaaatacgaactctacgtttttggcgtacgattcacacaataagatatatattttacagtccataaaaaagtatctatagactatactagatactaaaatttgagagatctatatgacactactaaattttacactataaaatataatactaatacatgtcagtatcttattaaagatggtataattatctgcttataatacctacaacaacaacaagcgttgtcatggaaggacaacacgagtagtctctacaacgttcatgtgcaaaggtggcatgtactagcccattacaaggagcagccaatttcaacgtggccatagccattcgtaaaatatataagtaactattagcgtgattaagctcgtccgaacaaacgttgttaatcaggtatcatccaattatttatcacatattaatcctgcgaacggtgtcatgttttcctccctgtacgtgtgcttaaatatgggccgctaattatcggtcgcatgcatggatacgtcgccatttgcatctgttgcgaaataagtagagtaatgcggagtgggacatgctcaaccggtcaggtggttttcttgggtacagactgaagagacagcgacagccctccgtcccattattttaagtgtagctatgttttcatactaaaattctatcgtccgtcttatttataatttcttttaaaaaaattaaaaatataagtcatgtataaagaactattcatattttatcatctcataacaacaaaaacactaattataaaagaaatttaaataagacggacgatcaaaattggacacggaaactcatggttgcagttaaaatgggacgaagggagtacttctaagcaagtagtaataggagtaatcgtcccataaaaaacaaatctagcacgggatatgatattgcaaatttaaatactacactcacttcgtcccataaaaattaaacataacacatgatatgatacgtctcagtactatgaatttgaatagaatactatccagattcgtagtacgtcacataccatactagattaaaaaatcgtcccataaaaattaaacataacacatgatatgatacgtctcagtactatgaatttgaatagaatactatccagattcgtagtacgtcacataccatactagattaaaaaatcgtcccataaaaattaaacataacacatgatatgatacgtctcagtactatgaatttgaatagaatactatccagattcgtagtacgtcacataccatactagattttttttaatgaagagagtaatactattatgttactgtcatcctgcttaaaatgtatgtgccgttgcatataaattacatcctccgtttaaaaaaaccaacttcaaaaaacacaaactaaatatgcttattatctcaagaaatttggtttttttttgacagagaaaatgtctgtacggattgacttgtaaatcacgccctctgtctaaacaaattgagagcatgaatctagaaagatggaattataaaggtttggtttaggacggagggttttttttaaagatagagggagtaaactagataacttattaatcagtgcttactcagtggactaggtaggtcgatctcaaatgttattatttactttctacggtctttttaattccttataattcagaacatgggcataggtctatggtcccgttcttagtagctcattgatttccccgcacaattttatacgtgttagttaaattagatttgttatacaactcttagcttatactatacgccgttaacttttaacatgattttgatcattcatcttattaaaaaaatatcatttatttttttacttattttatcattaaagaaactataatctcaacatattcttttcacatattcatttatattaaactttttatactaccccaggagtttggcctcacagttttttattttttttcatattcacttaaatgtgggccctacttctaatttgtgattaggctagcgcatcagcacaagtggaccaaatcaatgtgccacatcagcaaaaaccactcttaaaactgttaatggagccaaattgcatcgattttaatatcacgattaggagatacaaataatatatacctatattatttgggggagtaaatgtggacttagtccttccagcattgatctgctaacagcccacatgattgcggagaccggtatgggagacgaaaccgcgtgatctggtctgagggttcgactgttcgagtcggttcgaggcccaggagcattggtagtagtactacgtataagcaacgtcagtgaatgcgtcagtacctcaaggtggataagctataagaagtagtcgaagacgaaattaagtactactactacaattaatacattttgtgtaacatttgtacatgtacaatggtttatgtatatataaagtaaagctagatatgtatatatacatgtgtagaaagaaccaaacatttgcaatatccaatagctagcagccagtacgtaacgatatttacacaggaattaactgttccattgcttcagcatgtcgatcgatcgatcgatcattttcagtctacgccgggatgatgaaggaacaaggcgtagaatcccccaagaacagttgaggcggccatcacccaaataatcgcatccaccggccacggcatgagcgcggaaaccctccacgagaacaccgcggcgagcagcgccgtgacgacccatacgccggccttggcgccgcccctcgccggcgaattccgcggcgccgcctcgaagcggcggaggaacacgaagagcagcacaaggctgaggtacgacacgacgatgaacgacgtctcggtgatttctccgtgtgacctgtggatcgcagcgatcgagcttgctgtgaggaggataaacccgatgcaggtcgtagcagcttctgatgccatgaaacggatcggagtaaagagtgacgtcgtctggacgtccgatatattatatagccggcgacaaatactggaaatgggatcatggtttgttagcatgcatttataggccgcgcttgcctgcgcgtcgggttgaagttaggtcggtgcatgtatggccgagtttagtttcaaactcccaacttttccatcatatcaaaacttttctacacacacaaacttctactttttcatcacatcgctccaatttcaatcaaattttcaattttagcgtgaatgaaacacacttgattctcaagcttacggtggtcatcagtatgatatgattaacgagtggatgtatatcgatacgcatgacgaggtaatgatcctttttgaacggaacgaggtaattaatgattgttggttctcaagcttactgttgtcatctgtatattctgtagcagtataccatgtaaaagatttagtcttatgataatttctcacactatcattataacaaactgaaatatatatatgttgctaatattcctataaacttataattttattactatagttacagttttctaaagtttactctttaaaaaatacagtatatatgtcggtttcccggtgcactacggccccattagtaatttactcgtcggttcgtacggccctattagcatgtatgtccgccgttcgtttggcccactaacagcatattaaacatgtggataggatcttcagtgagggccagcacaacacggaccattaatcaatggcggttccgggtaacacgctgagtcaacgcgggatcagcgaccgacgatttggtcacgcgctccaagctacgtaaccatatgattacagttattctttacttctaacgtaggctgtgcttagcttgggggtctgatcggtcccgcccccatagacactcctcccacttctcccctttctcctccccttcttctcctcctattatagtacaccaaaaaaaaaattaaaaaacaaaaagttagaaaaatttatgtataaaaaatttgaattcaaattcaaatttaaatcgggtatgtaaacttttgacttataaactttgaatctataaactttaggtgtataaactttagatatatagaaatactatatatagaaaatatttgaattatttgaattcaaattcaaatttgaatcagatataattcaaattcaaatttgaatcgggtatataaactttaggtgtataaactttagatgtgtagaaatactatatatgaaaaatatttgaatttaaattcaaatttgaatcagatataattcaaattcaaacttgaatcggatatataaactttaggtttttaaatttaggtgtataaactttagatgtataaaaatactatatattaaaaatatttgaattcaaatttaaatttgaatcggatatataaacttttggtctctaaactttagatgtgtaaatttgagatgtataaactttaggtgcataaatttactaaaataggaaagtaatacggtgccaaaaaaggaaaccaggtagagggagggagggggaggagggttcccgtgcttagttcccttcaaacttctaacgttttcgtcatatcaaatgtttgaatacatgtatggagcattaaatatagatgaaaaaaaccaattgcacagtttgtatgtaaattgcgagatgaatattttgcgcctaattacgccaagatttgacaatgtggtattatatcatgatttgacaatgtggtgctacagtaaatatttgctaataacggattaactaggcttaatagatttgtctcgcagtttacaagcgaaatctgtaatttgttttgttattagtttacgtttaatactttaaatgtacgtgtgtatacgttaattttttttcgaaaacaactaaacacggccataatcaaaagaaaattatatttattttatttttgacaataaacattactaatatcactagtacagtaggaatcctcttctcatacatttctcaccaagtacagtacacgccacacgtcactgctaatttaattgtcaccgcaagcttcatgcatttcagcaattttgaagccgcggcgatgctgcatgcagtaattttggggcgcacagaaataaatcactggcacgaacaaattaaatggtcatcccgcgcgccgtgtgcttgcccggcgcgatcgatggagaggcgccgtatcaaattagcaaattaattagcaggagtaccgaattaatttcaacatggcaaaggttaactagctgtactgtttacataattaatcatcaagaaactactcctagcaagcattgcttttacatgaagcacggagggggagataatgccaaacatgagtagcggccgcgttgagcagttgagcacgcctacgcaactatttggatatatatacattgggacgtgttgactgagcagtgagcacaaagagtcacggcaacgcttgacctgttgagtacggatggtctccctggctagatgatcatcagggtgttttccttgtaattatcttatggataagtaccagagttgaaaactcttacacaagagtacaagacatgtcattcttcagagcctatcccctcacaacggctgagtatacaacacaactcttaaccattaatccatcacaatattttttttattacccttcttacgagaaagcaaaattcctttatgaaaggtaataaatgattttaaatttaacattgatgttttttctttcctctcccctcgctctctcatgttatcaaatttgtcttgttagttagtaaagctacgagcatttgattaaaaattgtggtacatgtcctaagtgagacgtttcatgtcaaccccttattgttttgtagtgcggtggagagactgaaatgagctcgaggaaatcgaaaagaaaacacaggaacgaggaaatagacacgacgtcagattacagtctccagagaactcgctttgatggacgataggatagacatgctgatatggccaccatgatcaaataatgtatcaaaattatgggagacttgtatctatgagagcatctagactctagtttccttttccacatctttatctgtcaaattttgatttcgaaccatctgatcttagtctaatggttacattactactactccctccctctctagacccttttatccctctccaacctcaccatcttttccaaactattcaaattagtcatatctaaactgcactatactagaaccggagatacactggtgacgtctttttttccctcagaaccaacattcctctacctttgacaccctttccatcatcgcaagcatgatgaccctcctgttagaataattgggctaggctcgatttatcctattaaaatctcaaaggcccataataagtgtgataataataccaccttaggatttaagcgaggactatctcaacctaaatagggagttattggagactccctgttgaccggttgaggtgggagtcggaaagccacacgcgtgcgcgccgggccgaggccgtggccgtggctggcgtcacgtcacgtcgctattcttttgcaaccacgatcccacgttcccacgactgaacgatcacaacgattcgcttgcttctttcccgggtgttagttcttcctcctccgcgcttgtgctgttctcgcttctgatcgcttgcgcgcacgagcacaccttcgcctgagatctgcaccgggtaggcgggtgatcaggtttttggggagtgcttctcacacgactgctcgtccaccatgtctgcgcctggagccggagcttccgatggtgcgcctggagctggagccggagatggtgcgcctggagctgcgaacgtcaacaccaacggaggcaattttgcctcacaatccagcggagggccattctcggggtatatccttctcctgctgttaactcattcgttcatagcgctgttagtcctgttagtcgcaagtcaattgcgttcttgcttatgatacctttagcatgctactggttatgctacatgttgtcactagatcaccccacactgtttatgccatgattattgtcttaacattttggattaaaatatgccgatatatgaccatatttccaacactccaaaaacctgataggtcattttcggtagttggctttgctgctgcactgaaaccacatgcttttgatggttctaactataagagatggaaagcacgtgcactattgtggttgacagcgatgtaatgcttctatgtttcacggggcaaacgaagtgaaccacctctttctcctgaggaagaggctaagttcgaggcttcggattgcctgttccgtggagcattgatcagtgtactcgctgacaacatagtggacgtgtacatgcacatgccttccgggaaggacatgtgggatgcacttgaggccaaattcggagtttccgacgccggcagtgagctgtatgtcatggagcagttctatgactacaagatggtcgatgaccgttctgtagtagaacaaactcatgagattcggatgctggctaaggaacttgagaacaacaactatgagttgccggacaagtttgtggcaggtggcattattgccaaattgccaccttcttggtcagactttgccacttctctaaagcacaagagacaagagttcagtgtttctgatttcattggctctttgggtgttgaggagaaggcgagggcaaaggacgtccggggcaaaaaggttgagggaggttctagtgccaatatggtacagaagaagaaccctcatgcatcccacaataacaagaaagtcaagcatgatgtcaaacccaaggctgcaaccaactttaagaagaaaggcaagggaaaggcaaagggagactgctttgtgtgtggcaagtctgggcattgggccaaggactgtcctgagcgcaaagacaagaagtctgccaacatggtcattagcgagggaggaggaatatcggggtacggtaaaatattacctacagttctctttgtttttcactcacctgattggtgggtggatactagtgctaatattcatgtatgtgctgacatttctctgttttcttcttatcaggtcgggagaggttcctccttgttgatgggaaacgggtcgcttgcggctgttcatggtgttggtatggtcgatctgaagtttacttcgggaaagaccgtgcagctgaagaacgtgcagcatgtcccttcaataaagaagaatcttgttagcggctctctactgtgtagagaaggttttagacttgtgtttaaatccaataaatgtgtcgtatctaaatatgggacttttgttggaaaaggttatgacagcggaggcttgttccgcttttctttgaatgacatgtgtaataatcataatgttgtgaaccatattagcgagaatgatgagtctaatgtgtggcattcacgactctgtcatgtgaatttcggttgtatgacgcgcttagctaacatgagtttaattccaaaattcactttggtgaaaggttctaagtgccatacttgtgttcaatcgaaacaacctctcaagcctcacaaggcatctgaggcgaggaatttggcacctcttgaacttgttcattccaatttgtgcgaaatgaatggcgtgttgactaaagggggaaagaaatatttcatgacaccgatagatgattgcactaggttttgctgtgtgtatctattgaaaacaaaggatgaagcattgcatttctttaagacctataaagctgaggtagaaaaccaacttgaaaggaaaatcaaacggttgaggtctgatagaggtggggagtatttttccaatgaattttcatccttttgcgaagagtttggaattattcatgagaggacgcctccctattcaccccaatcaaatggggtggccgaaagaaagaatcgtactctaactgagatggtgaatgccatgttagacattgtagagctttccaaggaatggtggggtaaggcagttttgactgcatgtcatgtcctgaataaaattccaatgaagcataaggaagtaacaccattcgaggaatgagaaaggaagaaattaaatctctcatacctacgaacatggggctgtttggccaaggtaaatgtacctatagccaaaaagtggaaacttggaccaaatactgttgattgtgtgttccttggttatgctattcacagtgtgggttatagattcttaatagtaaactctggagtacccggcatgcatcttggtacaattattgagtgtagagatgctacattctttgagaatgaatttcccatgaaacatacacctagcacctctagtcaagaaactgtcatgccccatgagcactttgcaccgatagaacacaatgatcaaacgcctgaggaaaatcctgaggaggacaacattgtagatactcgtaagagtaagagacaaagggttgcaaaatcctttggagatgactacattgtatacctcgatccacaccccaagaaccatagaagaggcatattcatctcctgacgctgactactggaaggaagcagtacgcagtgaaatggactcgattatgtctaatggtacttgggaagtcattgagcatccatatgggtgcaagcccgtaggatgcaaatgggttttcaagaaaaagcttaggcttgatggtacaattgaaaagtacaaggcaaggcttgtggcaagggttatacccaaaaggaaggcgaggactttttttgacacatactcaccagttgctcgcttgaccacgattcgagtactacttgctctggcagcctctcatggtcttctcgtccatcagatggacgttaagacagctttcgtaaacagagagctggaggaggagatctatatggatcaaccatacggatatgtactagaaggtcaggagggaatggtgtgtaaactgttgaaatccttgtatggcctaaagcaagctcctaagcaatgtcatgagaagtttgacaccacgcttacatctgcaggctttgttgtgaacgaaactgacaaatgtgtgtactatcactatagtgggggagaaggagtgatcttgtgcttatatgtcgatgacatattgatctttgggaccagcctcaatgtgattgaggaggtcaaggactatctgtccaagagttttgaaatgaaggatttgggagaggctgatgttattcttaacattaaactacaaagaggagatgagggtgggattacacttgtgcaatcgcactatgtggacaaggttttgagtcgctttggatatagtgactgcaagccagctcctactccttatgatcccagcgtgctattaagaaaaaaccgaagaatagcaagggatcaactgagatactctcaaatcattggttcattgatgtacttggctagtgcaacgaggccagacatctcatttgctgtaagcaagctgagccggtttgtctcaaatccaggagatgatcattggcaggctctggaaagagtaatgcgctatctaaagggcactgtgagctatgggattcactataccgggtatccaaaagtactagaagggtatagtgactcaaactggatatctgatgctgatgagataaaagccacaggtggatatgtgttcacacttggaggtggcgctgtttcctggaagtcttgcaagcagaccatcttaacgaggtcaacaatggaagcataacttatagcattagatactgcgacagttgaggccgagtggcttcgtgaactcctgatggatttgccggtgcttgaaaaaccagtgccagctatcctaatgaactgtgataatcaaacagtgattattaaaatgaacagttcaaaggacaacatgaagtcatctaggcatatcaagagaagactgaaatctgtcagaaagcagaaaaactccggagtgatagcattggactatgtccaaacggctagaaatctggcagatcagtttaccaagaggctaccacgtaatgtgatagacagtgcatcgagggaaatgggcttgatacccacctaaggttgcacaatagtggaaacctgtccattgtgatcggagatcccgtgaatttggatggcgaaacaaactattgtgtgactgagagaagagacccttgaaaagggctcattttcatgatgtacttctcttctttcctgcatggtaggatggctcatgccttaatgtgatccgagtggcttttccaagcagagatgttgacctgcagaacatctcagaagtaacacacctatatgagttcgactgctagtcacagtctatgaggtttgggcgatctctagatactcatgaaaggcctggagtttgacttatatgctccaaacaaaggggatgcaaacggcagcccagtaccagtcaagggtttgagtgaaacctgatcacacaaaactgacaattcaaggcatagtccattgttcagttgtggtctgatgtagctcatttcctagttggaagttcaacttaacagtctccaccaaaacactggtatatcaaacaagcacaaccttgagaacatttcttatgagccttgaagtttggtggggattgttagaataattgggctaggcctgatttatcctattaaaatctcaaaggcccataataagtgttaaggataatagtaccacctcaggatttaagcgaggagtatctcaacctaaatagggagttattggaggctccctgttgaccggttgaggtgggagtcggaaagccacacgcgcgcgcgcgccgggccgaggccgaggccgaggccgagggcgtgggcgaggcgaggcgtggctagttggctggctggctggcgtgcgtcacgtcacgtcgctattcttttgcaaccacgatcccacgttcccacgactgaacgatcagaacgattcgcttgcttctttcccgggtgttagttcttcctcctccgcgcttgtgctgttctcgcctcctcgcttctgatcgcttgcgcgcacgagagatcggaaggagcaaggccttcggaaccacaccttcgcctgagatctgcaccgggtaggcgggtgatcaggtttttggggagtgcttctcgcacgactgctcgtccaccatgtctgcacctggaaccggagctgctgacggcgccgttgctgctggagctggagccagagatggtgcgactggagctacgaacgtcaacaccaacggaggcaattctgcctcacaatccagcggagggccattctcggggtatatccttctcctgctgttaactcattcgttcatagcgctgttagtcctgttagtcgcaagtcaattgcgttcttgctatatgttcatgttcatgatgcttatgatatctttagcatgctactggttatgctatatgttgtcactagatcaccccacactgtttatgccataattattgtcttaatattttggattaaaatatgccgatatatgcccatatttccaacacctcctagcacccaaccgactagatgttccaagtttatttattgactatttctacccctggcacactcatcactcatccatcccatggcccatagccccaaccacgtcaccgccatctcaccacatatcatgttcgctacccccaaagtccttgaagcacaaggggttggaaaacaacgatgatgatgaacacctgatccctaaaggcattaggtttccgtcatcgtcgcactatcactgtagatagacagctcgtctaaacgacattttaattgtgtcggaccggatcgtgatttaaaaatcttggcatcaacctaaagacgataagattagaattgaaatccacccaaggatatttgttgcaaactaaaacatatattcattgtagtctttacataatagatacattatttcccatataaagtataggacatgatcacatctaatagactatactgtaaaagaaaaacacaaaaaacaatagtaataatctagaggtttacaacaccatgtttttacatcatttgtcaaggtacagttcaactatctatgtttttttggtactttccaacaatatgaattaaggtatcacaaataaacactgctgtttgttaggttgggtaacgtaaaccttttgccgccaaacagcacgtacgtatggagcttttgaagctacaaataatcaaacaccgtttggaagttttatctgacgtgatatatatattcttccatctactgccgaccagaccaaaggaacagtgtgtagaatcctccaaccaccgtggacgcagccatcaaccaaacggcggctgccacaggccacggcatcaacgctgaaactcgccatgagaagacaaccgtgaggagagacgaggagaaccagacgccggccttggagcgagatttcgccggtgagttcgccggcgccctctcgtattgctgcaagcaccagaacagcagcaggaggctgaggtacgacgtggcgacgaaggctatgccggcgatatctccgtgcgacctgtagatggctagtagcgagttgagcgtcaagaagccaaaccatacgtaggccagccatgaagccattgccagccgcaacagatgatcgatggtctgttaaggcagctagctccgcaggtcgcgtctcccggccatattatatatgtcgcctaattaatgcttattgttcaagcctcgagcagtcatatattaccgactcaaatcttttgacttgtattatatgactatccgtttatttatgttttcaaagtagcgaatcaaacttaattaatttgtttagcttaatactatatacaaacagcctagacacgtaccgcgtacgtacactcttgcgatcttacgaagcaaggaagcatcatccatatatacgtcttccccaaggctcttgaccattgaggcattgacttcactaatctaataaagaagtcttttcgcgtcgtgtagtccacccgtttgataattaaattacttgttactttaacttacacggcagtctaagggaaataaattctcggcattttccctcgcaggctgcagtgatcaatttgggaacaccgatccaaaacgaatggatgaggcatgatctaaggttagaaaatccatgtccctctgcattaacaacttctcgctacttgcgcgtccctgttcctgaattttgtcttataccagactcaagacctaccctgtaggagcgaaaaaacctacagggtaagacctatacctgcaaaatcaaaatttccatccaattatctaactgagacaagcacaagatctcctagctcaactaccagatcaggtatatatatacgtacatattttgcatacagaaattttcaaattgggagctttgagaatcaaacggaaagggaataattaacctcaacatctggaattctctcgattgaggaaaccgaacctttcaacaccgcgtcactcagcgaggagcggcggtgaagaatcgaaccaacgcaccaccgccggttggtgtgcagtgttgctatatgaccaaaagatggatggatggatggctggctgcggcggccttcgtttccggccatcggcgatgagcagctcgcatgcgactgcgctccgccgcccgccgtacgtcaaggtgcgacgggcttctgttccgttgccatctctccttctggcttctgctccggtgctcgctcgcgtttccttcctcatctgcaaaggagatgggatagttgagaggactggtgccgaagtttcaccgaaatttcagtataatcgacacccgggcccggtcttaaaaggagagagggagacattaacaagtgacgttgggccagtttggtttgtgaccaatgttggccttacgaaaatttggtatgccaatttttgataaggccaacatgtgtttggattgaagccaaattgaactaatttggctattgaaatgacctatgttatataggcatgcttcaattcaaacatacacaattattgttgaggttgctaaaaaattggcaagcctaatttagatctcaaaccaaattagcccgttctgccgttttatcaatgaaacacgtatgggttacgtcaaaccgtcgaagtcacctgatccacacaatatatatattggcttagttccaaatcttttcttaattaacatacatataatttatcttgttttaactatgtattttaaactcgtacgaaaaccatttatatagaagttgatttaaaattaatattaaatatattttcaagtttttagtaattaagattcaattaatcgtacattaatagtttatctcatttatatgcatacttaggctgtgtttgcaagagcaagttccaacactctcctcccgtttttcgcgcttacgcttttcaaactgctaaacgatgcattttttgtaaaaagtttctatacgaaagttgtttaaaaaaatcatattgatccatttttgaaaaaatagctaatacttaattaatcatgcgctaatggactactccgttttccgtgtgcacggtgcatgttcccattctcccctagtgatcagagccttaatcttaatactagactttcttgaacgaggcttatttgctatactatgtcccgttcttttctcatgaagataaagattttacctcagtttttgttagcatgtttttcaaattacaaaacgacgtgttaaaaactttttatataaaagttgcttttaaatattaaatatatccattttcttagtttataataattgaaactcaattaatcatatgttaatatgttaatggttttcttattttgggtgtccgcttttataccttcggtaactaacgttcattcgtcaatcaatcactctcttcattaaaaaaaaacttcatagttctatttctactctctttatcctaaaattaataaaattagtagtactagatttttattttaaaacagaggaattacatcattacctagtccacctatactagttttctactcccttcttcccatattataatgaaatacggattttaggtggatgtgacacatcctaataatacaaatctggataggagtaatccacataaaatcccttaaaatatgggatgcaatgagtaaacagtacctccatcccaaaataagtttattttcacaaaaaagatgataatacctctattttattaaatctcatgtaattatcctcactttatctatttccaatactatttttataaactccaatgcaatgattactataaaaataaacttcttttaagataagtgaaagaagataaaaataaatttatcatgggacgaagaaaataggattttgatctttctccttaccttcttggcatggagtagtatacttgagtacttctttccaatccgaatatccggagaaaagaaaatgacttgcacccgcaggtgctgtgactctgtgggcctgtgataatatggtagcaccaagtactgactgtcttagagaaattaattttatgggtatttgaaatttatctaaaacttgataaacttaaccattcatctactgtaggcacattgacatgtgattttaccgctccttttatatttcaattctaattttatcactctaaactttatattgtctatactaccgggtgtactgtaattctttttttcaaacgactgctgtacagacagccccatttcaataatacatatttccttcctcccaaaatgttacgaatcctaacgcaactaatcctatcctcgatataacatttgggaagaaagatgatcctcgatgtaacatttcggaagaaagatgatgggtgtgtttagttcacgttaaaattagaaatttgattgaaattggaacgatgtgacggaaagttggaagtttgtgtgtgtaggaaagttttgatgtgatgaaaaagttggaaatttgaagaaaaagttggaaactaaaccaggcctatatatggtgtgtttagttcacgttaaaattgaaaatttgattgaaattggaacgatgtgatgaaaaagttgaaaatttatgtgtgtagaaaagtttcgatgtgatagaaaagtttgaagtttgaagaaaaagttaggaactaaaccaggccataatatagtttgtttatatttgcagtacatattgtgacatacgacctccgtcctaaaaataagtgcagctatgggtatccgtatccaacgtttgaccgttcatcttatctgaaaaatttatgaaaaaattaggaaatattagtcaaacataaagtactatttatgttttatcatctaataacaataaaaatttaaaataagacaaacggtcaaatgttggataacagtgtaaaactgcgcttgtcctgagacggagggggtagattccagcaatttctgtaaacaaaaaagttaacctaagagaaaagagaaaatatgacatatcatattagaacaaatataaaagattcgttgtattaaaagagattatatccccacatagcccttgtttagttccgaaataattcttcaaactttcaactttttcatcacatcgaaactttcctacgcacaaactttcaacttttacgtcacatcgtttcaatttcaattaaacttctaattttgatgtgaactgaacacaccctatagctagagattgtttttggacggaggaagtataaaagcaacagccgctcatcctgtcatccatatccactgaagataagatcactcttatccatacggccgggaagacaatccagttcctctgctctcgaggtctcgcctgagtcctcatcctgccaagtgctagctatggttgaagtggacgatggatccaaacggcagatcggcgtggattagcagggcggggctgggcatcctcaccgtcaactccggcctcgccatctaccgctccaggggggacgcagccgcggtcgccttcgtcctcggctcgtacaccgccctgctcctcctcttctcctgcctctccgccttcgagcgcgcgccgcccgggtcccccgcgaggggccgcctcaagcgcgcggtgtgggcgctctcgacgctcgtcaccgccatgttcgcgtggaaggtcgcggcgctcatgccgccgcccgtggcggccgtcgtttgggccctcgccgtggcaacctcgctcggaggattcttggccttcttcatctacacctgaagtggtgaagccgatcgatcgctgtttctcggtcgcctgtgatgtatggatgtacatatagctagtaattagctatttagctattactagtttgtacatgcttcaagtgaactatactctgcctctgtacatatatatatagtactttagtaacataccggatgtacatgttttgtacgtatcagcgtatgaatatttctttctttttcagttttcactctttgttccagcgtcttgttacagttccaattgatctaaacgaggaacaagttcactttaggtcccccatttgttgctgggtcagacatccgtccttaacccgcaataacaaacattacgcgtcacttaactctgcaaatagtccacgtctacatggatggtttgacttaatccacgtcctaactcctacgtggtattggaagcaaaataaaaaaaatattttttttaaaaaaaaagacaattgcttatttggctccgtttaaactgatcctactttttctagtttgtttatgtgaccttacttttcaaaacaaacaccccatctgacccttttccactgcaccactaaagtttcattttttttaaagaaatataattattatttgtaatgaccaaactaccctcaagaaatcctatccacatctaaccctatctattcaatcccgtctttctcgtatatccattgcagcggcggcacgcggaggggacaagcagccacgtcagctagtggaggtagtggcgacggaggggcgcagagggaatggacccacggcggtgcgtgcgcggaggcggtgcatgcagagaatggagcagcgacggctacggcgagcagaaggactagcggtgatggtggctcgatgacgacgacgaggagcaacggcggcggagctcagctatgacggtgtgcaggcgatggatccggctttagctgggtgtgtgagccatggatctgacgacggctgggcatatgagtcacagatccgacacatgcgggtgacggatcccgtggcggcgggtcagcgacagcggcgctgcggtggtctcagggattgcgggtcatcaacgacgcacgactccttccccgcgccggcaagctctccgacactggccgccgctcgccgccatcctctgcgcctctctcccgcatgttggtgagctccggcactgcgccgtcacttctcgtccactacgcgccggcctcctccttccttcgcgcgcgtgatgccgtcgcccgccctccacacgcccgcgagctccagcgccgctccctcactccccgcgcgtgttggcctcagtcttcctccacgcgcgccgtcactgggtaggcagcgacaacgacgacgccgtggcgaagagcatagggtaccgctccctccctccccgcacgtgctggcctccgtcttcctccgcgcgcgctgccactgagtcggcaacaacgatgatgacaccgtggagaagatattatattttttttgggatgctatccaaaattttgttatattttaattatatttgataaaataaacacatactccctctatactcataaagaaagtcggttaggacaatgtttaagtcaaaccttgggaatataaatcatgaataactctcaagttgttgagtttaaaaatataaaaattatatgaatatatttgtcttgaaaaatactttcataaaagtatacatatatcacttttcaataaatatttttatagaaacaagaagttaaagttgtgttttgaataccgtgtcgctgtcctaaacgacttcctttacgagtacgagggagtataaaaatgttttatttttaaattatttttttacaaatacgacgtttggccgtgaaagtcggccggacggctctactactcctatttaatttttaaagtacttttttaagaactcttttaaagtactggtactcgtagtacaactactcccatgtagtatagcagagcagctacaataggttcactattgtatagagtgagtgaaatgcatggagtcatccaacttgtgcttaaatatttggatcgttaatatgagttaagtgagttatttagcaatctaactatccacatgagcttaccttgtacgcatagcataccgcctaagactaaaaaaactgcatctagacatccgcaaccacttcacaccccatccgttgccttctaggttttcgcctccgtcgttgtttatattcataacttcttgccgccgctgggtttgatgacaaacgagagagagactaagaactagaagaactcatcgaaacagacaagtgaaatgatttggttcacttaatttcaagtatttccaagtgctagctagtgatgtgagaaaggaaaaatatacacacaccgttttctgcacatccaaaagcaattttcaatcataggcagcatgccatgtgtacaaagtatgttcatgtggatagttagatagataaataacttacttaactcaccttagtgacgtagatgtgttttttgaaagtaaagtgatctgcatgacacatctaaacaagttaaatgatcttccatgtactccctcattctcattataagcacaaccataagtttttgtgtccaactttgatcgtctgtcttatataaatttttttaaaaacataagtcacgtataaagtactatttatattttatcatcttataacaaacaaaatactaatcataaaaaatattaaatacaatagacgatcaaagttagacatgaaaactcataactgcgtttaaaataggacagagggagtgttatactttaaacctagctatatcatcacaatccgatgtggaaaagagagaattgaaaagagtgtaaaacagactctaaatatataaccgtaggctccaagagagatgcaaatggaggtttccaccaagagcttgcatgctacttaccatgaaagtgagatactacctccgtaccaaaatatagatatttttagcacaatatcttactctaaaataaagctatttctgcatctatctccttctctcaaccaatcacaatcattcgtcttcacctactctttcttttcaatcaatcatacttcacttactccaatcattatcacctacctttttaatacatgtgacaatctaaaaaatatttacattttaggaaagagaaagtatattatagaatgatgccattgattgtagattgagtgggctgctattatacttttcttatgtctccaccatacctaaatagagctttcgacagcagaacctcctaacaatcgaggcccacatgttatcgataggctcatctcacgggccggcgacgtgccatatgtgaacgggctccatatgcctccgtatggtcctccccagcaccggccagcagctatgaatggacacaaacgcctctcttatgctggccggcatatagagtaattttctgctgtctttaggggaaagaatataccccaccgtgattgaccaagccgatggggaaagccacgcgtgattgccggcgtcggcactgaactctttcggcgtggaacacggagcacgttaggcggagtcgcggagacgaagagcaagtataattgcaacgagtgtggaagtaaggtaactagtctatctggcaattttccatcgccatggattcagttgctagcggttacagcgcctgaaacacaacacattatgcttgcattgtttcaccccgccattgtagaaacggatggaccacaacgatcgccattcttctttactcaccaaggtaggattcggtgctctcacttgcaattccatcttcgccatctacaggtcgcagggtgacctcgcctcggtggccttcgtcgtcgccgcgtacgccgcgctgctgctgctcttctacttcctcggcaagttcgagcgcgcgcgcccggaggagaggggcaaggtgaaggcggctgtgtggtcgctcaccacgctgctcaccgcaatgttcgcgtcaagggtggcgcctctcatgccgccgctcgtcgccgccggcgtctggatcatggcggccgccactgtcgtcggtgggttctgggctttcttccttcatccctgaaattgtattgcagagaccaacagttgtgtgagtttgaaacgtgtattgtaactttggaagcgcatttaagcacattaatgtaagcgatcgaatatgatatacatcctcgttttctttttacttgattttctgctatttctttagccgcagccaattaagccaattttcatgaaaggccataaccaggaaaacaaaaaaaaatataccacccctcacaccccaacaacgccaacacacagactcaggagaaggctagaaacggaccggccgccgctaagcgtgaccgaccgctgctagaccagcaacggaacatagccaagatcgtccaaaacccaacccttacaaccaacacaaaaccccaatctatctaagtctttgggatttagggagagagagtgtgagagagaaaaatggaactcctctccccctaggccctccaacgtggccaacttgcagaagttagggcgccgacacaagaggatatgcttggggggtttcgacaaggggatgcctagacaacctctccaagctgagaagggacgaaacgccgccgctgctgtccgtcaaggtctcaaagagaactgagactgggctttcgcccggcagccacacttgaggggtgagacgacacaataacgtcctcaggacgggaatgacgctcgaacatcatcgttgccctgggttttcacctgtcgtccatcgcctatcgatctaccactgatacaccattgctcgaccgccatctaaaccttcgtcggcgcatgggcaccagtgcaccggcgcccctgtgggccagtctctacgtgcctccgctggcctcccctcctgatgcgcaggccacgaccaccgccgccacgccagtcggcctcgtcgtgccgcaccgacacacgcctcggccacgcctcctcacgccacggccactgaccacgcctcctctcgccatgccggcctccggggctcctccttgcgttgcacggccaccggccacgtctcctcgcgccaccaaccgcgtctcctccgtcgtgccgtccgctagcctcgccggctagccacagccaccatgcctgctgccgaccgcctgctcctccgcgctttccggccacagctatcgtgcctccgcgcctgctggccatagcagccgcgccttccagctcgccgcgaccgcccgtgcctccgccaccgtcctgcctgccgcggccgtcgtgcctgccgccgcctgccaaagcctcctgcgcctccgtcaccgacgccgcgcccgcaccaccgcagcctagatccgacagcggcgacgctagatccagctgcggaggtgctagatctgacggtggcggcgccggatccgccaccatgcgccttgccgccgcacggccttcccggctgccgccggggtttggagcctcaccgccgccatcctggcaggccgcacagtttcaggcaacgtgcttcgacggcggcgagacggggagaggaggggagggtgacggcggccggaggctaggattcgtccctggtggccggtcacccgcacgaggacgacagggagcgttattttttttgtccgtgaactgaagctatataggagagacatttgacattaacagaacatgcccataagcataactcaacttgctggctcaaatacaggaaagtcagtccatcccgcaccaggcccaaagaaaattgtccaacagaaaagtccaaaacgctagtacataggcatcgtttagatccaaggcgcataatcctagcttgacctgacaaagcctagcgtttagaactgtaattgtatcgtagcatttgggggcaagctagcccgaacgggcaaggaaaagcttgctcgcggtggagagccaattcggctcggtccatcgacggcaaaagtaagcccgcaacaacctggtttgtctaaatgagctatagctgaaggtgacaaacaaccaaacgtacccggcggacccctccccggctcccctcccctcgttctcgatcgatccagatcgatcggtgtcggcaaccgccgccccgtgcaatgcgtcgcgcctcttgctccctgcagcctcccctcatcccgcgctctgctccctccatcttgcttcgcgtcgcccgtccagtggtcggcgctcgctgcttgctgctggttcatgccccaggacccaagcagccgtgcggaggcgctgtcctatgccgtgagatgcccactggtcgccgtcggcctcgcgatgagcaacccaggccgagtgcgtccctatccaacatggaggaggaagatgaggtgccgccgtgtaggtgcaacaacctcctgtgatttgttcaaccgttgaatgatgatttagttgttcaacacttgaaaggcttgtgatttgttggtttgatacttagacacagttgcatacttggatttgaactttggttgtataacctgaatctccacaggacggatttcatgctaatttgttggttgatttgaaaggagcgtaatgcaagaatttttcaacacgtgtctaagacactagatcaacttgcggaggatagtaaagaggaaattgctgtctggagggtggctgggattttctcccaatttcgcgagtaatcgccatgactgtctgcggggtttagccctgctttcttttctcgttcttagttggctgggtcctttccttgctaccgtggtatagtaatatcgttgtaacattttactgtattttccctcaaatcttaaaattggttggctattcttttggccgacccggtaaaaaaaaaaacctaaatctccattgcaatcattgcaatcattttggtttggttgtattggctcgcgacctaaacgagctgaccagcgagccgagccgtgctatttcgatatttaccccttagctgatctcttaaatatttttttatttaattaatgtaggcgtcggtccttccgctgactaaccctgaggattagttaatagtactggagtatttgacggggtggttgcgacttgggagtaggattttacggagaaaatggaacaccctgcaatacaagccaaaggaaggcaaggaggagatggttttctcgacgaacatgaagtactcgtaactctctcgccagggagcttccctccccggcccaagcaaggatggaggtgaagccggagctcaatcgatctgcacagggttacacgaggcacttcttggttcttcgatccagctagctttgggatcgatcgtccggtaataagctcctggtatgctcctcttcagtaccccctggccctgtcatgctcctcttcccccctttagttcggattttcgacgccattcctaaatcctgtgacattttcatgaacatgttgtcttccagatggatctccatggttctagctagctatttgtgctttgatgaatcctgattccactatcgtcgtcgtcgtcatcatcatcttttttctattgttggtacatgttcttatatattctggcgcatttcgattcgagtttgtctcctgcgccttcgatgaaatacttacaagtcgatcgaacaacacctgtcatcatggcttacgccaatagctacgtgccgatagagtatagacacatgatgcacgacaggacgacgtgtttccacgtgaaacgtcgtccgcgacaagttaatctagaggcggcgtcgtatttgccgcgtccacacacgcgtggcggtggacaagaacgaattgaactttttctccatccgtctctataaatacacggacacacaaccgcacacggagcttcgctcccaccgtttagcgcatcgatctgcttaattagctgaaccttggattaaccattatttcgacgggccaaaaaccaagaaggcatagaaatccatctctatttcagcccaatataccatatggatatggatcgccacggagccctgaccaagctggggttcggagcactaacattcaactccgcgcttgcaatataccgatcgcggggagacccagccacggtcgcgttcgtggccggcgcgtacgcggccatcgttctgctcttctatttcctcctccggtttgagcgacgacgggatgacagggggaggaccaaggtcgtggtttgggtgctgacgaccctactgaccgcgatgtttgcagcgagggtggctccgcttatgccgccgctcgtcgccttcgttgtctgggtcatggcggctgggacgtcggttgctggattctgggctttttttctcaacctctgagatccaagagcgcactgtagatttgtttacggcacggcctttcttattgttagtggcttgcttatttaagttgcttgtaaccaaaataaatatagactttaggtgggaaaaataaaagaatcatcttgtacttttttgcgggccacaattatagcccattaacttgacgcgtcaccaccaattctctcttccgtggagcatatacgagggtggtttgatctgtcactagaccacgagacgaatttatttagtctaattaatttatcatagcaaatatttatggtagcacaatattatcaaatcaagccaagacaattaatccacaagccaccaagaagaagatcttgacgaccattccgaatacctccgccaagttatttcgttggaattctaatttccaaacaaacaagatttcggataagtaatttaagagaaaaaacctataagaacaaacatacatgtattgttaggtatag

SEQ ID NO: 22430 - DNA, 22099 bp, Oryza sativa
gtaggcaatacaaccagacatgagagtcaggtctctaattaagacaatactgtgcatggactccgtgtagtcacatccatagaccttataaccatacccacggaagaccgtgcactgtattgtcttaatcagagaacttactctcaggtctggttgcattgcctactatacctaacaatgcatgtatgtttttgttcttaggatttttctcttaaattacttatccaatctataatccgattacactattatgcacgttgcaattaaatatttacaacaagatcttacatgattatatttttgattaaaaaatatctatgttgtaaattactattgttaatatgtaagttacttttatcatatatataaattacttttagatttgattaaattacttcttacacattaatagtgctttgagttgtttgatttattattatttttaagtcaattccataatttgtactaattaaatttaatttttagatagactcatgtttttacccccacaacgaatttacttctaatgtcgtgataagttactttctttttgttttaagttacttctataatatatgtacattacttttaggatttattaaatttacttttatatgtcaaagaagtaatttaatggaatctaaaagtaatttagatatattataaaagtaatttgtattttttatcaaaaatatagtcatgtgagatcttgttataaagatttaattgttatgagcacaacggtgtaatcgaatcgtaaatccgatgagtaatttaagagaaaattttatttgaagtataggtgatagaaatatatttctctacttacatgttggactagtaggatcgctgtgcgtcgctggatagagcaaaatcgagagcgcgcacgatttactctcaaaatagggcttaaatttatataaaaatccccgtgtttctgtgtagacatacttctcgagataacactcaaccacacaacaggtatatttcttactattataaagatgtttatcgacgacaaacaccatcaaacaccaacttatggcgtattatgatttttatattaattgttcatgttgggttccatttaacaatatatttccttacatatatctatattattgatttgatgtcctcatagtaggtttataaaaaaggaataagtttactttgggttcctctatttgtcgcccagtccaatttttatcccttgaccgtaaaaccgggtacgacccgtcctccaacttatgaaaaccgggcgaacgaggtcccacggcagttttaaaggcggttttggctgacgtggcgcctacgtgacttgtttgactaggtctccgtcccacgtggcattgacgtggcgtttacgtggcaattatatctcggaaaaataataaaaagcgtggccccagatgtcagctgcacacaaaaaaataattttaaaatggagggggccacgtggccccgcatgtcagcctgactcctcacttcttccctctcccttctctctcttcttccctttcccctctctctctctccttcttctcgggcagcggacggcgcgggtgggcggtggcgggcgtggtcggcggccacccaacggcccctgccggcgacctcctcggtgtgttcgggccttcggggacctccttggcaacgggatcttcaacttcgacggggagacgtgggtggcgcagcataagactacggccgggcgtgcgcccccgattctctcccaccggccgccgcgcgccgctccctaccaccggtccccgcgcgccgccgctcctctcccgccctcccgccggtcgccgaccctcacgcaccgccgctcctctccctccttcctgccggccggcgcacgccgccgctcctctcccgtcggccggtccgacgagctcacctccttcctcgcagagctcccgtcggccgccgtctccgccggcgcgacgcttgcgtcggtcgctctgtccgccggtacaagcaaacgaagaaaaggaatgcaaaagaaaacaaaaggatagatagaggagagggcgtccagcacgtcgaccagcatcaaggcgcgcaagctcgagctcgcagccggaagcggcaagagcgacgcgtcgtcgccggcggcggtgtccatgccgttgtgctgctccgctgctagcagctagtagctagccgcgcgtccctatgtcctccctcctgtgtagttccgtcgtcatcgacacaggctgccgcctcgccgcgagctatgcccccgttttgagttcgcaacatgcgacaagcaccaagaaagtcagcaaaatgccagcaggaagaggatgctaagatctcgatgtaattaaccgctaactaattttgcttgcaggccggtggagccgagcaggcggcggcgcgcgaagacgataggaggagcagagcgggcggcggcgcgcggagcctataggaggaggttgagcagcggccggcccgcggagcaagatgggcagcggccgaagcgggctacaagctcgccgtgatgaggaagaagaggcagagccgagtggggagagggggatgacatgtggggcccacgtgggccccaccttattttttaagcatatatgtgggccccaccatttttagattaattattttttatgcggctgacatgtgggctcatgatttttattattttttcgagatataattgccacgtaagcgccacgtcaatgctacttaggacagagaaatagttaaacaagccatgtaggtaccacgtcagccaaaaccgcctttaaaaccaccgagagatctcggttgcctggtttttgtaagttggggacgggtcgtacccggttttacggtcaagggaggaaaatcggactgggcaacaaatagagggatccaaagtgaacttattccacgatgtctataccacacacgctgcttatttaaccatcacaatctgttatccgaagttaaccgcttccacgtcgactcgaacgtggtggcatcatgcatgtcaccttgtcattgagcaggagattttttttaatggttattagtgttgatctttccctgtttcaagatattttattttagcatttttatttgatccacccaagctttatctttgaaacagtcaatgcattaaatttttgagaaagcggatgaaaaattcatttggagtttgagaatgcaaacgaagggcactaaatgcatccttatgtagtttgagatagtgaaagttttgtttcgtattggcatgtgtgaaatatgttaaaaatggagtcttttagaatgcaggcagtaaattttattaataactatgtgaaatcttgcgcattgctgcgagtgctgcgggtttactataataacaataagcaaaaatattgtataagatagcttaaataacataagcttacatttacataagttgatgtgatttaaatttaaattgtatgtagaatgatgattcaaatgtaaaagtaagatgatatggcttgataagagaataaaagaaggaagataatttagactatatatctaagggtgaaaaaaattaagataacatggcttaatgagataaaagaaaaataacatgaactaaactaagtgaggatgaactgtatatagttatataggatatcataaaaaaatgatatagagatatattaaaatattatgtgaattatgtgggatgatttgacatgcttacattttaattctctaaaatttaataattattaaattgtagataatatagcatgtttgtattatgtttagattattagtgtattataatgtgacatctttgcatgtctatagattcttttgccacgagtttgacagtctggctcatctaatgcaaacagtattggcccatgaaagccaattgtaggaagcaaaggaagatcggttttggatttatcaagacaagaagtaagataattttgaagcatgagttctcatactccaaaactgggagacatgtgttaacaccaaaatttagtaagcccgaagtcatcattggcctagagttagtatcggcttcagagtcttggaatcggctgatgggagtcgtcaagtcactagcagttgtgttttttgtggaatcggatcaattaaaggaaatttatccaaaagagtctgagttcaaggaggatgcggcatggcaagtgtatctattaattaggaatagtttgttagttcattttatctttaggaaagtgtgtttagtgtccataaggactttatgttttccttttatctttaggaaattttctttcttgtcctagaaggactagtatctccctatgggtataaatatatacacccggggtcattgtaaaatatctcaacaatcaatacaactactctcgacgcatcgccaccctctttaccgaggtttttacttatcatccggcggaacttggcacctgacgcggggccacatcggttcagttcgatctccggtgaaggggtaagtcctacgttccgccggccctggcaattgtattggcttcatcggcgtcgttcaaggctgcatcagtacattcaaactcttggattgctctggttcggttgatatatttgcctacctatcatatgcctctgttaatttaatcttagcatatcgatttagctctatcggctgcttctcgctttagggtttctgtcagtatcggctaaatcgtgttgctatattagattagcttagacatccaccaccctgaaaatcagtcaacggcttgattgtctagatattatgtttctttttcatacttagtgttgcatcagttaagtttgatctattaagtcatgtttagaaccataatctctagcctgcttctttgactgctaaaaaatgttccatcagggtttcagccgatgaggtatctagacgttgcatcggcttacaaagattacgtataagtaggatttagccgatcgcaacaaggtttcactgtttatctaatcttgtggattttatgacattggacctcccaccgatgtatgctttaaccttcatatcagtgcttattctattatatcattgctagccgactggtttctactagatattattatttttatattgattatcatcagccgattgtctttatatcattatctacattgaatatatagacgattgctcaaaaccctatcgacatcggctggaatcgacatctgctagtatcggctatcagctggaattacttcatcggcttgtcaaccgatcggctatttgatctattgtttacgtatcttgtcaattgcaggatcaaactaattggcacactcgcacctcactaagatttggacctgcactggagctaagtagatctcctaggccagtgtgtttttcgcatcaacaggtggcagctcgttgctgatggtagccaagaaaggaccaacctagtccaatatgaaacatattgtaagaatacttggtcacaagtgaaagcatgaggcagaccaggggcggatctacagtagaagggccagtgtcaggtgacaccaacgattttcggtaaaacctatagtgaaactgtttatccatatgctataacacaatgatctaagcataattagcatactataacatcgatagacacgttctgacactaacgaatcgattttctggatccgccactgaggtagaccctggttcataatacaagttgggtaaaataaccttggccaaagtgcaattcactcaattagttataaagaccaatcgttctcgatcgttggaaacagttttagagagaacagaaaaaatatttttttcactgtaaataagggggaaagggaaaaaggaaacaccaggcttagatccaggggcgtcctcgggcccgtgcgggctgtgcgactgaatggggcccccaaattttaaaggcccctaaaatattaagtatgtcctatatatgataatattatagactttaattttattaatttgcagtccaaatagtagtaaaacaaagcccaaaacgctgcagaaggtgaaccgatcaatcttccatgtactcccgtccaggcgtccgcgtcatcgcgtatcgccgaagtcccgacgccgcagctcgcttcgtctcctctccctagtcccctctagccttcgtttctacttcatcgctgatgatcggctgatcgccacacccgtttttaattttactataataaatatactaggctactagactctattttaatattttgcacggggacccgatttgggcggtatataccttacttcacgtgcactccaggtaagtaattaaacggtcaaatttcttcggcgataagctacgtgcctatatatagcccatcagtcagcagtgcgctctgcttacccggctgatggacgaacggaacgccgccgccgctgccgggctcgttcgcgcgggtctcctcgttctcaccctcacctccggcgcagcgatctaccgggcagccggcgacgccggcgcgatcgctttcgtggcgaccagctacgccacgcttctcctcctcttccgttaccttcgcgcctacgagcttgcggccgccgcggagagagaggggctcaggcgcaaggtgtggtatatttgcaccgtcgttaccacgctgttcgcctggaaggttgccggcgtgatgcctccggccgccgccgccgccgtctggctcctcgccgtcgccacctccgccggtggcttcgtcgtcctgttccaccaccgccgccgtccatgattagtttagtactgtacgtggcgtatcagtccagtgttgctacatatacgtacgtacggatcgacttcacccttgcgttgcatattcattcgattgacgattggctgtgaatttgtaattgggagtatacatgcatcgaaagaatttcaggaacaggtatttaatttcatttctgaatatataatttattcattattttatttcttaagaaagcatggactaatggttaattatacatttgtactctctctgcaggttatgtacttatgggaagatcgttatatgtatatgtcttctgaatttctgatcgattggatttctctagctggctagctgaaatggtattgtagatcttggagctttcaagcaccaagcctgtctcatctttggatcaaattaatggctcattgctgttgttattgctgttttcaaaggattgaataatttttgtggggcaatttgttggaggttttgctcgtcacgttatttgctacccattttcccatttatcgagtaaattagtactccaggaaacaaagtcacacggaaaatctcggtgacatatatatatatatatatatatatatatatatgtgaaatttagtccatttatagtatattaaaaatatagaagtaaaatattgtacttagaactagtcatgaaaattttctcttgattgaaaggattgttggctacgcatggagtttggtctccgattaaacaatgtttctaccggaagtcatcaaatattctattgaaactttgaaagtcgtggcaaatttccaatgtcctattgtaagtcatcacaaatttctattggaagtcataaaaataaatctattgaaagttatctaagattttgtttcttactgaaattcaatttcctaactatatcatgaatacgaacgatgcacgcgcaagaggaaccaaaacgttttaggcatagattttgttccacgcacgctcgctatctaggcatagatttatacacatttctttttttttaatacaagttagacggggctcctgatgcatgaagcggcgcgagcatcatgcgagtacgaacgacagacgctaaacatgttcactcctacggcctcaatgcttatcagccaaaatttaaattttcaatcttaaattttaagttgattttagagttttttatcgaagtttatttttcaacttttgcttttacatcataaaaaataagaacacgtatataaaatttttattcataaattattttttatttataaatataccgtttcgcttatttctcgaataagcgaacgatggggttctagcctattggaaccgcatccacgcaaacattcgcaatttaggaatattgctcacacccacctatgtgtgtgaagttaagacttaaaacgtagatcttcagattacgaccatgaaaaatatgagcatccttgctttgtttaaaacttatttccgttaattaataagtaggttaagaacaccgaatcttacaaacggaattacatataattctgttagtggtatatgagcttttataaggaaaatcaaaggaatcattctgagtgatgccatttcaaaccataccatttttttttgggtaaagttgataaagatgtgcatatatttagtttcttgccaaattttgacaaatacataagaaataatttactaaaattttggtaatattatcaatttacctaaattaatttactaaaattttggtattgctaaaatttggtaaggttcattttggttacaatctaaacagctaaacaattttatgcacaatacgccattatatgtgagagttgttgagaaaccagtctactctattgatcagcacacaagcagacaaacacagagttatggaacacagaaaatatgagcaagtggaagctttatttcttctggatttgagtacaagctataagaggagaaacaggagaccgaagatcggttgtcctcgccttggaccttctgggccctatttataggcggaggagggtagaggcttgcatcgtaagccttgaaccttctggcttgcgtcgtaagccggcttacgtcgtaagctggcttctcctgtaagctggcctacgccgtaagctggcttcttctgtaagctggcttctggcgtaagctttcttctgtagtaagctttccactgataatttaatttgtcgataataaaataggtttgataactagagtgaccattcctacattagttcttctagtagcttataggttcgcatatcacagtgtcacacggccaggagcaggcgctcccaaattgtggaccaaaaaagaaagcctggatagagaggcggagcccaaaaactctccaacaatccgggcggcccggaaacccccagatctttccgctcctcctcctcgtcgtcgtcttcctcctctttcctcctcctccccgtctctccctctccgcttctctctcccaccaaccccccgcccccacccatggcgctcgcatccggcacgtcctgcgccctccccggcgccgcgcgcccccacctcgccgtgtccccctctccgcccgcctcctcgatccgtttctgcagaggcggctcccgcggaggcagggccgtcgtctccctccgcgcctccgtgcctccaggtagttcggtcaacggtgatgatttgtttctgcgcatgtagttagagagaatagaggggctagctctctctttttttttgtgcttaatttgagttttggagacctgaaaaatggggatggattcgtccgtactatgaggaatattggatggtactagtagcaaatagcagtggcatagcaatagatcgttgatatcgataaggctgtggccgaattcatacgggtctattcggattggaggagtttcacgggagttttggaggaacttaaaatgtttcttgtgaaaatactgtaaaattccagcgttccaaaacactaggaagggtactttccatttaggaataggtttttagtatgcttgatgcagtggctttgaggattactgattgcttaatcgatgacatgcctggtagttaggcattaaagtccttgtttaatccagttctggacatacatcccagctcatgttgctttttctcactcgggcactatgttctgtacatgacaattttgttcccattaattggtactggacctaactatggtttacaaatagttcatccccgtccaagttaaatgttacatatccttgtataagacattatcatgtttcctggtagggaacaatatttctgtgtgcaatttgcattatcaggggatcttatagaagcaattatttgtacactaatttgatcatagctgcgtataatcatgtgttatgtacactaatttgatatgcctatccctacatatggttacaaatttaaagatactcgtacttgggtcactcttgtacaatttgaaactagcgtgatatattcaacatgttggtcaaagtatggcaaattgtaacaccctttattcaggcacgcccatctgccctgtacttatgagcgggtaacactgatcagggtaacctgttaagattaaatgtctacaggctaaattctgtgatttcttgtcaagtatagaaataattaaacagtggagtaaatttaagataatgtcttccggagttaaaccattgattgctttttgcagcagcagcggcagcaacaacatctggtagcattgcacctgcaatttcattgactgaaaaggctttgaagcatctgaataaaatgagggctgaacggaatgaagatctctgtttgagaattggagttaggcaaggtggatgttctggcatgtcttacaccatggagtttgaagatcgatccaatgccagccctgatgattcagttgtagaatatgatggctttgcaataggtaaatttatccaactgactgttacaattaagttcacaaatctcaagtgtcagcagtcagcttgacatgcactacttttcgacctctttataacactcaagtaacgtctaatgtgaacttgtccatgcatgactaaactgatatcaattagctatcttgtttagtttcaacggctttgataataggtcacatgagcttactttcagaatctatttatggctcttcatgcgcaaagtaatctgattttatttatcgtttgttttactggatttcactcaagtgatcttttttccattctgcagtctgcgacccgaagagccttcttttcatgtttggaatggagctggactacagtgacgcccttatcggtggtggattcgccttccagaacccaaatgcaacaaagacatgtgggtgtggcaaatctttcgccaccggaaaagaaacagagagcacagcaacagcctgcaacaactaagctagaaacatataggtggaaatgccatatatatagctcacccttggcaaaatgttctatggatataccacagatgaatactcgaaactcagaagtgtaacgattttcattacagtttgtgtgtatcactgtatccaattggacaaattactgctcgatagaattcaaagatagttaccatgaactccagattttgtctatgatgctgctcatgttgttgttgatcaacaaattcatttcatgtcctcaacatatgtcttcaggaccaagctccagttgcaacttgcaactactagcatatggtagcaagggttaattgccaaatcaatctggtccgttggatttccatcggacggcacaggcagacggaaatcccgtttcaccagccgttatccgagcaagcgacgccactacacctctcgaccacgtcttccctcccccgcggcgaagcaatggcgacctcgtcgccgccgtgcgcttgcgctgctcctctcctccgccgccgcctcctccccgctccgccccgcgcgccctcccccgcggcgccacctcgcctgcgcctgcccctccgccgctcgccgccccccgcgcgcgccaagttcggcaagttcgaggcctccgacgccgcccccacggaggcctccgccgaggaggcggaatcggcggcggcggcgggtgatggggcggcggaacagaaagcggaggaggacgacaggtcagggtcactcccacctcttgccgagctcgtgaacaatcgtcgcatcgtgatgcgtctgtatgtgtgctaccttgcgttgtgtgtatcagctgcttgccgtcggacttggagggcgcgatatggcaatcggggaaggcgagcgccgatttcgtcaactctggtggcatgcgagccattgtatgttgctcattgttcatctgctgttcttactgtcttacactgtttcagtttaaccttacctgtcacaaaagttgtgctgttttcacctggaagttggaatggcatggagtcacttcatgtgtgtatgagtgtatccaagatgttaaatgttctaattttgttttgatcatgcaaccttgtcatgtacttatcattgataatttgtatttggttatactgactgtaggcagagctactgatccctcagttggaattcctcaacgaggaaggagcacaggctgaggtctgggcactgtcaaggatattcctggacacacttgtaaaagagacaggccaggtttggatgcaaggtcgtttagcaatagatgcactttttgctctttcttgacagtttacagttcaatggacctagctctgatttacccctgattcggcagattactgcatgattcttaacgtatcactttggagatgcagaatttcttgtccatgtagattaaatatttggcctgttgcccctatactgattgaattcttgtttacagaaagttaaggccatttttcctgatgctggagcagcggcccttcttaagtatcagtggacagatgcagagtttaagtgcgccaggtgggtattggttcacttacattaatctatgcagaaaagggagatggctaatggtttgcataatactaatgtgatttttttgtcatgatttcttgtattcatgttacttcctagcagtatttacacagaagaacaattatttttttcgtggttaaaacttatccagtttggtacaaaatcctagcagcgaataccacgtaatcacagaaaggatgtagaccattttgtgttactaggaaaaataaaactgtaggttatttctagattagggcatcaaatactactcagaaatgaaaaatcattagttttctactgatattcgaaataaaccaatagcacaaacatccttggttttcatcgtgagaatattccttttttcctctctgtataacagtatatcatttcctttgaatgctcccagtcttaatgcattgactcttaagtatttttttcctctgttatattttcacaatttatagactttttgctcgttaagtttagttggcattaaatttattctgcttaatttttgtgtaaatataaattctatctaatatttaacttgaatttcagcttaagtgaccggaaaccagttgacgttgaagatgaagttgttgttatgattatccctgatcatcagatggtggaatctgttgaacggattgcatctcaactctctgatgatcctgtatgtaacttatacctgatcaatttcaaatattttcaaataaacttgcatagttcatattaaaaataaaatgaaatttcaattgacgtgccaacagccaaacaaagttggtaaggcattgcttgtataattgcaggatcttactgcatttgcataagcaagctagcataaacctacgttcttggccatcacggcatcacatgaaagtgctgatgtagaattctatgctcaaagacatccagcctgttcaatgcactgaagtttctttcaatctactatccttttaaatctgtctattttgaccattatcttcttcatgctactattactgtttgcatgcaaatcccatttcagtatgatatcctaaaatattaccacttttaattcaatgaagataagacctcttgtcatgtggaatccacgccttgttagtggagatgttggagttggctttaatgttcgaaatctgcgccggaatttcctaaggtaagttagtcagatcatctggtccttgttggctttcctaaacatgtaggagtacatagctattcttgctggcatcacaatataaaacttggccaatgggggaaagacaccctccacggtatttcactaagggtgtgtttagttcacacaaaaattggaagtttgattgaaattggaatgatgtgatggaaaagttggaagtttgtgtgtgtaggaaagttttgatgtgatggaaaagttgaaagtttgaagaaaaattttggaactaaactcggcctaagaagagctcaatcggagcccagccaagaaaggtcaccaaagctagtccccctcatacatggggatgccgcctcctatggttcgggccttaagccatgctttgaggcccagcccttacacaagggcctaaccaacttgtcccgttttccagtgctaatattgttctttactacaagtttcattgacctatttcatgtttagttccttctgtacgtagtgtttcacctatctcttgctaattttcattcccaactttgcagcacttttaccactgtttactcgatgagaccgttgccaactggtgcagtctttcgacaatatccggggtttgtagataattattaacttacttatttgtatatgatcaaaatatgtaagtagtgtaataatgcgctaaaggcttatctgtgtttgttcatgttacagaaagtggaaagtattctatgatgacccaaagaggcctaaccggtatttgcttgcccgagaacttgtaagccgacctgatgcaacagacattgaggttaggcactggagttatatattatttatttatttttgttactattaatctgtatttgtgttgagttgagtatatgctcactccccaaaaaatggctagccaaagcatgaaacagcatttagaaactactagaagcatccaacagtcaactcatttctcaatctctagacatcaaggtgactgcacacaaattaggcagtcaaactaccggacactcaattcaagccagaaaacctctgttttttttttataaaaataactatttgttgcttgtcactaggcaaatgctaaaccactttcccataaagacaacatttaaaataagaagcattgttgcaatttgcagataatatttggaggcggcgatgaacaatctgacgaggcaccatcattgatgaacaatgtaatgggcgtatttagttccgtgagccggtttatgagagtaatctccaagtgaaagtctcaaccaagccgttgatgagaatctttttggccatgatccacatcatcagcgatgctgttaatctgcaactccatgggttactagctgctactgtctactagcaagcgatgtctagttcacgttgcaggacgtgtacaagctaccaagatgtgtacttgcacgattgtattgtagattcctgcatctatgaatgatcctaaacaatgttagctcctatataacatttctgtagatagttacatatccttctgtttctgcaaataatgaagatctgaattgtactttctgagtcacttatttgtccatgtatcatatgttcattcatctttggctaactcaaaaaaaagggaggggaggaaaacacaattacatgttgtttacagttaatcaaaacaattcctgtatcctatatagtcaagatgattccctcttatgacacacactaatcaacattgtgacacaagtatatattgcccctgcatatctacaccaaattgtgatcaaatcccaaaaatgttccaatggattcaaatgatgagcataagtatatgtatatcttcagctaattaattaatgtgcttgctctctgttcgccacaggagacgtcgacgcactcgtcgtcgatcctgataaccccagcgatggctgcaagaacatctggctgctcgagctcgccgccgccgccgccgccgtcgacagcgacgagtgggtcagcccgagcccgaggtgctccccccacttgagcccgaccttgctgtcctctcctcccgacgccggcggcgagcccttcttgccgacgtacgacgtgatggcggccgccagcgccgtgtggaagctcgggtccgccgtgatcgccttcgcgatcgtgtcggtgatcacgctcggcggcggcggcgccgccgccgccgccttctgctgcatctggtagagcggcggcgccgagccgccaccgccgccgccgccctgctgcctgcttccgttgatgctgctcagcgcagcctcgaacgacgacgagctcttgccgccgccggcgttgtacgggtgagcggatagcgacgccccgtagctcaagtaccccggccatggcgcgctactcgggccggagccggagaaggtgaagccggtggaagggtacctggtgtgcgagaacctgttactgagggagaaggcggcgtgggaggaggtggcggcggcggccggcgaggtgaggtcgagggtgatggtggggtaggaaggggtggaggtgatggcggcggcggcggcggtcgggaggaagaacgggcggccgccgatgaggggcggcttggaggaggcgtcgaatgcgagggccggcgacgcggcggcggcggggtaggcggcgagagaggtggaggaggagccggagatgagcatggaggcggcggcggaggtggtggaggccatggcggtggcggagacggagagcgggtggttgtgcgtgccctcgtaggtggtgatgaggatggacatgtcatccgcgcatcgctgcacctgcaaaaaacgtgcatggtgagcaccaaacaatttctcaaaatttttcaagaaagtttcacgagtatttgtattgaacttttacaagtaaatgtgcaacaactcaaaatctaaaggcagctttgataattgttccactttactatttttcttttagcgattacatggaaaactcaagtgcactcacacaccaccatacgtgcgcaccatactcacactctcacgaatgtgctccattaacatatactcaaacacatgaagaccaatagtaaatccttacccccactcaattgcttattgaaaacgtgtatgtaatgttcttttttggctagtccaaactatatattttttgaagctatagtatagactatagtaaaagttgtcgacttttgctgcagcatgcatcgttggcaccgatgttttttttattagcttttgatcaatccttttattttagaccgggtaaacttgcattcgtttcaatttggaccacccgactatctcctcaagcatatgaacaatctcaaatacatcggcactacttgtcaatgaactcccatagctatatgtgagaccatttctttgggatatgccaagttgaatgtaaatgaataaaacaaaattgagggtggtccaaagtgtcacaaaggtaaaagtacctgatttaaagtgaaaatattggttaaatggtaaccaaagtgaaatttactcatttaagtaattggtggacagattggcttgagatttgtttacatgttcaaatttaaacggtttcagactttcggggtatcttactgaagcttgtcactaatttccttttaaaaaaacttatcactaaaaagggtgaatagccaaagtggtcctccaagtttcatccaaggctcagtttagtgcttgatgtttcaatctatccatattagtccttcaagttttcattttagttcaaacttatccttgaaccaacaactctcttcataaatgacacttatacccctcatcattcacatatataagagaaaaattgcatgcttgaattttttatagataatacatagtatattatgtaaaacaaaaaaaaatatgtactaacaaatgtatacgatagcaattgcttaagtttcatgtgcacatgttgaaataatgggaagtacatctgtaatgttgtttattcatgttgactttctcttttatagtatatagatgtatacaaattaagggaaaaaaagaatattttcgaatagaaatattgactagaaatagcatatggcatattaagtggacccaaggatgatttcaagccaaaacaaatatttgaaggacctatgtggacaaaatgaaacgtgaaggaccaaattaagccttcgctgaaacttgagggactaaattagctactcaccccactaaaaaaattgggactatttgcaagagagaaatttgaaaggcacctatataagggcccaccaagttatcaaagaaagcccagtaacctaatctgtacggttgggccaaaccagtttgattcgaccaatgaaaaacccggccgcttgcgcgcgccgccgccgggaaaggcggaaatggcggggcggcggagggagcgaaccctacctcgaggcgccaccggcggccggcgatcaacacctctcctcctccacggcatggagtggtggcgcctcgctgcgtcagcctcgccggagtgcgcggcggcgcgtaggcgtagcagttcaggcttcgccctaactctggatcccaaatcccccatgcgggcgtctctccctccaccaatcaggtcaggctccgatcccccattcgcttgtgctctcctggtttctaatgtctggttgcttttagcctagtgctcgattacttgatctagcggattttttggaccaatttggtggcttggatcatatttatggggtgaattcgtaatactcaagcgattaataacttaattagctcgtgtactaccaattggcaaaattcggtggtggataaacagagtactctgaaaccaatagttggatttgattcggaaattgagaccatcaggactcatgacttgttaattgttagttggtccatttctaccaatcaaatatggttcaaactgaatgtaatttggttcaactactgtgcccagacctacatatgtgctgatctatcccattgggtgtagtctctttgttagtttgggaacttggattcaatccattcctttcccgcaagtcaattttttcggtgagtgaatttaaaaggagttgcaatgttgaacagaaagatgcgtaccactgtagctttaaagacatatgccaagttgatttgatcattatggtttgatttattatagatggtacataatgcattatatatacctgcttcctgactgggcatcctgctgccacggtgcaccggtagtaggcgcgcgggcacgggttccccttcgcaatcttctgcccatactttctccactggcatccatcattcatctgcacaaccatacaaatttaatcacaaatttttccatcatatctcgtttattttaccattaccttagcatattctattagaatttagcaagagagaacattttccaacataaatacttatactagctgtatatacaattattctcgtaccgttggcgcatcacatctcgctctcactgaaaccctagccttcttgacctgtggctgaggagctatgtcatcctcggcttccgcgccgacgctcctcaaattcttcagcattttgcttggtggccattgctctgtggtctctgcggtgtcatccctagcatcctcaaagctgccttcagggctcaacgtcatcacatccggctgtaccttctcactgttattagcatcaactctgcagtctgataatccaagagagagacctcctttgatcttcagaaaatcttcagtactccctttgacttcgctactggtggtactcttgtcttccttcttgcatttgctcgtgctcgttccaagtctcagagagacgagttcaggctcctcgatgtcggtggccggagagtctgggagcttcttagctcggccttgctgaagaacgtcatagaagtgcgtctgaagagatctatagtcgtgtgagatgcgcgacagcaacgtcttgagcctctcgttctcttctcgtacttcacccatttctgcccttgttgattcaagcttatcatcctgaccctgaagccataatagtgcaacaaaatgtattagccatatttgaaacaattacatatgataatggtcacttgtcttgtgaacgacatagctaggttgatagaaaaagacattggtataactatgatgcatgctatgcatcctgaccttattttgagctttcatgtttagcaatgatgagtccatacatgatctttctattgggcctggtgaacacacctagaaaaataaactgatggtaagaatagtctagaagaaaaggtaaagtgtgtgtatgaacttaaagaaactagttggttttatgacaattccaatgagtaattttaggacaagaaaattagacgttaaagtttacactgctgcttcttaattatgaagtaaaaagaggcagagaaaatggtagaaattgattaatgaattgatgggtgggtcagagtagaggtacctcctcctttgtgcttgatatgttttgcaaggacttgaaaaaattgccatctgaaattttatcgccatcttttataacctgcaatatatcatagaattgaagatactatatatcagtagagatcaagacaatacacaaatatattcaggctagctacagagaatctataaattaactttccttccagttcatatatatattatccatgatttatcagtgctatctatgtacgcataagaaccagtggttctcaatttttttaagaaattgatgaacaccgcatttcaaaaaaggaaaaatcgatgaaacctgattaatttggaccaaagaactgcatctctgaaaaaaaaaatccctattccacgaactaagaacaagaaccctgaagagaaaactctactagtcctagttgtacttacccaaataaatgatccaacttttggaagaaaggttagaagtttatttttagataaaggaagcgtaaccttttctagaaagataagaaatacatatatagttcagatagaaaagagatccatacctcgtcttttaaccgatcttcatgggttccaagctgcctctctcccttgatcatctcctctttcatgtacatagaagctagctgctttgagtctcccttgatcatctcctctttcatgtactgagaagctagctgctttgagcagcacagctacctctcctcttcttctcaagttcttgtctgccttcagctccttctcttcttccttttgttcctgcaccagtattatggcttaattataaaggcaagccatgtcctcttccgtctcctctttggacttttgcataaattaagttgtaaccttgtgcttacctatgttaggcggtcagcatcctaaatgtcaaacacggccgcactcttgggtgacttgtgtggagaggaaaaaaaaaagagcacaggcgactgagatttatgtggatttcaacgtgtgtaacatgttgctgttttgttgaagggctgattctaagatgtgtgtccagactgcgtacgtctggccggaatatgatctaatagcacgtccaccgttaatgtccgtacgaagcttcctgcaagtctttgccatggccgactattataggaccatgtgttcaagtaattgattgattttgaaatttcagctggactttaggacgatagctaggtccttgtatgatgatcatagtcccctgataaagatggaggggcagctcgagtactagtataatattttaggaaaaatgcttgcacaccatgactggccaatttaatgaacattcacattctgatgacatgctagctagctagttttcagaaaaattggggaaatttgctaacaaattctggttctcatgtctgagttagatcaatgacagcttgtccgtattggtaaattagaggaccacacacatcttaattttatccgaattgattggtgagagtagaggaccacatgcgtctctctcataagtaagaatttatcttgagtgcaaactccacttcattcaacgggctatagtaacatgcatgcatgatactataagttcctagagtagtatctagacttgatcatatatgtcgactagcaatattccaagactttgaaattgaatgccacatcatgatcactccttattcaatctgtatatatagtttgattgattctttgaaaacaaagaatacgtatggtgtttttggaccaggcaactaattggtctggaaatgtgaattgagtatagacagtaggtgccgtttcgagttgtaaccaaacagtctggtgtgctcagacgaaccaaatatgtcaacatcgaatttcagcacaaatttggcaagtgagattgcttggcagagaagcagactggcaaatccagcatactttcga

SEQ ID NO: 22431 - DNA, 1137 bp, Oryza sativa
gtacccacgaattcagaacctcagagtccgcacatcctcaaatacaaagcacttccctagttagatgtaggttagacttcccgttcgagaaactctaccttctacctgccctcaatttatgcacgattaatgaatgccacctgggtggaagcgagaggtggaaatggaaggtcttagttcggaggtgggatctctacctgatagttgcattgccattcatgatgatcccctggcattcgtccattcagccattcaccattcacccattcaactggaattttggttgaatgccggaattgtgtccacaaattgtggatggatagttggttggctggctggatggctggctggatggctggctggatggatggtgaatggctggcggcggttcggttgctttgaagcatttgttgctatctaaattccatttaaggtcgtaccttatcgcccagcatcatcttattctctatttgtattccctccatctttcagatacggatgtagccttggatgtgcccgtgcccaatgaagaggaagagcgcaacatgaaacgtaagtacaaaagtaccggacacccacccagatcccaatagaatccgccaaatcctgcgggaaattgtaatcccattcaccagctcctacatttaattaacaagagaactattgtatttatctaacacctggattatctccacctttcatttgatccctatttatagattacgctgcgttgctaacgggccgcacctcctatttcctcaagggtgaggaaatgaagtccatgtacaccacctacaatccgcagaatgtggtggccaccgcccgtttcctgttccacaagaagaatctatactactccttctacacctcatcgcgaatcggtcgtccgcgtgccattcaattcgttgatgatgcgggtgtaatcctggaggagcatcaactggagaccaccttggcgggcactctcagtgtctatcagaatgccacgggcaagatctgcggtgtctggcgacgagttccacgtgattacaagcgcatcctgcgcgacgatcgtctccatgttgtcctcctctggggcaacaaacagcaggccgagttggctctggccggaaaggtggccaaatacacgcgcctgca

SEQ ID NO: 22432 - DNA, 767 bp, Oryza sativa
cacaaagctcagcaaacaatcctttcaaccaaactgattctttacatgcttcagcaatagccatgtattctgcttcagtggtagactaggcaacaacaggctgcaatgttgccttccaactcacagcacaactactaatggtaaacacataacctgtgagtgaccttctcttatccaaatctgcagcaaaatcagaatccacatatccaacaagccccttatcagtcctgccaaacttcaagcaagcatcagctgtacctctgagcctgaaaatccactgaacagctttccagtgttctttactaggattcgccatgtatctactaaccaaactcatagcatgagataaatctggacgggaacaaaccatggcataaatcaaagaaccaacagcactagaatatggaactctagacatgtattatacatcctcatcagtactagcacattgtaaagctgataatttaaaatgaggtgcaataggagtactaacaggctttgcatcatgcatgttaaaacgctgaagaaccttcttaatgtagctttgctgactaataaataacaaaccagaatttctgtctctagtgatttccatacctagaattttcttagcagcaccaagatccttcatatcaaactcactactcaactgtttcttcaatgtagtgatttgttccttgctcttggcagcaatcggcatatcatcaacatataacagcaagtatataggtgatccattaacaaatttaatatacacacagctatca

SEQ ID NO: 22433 - DNA, 2061 bp, Oryza sativa
ataatggtaagcatataatgagcaccaccaagagagggcttacgagaaggcccccacaaatcagcatgtacataatcaagtatacctttggtgcgatgaactgaggtattgaattttaccctcttgtgcttaccaaaaacacagtactcacagaacttcatgttaccctgagtgcagccatccagcaggttcctcttcatcaattctgccataccaagttcactcatatgtccaagacgcatatgccacaggttagtcttactaggttcatctttagaaacaacagcagcggtaacagaaccatgtaatgtacttcctctaaggacatataagtttgcagaattcatatcaccaatcatgtaaacaagagaacctttcgatacctttacaactccacctgaaccggagtatttgtatccttctgcatcaagtgtgctgagagagatgagatttctcgccatccctggtatgtgtctcacatctttcagcgtacgtgtcatgccatcatgagtcttgatctgaacggagccaatgcccacgatctcacgtgggttatcatctcccatgcgcacaacatctccattctgcacagacttgtaagaactaaaccaatctctgttaatgcagatatgaaacgaacatgcagtatcaagtatccattcatcatgactagcaacacaaccagcaaaaacaacaagacaatctcctgaatcagagttttcagcactagtaacaacagaggccttaccatcagatttccttttctccttattctgcagcttccaacattcttcaatgaagtgatttttctttttgcaatacttacagaactttttacctctggatttagaacggcctctactctgactcttgtcacgatcattgctgacgttgtaggttttctgctcagatctgcctctgacctgcaatgcttcgcccttagaggacgacgcatcagactaaaccatacctttcatcttctccctgttttggagcgcctcataaacttccgctagggttagttcatcacggcttaaaagtatggtgtcacgaaaatttgcatatgaactaggcagtgagcataacagtaaaagacctaaatcttcatcatcaaactgtacctccatcgacactaggtcggcaacgatctccttgaagaccacagaaccactctcctgcaacttgtgcgagaacaacttcatcttgatatgcatcttactggttagatctttagacatgtagatcgattccagtttgagccaaagttctgcaacagtcttttcctgcaacacttcttacaaaatatcattagatatatgaagttggatcagcgacagagccttacgatctttccgcttctcctcagcggtccattcagtcgatttcttcttcccgaagctttccagcgcctcatcaagatccgaagtttgcgccagaacagcctgcatcttgacttgccacagcgagaatctcgtcttgtagtctagcagcggtagatcatacttcatcgacgccatcgcgaaaccctaatgtgggaacaagctctaataccacttgttaggaaacgataagcgaacaaacgataaagaacaatagatcaatcacagaagacacgagatttaacgtggaaaaccctcccaaaacaggagagaaaaaaaccacgggcgccagccagcaaaatatcttcactatatctgaggtgaggttacatcgccgcatggcggcttacaagaggtatatatatggtggaaccctaaaagggatgacgatccatatcgttccgctacggcagaagctggcctttattaagtgcaaatgaatttggatcacaactcaacagaaactatcccttttaaaaaataaggttcatacagagaaacgaaactatcccttttgaaaaaaggaatgctagtaggtgaaatgaagaaggttgtacggtcttgtgaattagattatcagtctcttcctcggtacagcacggcccaacaatcagaagaagggagcgaaaataggcttattccagccattagacacggtccaaagagatgagataggtaaaat

SEQ ID NO: 22434 - DNA, 1375 bp, Oryza sativa
acaagtacgagcggaataggatgacgtcacctcatggagcttgaggagctcgaggatggcgaggacgatgtcgttgacgtagcagaagccggaggcctcggacttcttggcgtggtgcaacccgccggaccagttgatggcgatgtcgtgggtgccgtggttgagcttgacggcggcgccgacggaggcccccgcgtaggtctggcagtaggcgtagaggccgtcgaagacggggcagtccgggccgatgttgaagcggcggagggcgcggacctggccgagctgggtctccggggtgacggcgcggaggaaggcgacgtagtcgtccgagtggaagcggcagaggtcgatgccgcgggcggggagcgggcggagcacctccatcttggccggggcgaggaggccgtagtgggcgagcagcgcgtgggtcatcctcacccggtggggcttcatcgggtggccctgaccgtagtagtagttgcccacctccgggtcgtagaagtagcacacccgccgcttctgcgcgtcgccgcacgacgccgacgccagcgagttgccgcccgcgcccgccgacgaggggtccatcgccgccgcctccgccgccgccgccgaattcggggttgggttttttctctctctcgaggtcgaggagctcgcgtgtgtgttgtggtcgggtgcttgctggagaaggaagcgaagcagaggaggcgagcgatgccgcgatgggcgaggaggggaagggggggtttatatacagggggcggagagatggagaggagacggctgtgtcaacaatgggctctcgcctctcggcgcctcgtcgttttccctgcacaaaatcaccgatcattaaaatttaaaatttaaatttaaaggtaattttatgatattttcaatgcaatttttctttttatatttgttttaagttttttagaacacgtgtataaaaaatttactcataaattattttttaaatcgttgatagattgttttaacttgcaatcagctcacgatcaattcagtggggccctagatattccatgaattatcagggtcaaggctaatataatttagtctaaagttaatcataagtctaaaatgatataatttttttatatatgtgttcttagtaaaatcatttctaaaatataactataatgcagaaaaaatcaactctaagtgttattcgaattttggttgtggcataagttgaaaaacaaacgatggagctttaatttcttaggtagtttcctttttgtttctgcaggggtggctcacatagctttattttttttctttgatattccgcaaggtatatacggcgatcatgatggtattggcattcaagagatattttacaactataaatttctac

SEQ ID NO: 22435 - DNA, 2689 bp, Oryza sativa
ggtatctaccaccctgaaaatcacacaaaaatgtttgattttctagatattatgtttcttttcatacttagtattgcattagttaagtctgatctattaagtcgtgcttagaaccataatctctagcccgcttcttgattgctaataaggatttcattgaggtttcagcaaatgagttatctggacgttgcttcggcttacaaggattgcatacaagttggatttagcccgttgcaacaaaggtttcattgtttatctaatcttgtggattttatgacatcggacattcagccgatgtatgttttaaccttcggatcagtgcttattctattatatcattgttagccgattggtttctactggatgttattattgttttattacattgctatcaatcaattgtatttatatcgttatctatattggacatatatccgattgctcaaaaccctattgacatcggctggtatcggcatcagctgaattactccatcggcttgacaaccaattggcttattgatatgctatttgtatatcttgtcagttgcatgatcaaactgactggcacgcccgtatcttatcaaccggtggatctgcacagaagctaagcagatctcccaggccgttgtgttcgtcgacctagtacgtgccaacacagacccgacattatcagccaaacgtggatttttttgtcaacacataacacatagagaatcatgaagaagactctgaccatgccaatacgaagcgtggcagggaagaaaaaaaaggaagatcatcattacaaataatcttataatatgtatgagtaattgaaacaaaatttataatgaacagacaaacaatccttcaactggctatcatatctgttactccctccgggttgataatacgtgtcgttttggacaaaaatgatatttaaaaatatttttgaccactatttttcttttacaatatatatagaaatatcaatacatatgattttatgaaaagactttttaatactaatctatacatatggtcttcatatgtttaaagtttttaaagtttaataatagacttgttcaaaatgacaagtattattactcgtaaggagtaacttcttattagagtttttaacagtttttattacaacctctgttgatcacagctgaatcatttcctcgttcaagtgttcttgttgtgccatcagaggtgttccttctctgatcagttgcctggctgcttatttctttctataggagtgacaggagtttcacgcggtccatccccagggtctgaaatgatgtaagtaataaactttaggcaaaatttgctacaggatactcaaagattgtggtctttgctgtgagacacccgaagatcgtgtatttgctcgtggacaccgtaaaaaagtggtaattagctactggacactcctcccattattttattattttcgatgaaaacggagagagaaacttaagttaaagacaagtttgtccatgggcccacttgtcaatctctctttctctgttcttcttcgacagcaacgcgaaggttttgccggggggcgcgaggcgctctacctcgctctattacggcctcctcgacctcttccgcgaggcacggtgggggccgttcgacggggaccagctgcatctggcggcgtccatggcagggaacgccgcgggcgacgggacggctgtccgcgccgcgcccgacggcggctgctgcgtcgcgcacggcagcgctgtgcgcgtgtacaaatgagcgatggaggagcggcggcgacctgcgcgtgataactgccttcccggcgacctgcgccacctcttccgcatcgcgcgtgtacaactggagatggcaggcgcgaatcggccgcgtctcgggcaacaagggacattcattgagtgttcttcttcctccccaatctctgcaactgcaccatgatccactagtagttattcttgtccggattcttctctacatgaatggccatatcatgcatcatgtgatcgatcagcaatgagcagcaaagtgtgtatgaggttggctttgcagaggctgtcacggtttaaggatgcagggtgcatcctgtcacaatgatcataagacctcagtcagctataggtggcattggcgtctgggactgcaccaccggcgagcaggccgacttcttctacgagccgccgggctgtgcactcggcgacgccgacaagctccagtgactcgacggcacgagcacgctcatggcagcgaccatgttcccacggacagacacctccttcatcatcctgctggacttccgggacaagaagaacgtggcctggtcgtggtccgacgtcggcacgccggcgtcgctggaggacaagaacgtgctgcacgccatcgcgatggaggacgggcggtgcgcgcgccccctctcccccgctgccgtgccgcgcgccgctactctccgccgccgagctcgccatcgcgtcggccgtctctctccctctctccagcgccgccgccccctgctccgccgccggccgcctcacgcaagtctgccaccacgcctgctcgagagaggagagaaagaagagaaaaagaaaggatgtggggcctacaccgccccgccgccgcctcgccatggctgagccgtccaggctcgggccagccgccgtcgcacactcgcacctctgctctgctgcaaggaagaagaagg

SEQ ID NO: 22436 - DNA, 1212 bp, Oryza sativa
gatgacagctaccagtccatcttcaagccgatcatcagcaaagtcatggagatgtatcgtcctggtgcagtcgtgcttcagtgcggcgctgattcgttgtccggtgataggttgggctgtttcaatctctcaggcaaaggtcatgctgaatgtgttaagttcatgaggtctttcaatgttccgttgcttcttcttggtggtggtggatataccatagaaatgttgcacgctgctggtgttacgaggtatctatactttcccccgtttttttttccttatgcctttaacaaacaattaattaattctattaattatggatgacaaaacaaagccatgagctcggtaatgtgttagaacctaatttgcttttgtgtttccactttgttccttgctcagcatcaagaacttgtcttctagtagttggtacctactgcctggctttgttgattgatccatgttgctgtaattttacaatcaccaaactaagattttggtttgtactgagctgatgactgaaatgcacagaacacctatctcccatttacatgtaatgcttaatgtatttattttctactctgtttcattcaaatgcattaatttgtgagaacttgtgcagtaacaaatcatccggtgtttctcaaagcattaaagtgtggttatttttaaacagataagtatcaggcaaggcactgctagctaactgttaacccttgcaaaatcatatgcttcaggccaccacctgttcctcagttgttagctttcatcagagatgtctttaataaattagcaacccaaaatctggtctctttggaccttgcaagcctggtttcgttgccttttgtgaatttataaatctgaacacacaacaggctaaacatggcgaacaagtggaatggctgcacttatgcttgcttgagtaaattatctcttatatcaggaacacctgttgctacagctatggttttatcctctgactgtttatttggttttttatttggccagacaggagttgcacttggtgaagagctacgggagaagttgccttataacgagtattatgaatattttggtccagaatacagtctttacgttgcagcaagtaacatggagaacagaaatacaaacaagcaattggaggaaataaaatgcaatattctggacaatctttcaaaacttcaacatgcacctagcgtccaatttcaagagcgaatt

SEQ ID NO: 22437 - DNA, 628 bp, Oryza sativa
acaccaaaatatcatggaagatggtgaacacaaggcattagatctcatcacgcgactagaaatcgcaattgatgtggcatcctcacttgaatatcttcaccaatataaggcatcgccaatcattcactgtgatcttaagccaagcaatgttctcctcgacgatgagatggttgcacatgttggtgattttggccttgcaagatttcttcaccaggacccagagcaatcaagtggttgggcatcaatgagaggcacaactggttatgctgctccaggtaagctcctaattgttgtagcttttttttatcatatttcatattatatgtatcctactatgctggattcagccaaaatggagtaagacttattggtacttcattttactacatagacaagttttgatgaaactcttatttccctaggaatttgaaaggggaaaaatgaacaagtatatggtagcaaaatgttgtatcctgtaaatggatttcgcacaaacataaataggcttgtggagttattttctcataagccatttcttatttttagagtatggactgggcaacgaagtctcaatccatggcgatgtatatagctatggtatattgttgctggagatgtttagcgggaa

SEQ ID NO: 22438 - DNA, 1685 bp, Oryza sativa
gtacagtacttcatcatccgattttaaaaagcgatgttaaatacataaacttgaaaagtcaaattagtggttagactacaaggtgaaatgagcaattaccccttcttatattggaaggaacacactgaaagtctaaaactgtactctctctgttccaatttacttgttatccaggcaaataccgtgcaaaccatgaagatgtgaaagattacatggttgcccttgtcagatacatcttaattatcttttcaaagtagatgagccaattatgaccgcatcaatatgtattgctgcattactgtaggtagggagggaataatatcgatcacctttaaaatttctttggatcgagaaaacgacaaataatttaatataaaattaaatcctagaacgacgacgatgagtaatatgaaacagaaggaagaacatgaataagcagtgcacattctagttgttcctgcctctgcttaaatccttccatggcctttctccatttgagttatgcatgtcccggcgacataggaggattgtgtcccccgtttgggccgcctgaaatgtactcatattaagtatggacttgaagagttggagtgatatcaattccaattaaatcatatgtacaaaagaaaataatattcactctggttaaaaatatgtgtccttttggttttcaagaaaggtaatgcattttttaatgtaaaatttagtatccttaagtacatcagttacctgagggagaggggaccgacctgagaggtgacgagcagcaagagctccactggatttgtaccgtcatctaggtttggagcctgcgacaacagcgaggttgagcgaagaacggatcactgatgaggggtgagctcgagagcctggcaacgtgccgttctcctcttgtcgctgcagccaccgcctccttgacgtctgttctgtcaccaccgccgtttcttcgatggcggcggcaacagagggcgcagcagcggccatcgacgatggtgacgaaggatgtagtggcggctgtaacaccctaggtaaccacgtacctagagtgccacaccaaaatacactcaaaacctaagtcccaaaattattagaaatttcggtaaaatctcccctaaaaaatacggacatccacgacaggcagttataagaaaaatcagtaccgatataatccacacaatacaaaccattctagctccacaaattccatgtgaaaacaggtagttataagaaaagtcaataccgatataatccacacaatccaaaccatcctagctccacaaattccacgtgaaaataaggaccagaactttaaatgacctttacaagttctacgcaaaacttgtgctatgcataaacatagtctaaaactaaatttcaatagtgtgcaataataaagtgtagtccaagggtgctactcccgccccatgccgatcaatgtcattaggtacctaaaaaccaaattaaacacaagagtgagtaaagaatactcagcaagtacaatcttgaactagtaaacatacgcatgatttatgcattaagaaaccaacatgaagggttggatttactttatttttaaaccaaagaagtcaaaagatagtagttccctcccgggcaggtgtgaatatcctcttagcattaccggtaagccaagcaagcgtaatcagcgcttcacaaggatcatgaat

SEQ ID NO: 22439 - DNA, 1727 bp, Oryza sativa
aatgatcaaactcggtagaagaaagtaaatgattagcaacaaacatgtcaattgctgttgtttggaaaacatcatacttgaactcccagcattgccgaaaaaattgataaggctgaacaagcattcggcacacttgtcattgttttttttcagaatatttggctggagaggaacagaagaatctttcagcagcaacagaaagacaactgcaaatcgccttcatggcaattcagaacatcacacagatggagttgccaatctctgccgacagaattaacctgcagaaatttatgtacatcaattagatcctaacagttgttttctttcggttcttgtatcaggacacgtaatttgaacctactcagttgatattcttcttaatataaatcaaggcagatctcctgccagtttctcgaggaaaagaaaaaccctccatttgcatcttactaaaagatgaaaagacctggacaatctcccgtggtgtgcacagtctgcagacccattaatcatcaggttccatgtaaaactgtccggcactcaggcttgaaaccttctgtttatcatgaacaaccctgtgtgccagataacccgagatcatggtattccaagacaccaagctttgttcctccacggctgataaaagccgataagcactaactgcaccttgcatacatgacaacaggtgtttaccaagtgacaatgctgacaaacttgtgcatgctgacaacaccagcgaaatcattcccattaggttcttcactgaacccaaatatcatttctccaacagtatccaagggcatggtgtgctcatcattcctcaataacccagaatccatcgcattgtaacgctagcaattcaaacaagccaagccaatgcaactgctccccgtgcttgaccaccgcataagtaaggcaggcagccatgacagagctctggggctggcaacccttcttcccggaggggactcaaactcgtgcctcgcctcatcatcttccccgcgctgcgcgagcccagcgaagagggcgttgaagcgggcgacggtccgcttcggcatttcgtcgaacaccctgcgcgcgaccccgaggcggaggagctcgcgagttcggcgccagctcgtagcgtaggcgcaggaggagaaagcccgaattggcgaggcgggcgtggacctggatcgtggaggcttcgtcccgggccggagctcgactaggtgaaggccttgagcaagcagggttaggtgaaggcgggacggaggctggaggagtaggcggtgagggtttcttgtcggagacgagctctgatgatttctttccacgaggaggaggcgatggtggccgcggggcgtctgccattggaaacgcgagcgagctcgcggagatgctgctcccatggcgtcaatggcggcggcggcggcacggcaacggttcgcgtgggaacttcgaacggggagataaatttgcagttatggggctgcagaagttataaatttcatatactagatacttttgcatcttgtcagtgaatatattcaatttacatataagtataagaggagtatttgatttgaagcaagttgaatattgttactactccctccgtcccataatataagggattttgagtttttgctcgtagtgtttgaccgctcgtcttattcaaaaaatttatgcaaatataaaaaacgaaaagttgtgcttaaaatactttgggtaataaagtaagtcaaaaa

SEQ ID NO: 22440 - DNA, 717 bp, Oryza sativa
tacttgagtgctgaaaggtttccaagtgaggcaggaatggagcctgccagctgattagaaccaagacctagtccaacaaggccagcaagatcacctatctcctctgggattcccccagtgaggttgctgaattgcaggttcagagtcatgaggtttgcaaggtttccaatctctgatgggatgcttccggtgagggtgttcatgccaaggctgagtaccctgaggccgcgcaacgagcagagctccggcggtatctcgccgtggaacctgttgttgtacagagcgaggatctcgaggccggtgcagttggcgagcgacgccgggatctgcccctggaaggcgttgtcactgaggttgatgtgtctgagctcagcgaggccgccgagctccggcgggaggacgccgtgcagccggttgccggcgaggtggagccgcctcaggtatgtgaggttgccgaggtccggtggcaccgtgccacggaggccaagccccggcatgctcacagcgccacgacgcggacgcggcgccggcctctcgcgccgcacgccacgccgcgccaccggcacacggggacggaccggttcccccacgtctgcggcggcggcgagccactgcccgtcgacatgcgctccatgaacgccgtcagcgcgaggccgtcgtcgacgtctaccgccgccgcggcggcggctgctgctagccacgccagtggccataccg

SEQ ID NO: 22441 - DNA, 1349 bp, Oryza sativa
tcactgtgatctcaagccaagcaatattttcctagatagtgaaatggttgctcacgttggtgattttgggcttgcaagagtcctgcatcaagaccatagtgacatgttagagaaatcaagtggctgggctacaatgagaggaatggatatgctgctccaggtatgcttctaacagctacaatccacggttttctttctaatttattcagaaacctttccattgatccatacttaagtagatcgttttgctattcagatgtgtgcaatttgttatgaaaaaactcaaattcttgcaaatgataattatgcagcagtgtaaattatatattattagactgaagcctacatataaatttaaatataaatgcttaaacttgcaacaatttcctttatgtaacattttcttatgattacagagtacggtttgggcaatgaggtttcaattctgggtgatatctacagctatggtatactgttgctggagatgtttaccggaaaaagaccaactggcactgaatttaaagaagctctcagccttcataattatgtaaagatggcacttccagacaatgtgatcgatattgcagaccaacacttactatcagagaacaatgatggagaagaaagaaactcagatggcaaaagaaagagacacgagaatagcctgcatcatatcaattctgcagattggagtttcctgctcaaaggaatctccagcagatcgcatgcatatcggagatgctttgaaagagttgcagagaacaaaagacaagtttagcgtgtccctgcgttgaagcatcaaatctctgaataatttggcataataatccccaggctataatagatatttacagccgagcaaccgaagccttatcagcataggttcaggttgtatgagtagcttcatgatgttcacacatgcagggtgctgtttttttttagataaaggattatcaaacccggcctctacacctttgtggggtgtacacagccaaatgcagggtgctgttactgaacaaaatataagaaccatgaaccatttagcatttgcaggaagaatatgtaaatcgactaactgcacatacagttttttttgtttttgttttttcgcttgtaacctacaaactgttttgatggaagcattcgatagcacgcaagttcagagactcacagcaaacagctcctctcctgaaaaatcccaattccaatggttcagtactgcaactgcactaaactaacctaaaggaatggacatttaccaagatccattaccacaaagtataatgttttatgtttccccatttggttgagaagttgcaaactcaaatgcatcgacatcatcccaagca

SEQ ID NO: 22442 - DNA, 1194 bp, Oryza sativa
cgatcacgaaacgccctcagcaagtcgtcccgctcctgtaacgcctgttgaactgcgggcagacgacatgaacccggctagtaggcacgcagcgtcggcggctcgtgaccatagacgacgcggaacgacgatgttcgaagtgacgactgatacgacgtgttgtagcaatacatcgcgcatggtagccatcgaagccattgacacgaacgattcctagtgaaacatcgaagatacatcatgatgatcttgttagtcacctcggactggccattggatttaggtgaaaggctgatgaaagattcagctgcacacccgccaaccataaaatttcacgccaaaaagtgctggtgaagactggatctcggtcgctgacgatggagaccggaaaccatgcaagcggacgatctcagcgaagaaggcagctactaccgacgtcgccgtgtacggatgagaacgggatgaagtgggcaccggtacgatgaccgtcttgccatgtactcgcgggagcccctcgacgaagtccatagcgatgtcagcccacaccgccaaaggcaccggcaaggattgtagcaggttggccggttggaggtgctccgtcttgttccgttggcacgtgaggcacgcgcgcacgaaatcttgcaccgtcgctctgtcccgcgagatatggaaatccgcgcgaaggcgagatagggtcttttgcgttccctcaagtcccaagccatgcaccgactcgaggatggccggcaatgattcggatgatggcggcatgaagacgcagcccttgaacatgatgaggtcgtctgtgaacgcctatgctggcggtttggcacccttggtgatgtcttcacaaatggcggacagggcgggtgtggaggctacctcgcgggacaactcatcgaacagggagaattggtgggggggatgataaggcgaacgcctccgccaggtgttcgtcccatctagagagcgcgtccgccaccaagttcgccattcccaacttgtactacacgccaaagtcaaagccgaggagcttgcttgcccactgatgctgtggaacagtggagagacgctgatccaagaggaagcgcaagctgcagtggtcggtgcggatgaggaagcgacgcccccacaagtatggccgccaatggcggaccgcctggacgaggccaatcaactcgcgttcgtaggcagcga

SEQ ID NO: 22443 - DNA, 675 bp, Oryza sativa
ccgcgatgggtgaaggggcgcagtgacgatggccgacggcgcgggacgtgatcgctccggcctcgagccggggaagaggaggaagacgtgcgcccggagtccacgtcacgcgtcctcgctcgtgccgactcctccgacacgcgcgacgacgaacggcgacggcgaacagggcagggctgcaatggcgcggcggctaacagggcagggctgcaatggcgcggcggctcggagcgaaacagggggatcgagcaagagggggaggggcggcttttatggggtggttatgtcggtttgggaggagaggaaattgacctcgagtggcactaggcgagggagcttcgaggggaagggatgggctcacgggcgcggggtcaaacggcatgggcgatggctggcgcggctgctcctctgcgtccatggcgcgggaaccgagcggtggcgcagtgggagggcgaggcgtcggtctgggagaggaaagcgggaaatggagggggagaaagagagctcgagccatgtcgatttggggagggagagagatgggagcgagaggcgctgcctcccgattttggacggacgcgggcggcgcggctcgggcacgcgcgctggcttgcggggccgagcggcagcgcggccacgggcacggcagggcagcggggcttaggcgcggcacgggcg

SEQ ID NO: 22444 - DNA, 14076 bp, Oryza sativa
gactttggcaggggaatttgatttgggaaggatttgaattcggaatttgaatttggcgatagatcggggattttagatccggaatggcacggagacttgacaacacacaaagagacgaatttcgcaatagggtttttagaatttaatttttcccgctaggcgccacgacggaacgggcgctgcacatcgcgccgtcgaccttctctacggcgggagggctcgggcgtctccgcctccctcaccgatgatgttaccgatgccacggatggggtcaaagatggcggcggtggccgatatggtcgaagacaaaggtggcaatggcggtggctcccaagccctcccgccatgaaggaggtagatgacagcccatcatgatagtctccctcaccgtcgtcaatctcctctgcggtgggagggttcgggcgccttcgcttccctcgccgatgatgtcaccgatgccgcggatggggtcaaagacggtggcggaggtctatggggtcgaagacaacggtggcgacaatggtggttcccgaaccctcctgtcgtgaaggaggtcgaaagacagcccgccacaaaggaggtcgatggtggtgtgacggcggtggcttccgagccctctcgccatggaggttgacgacggctgcggcagtggctcccaagccctcacgccatggatgggatcgacgatggtggcggctccaagccctcccagtggtggaggatgatgaccatcggagatagagtgaatagaggcaagggaaagaggtgaagaaaatggaactgatagttaagtcccatatacagttggggttaacggagatttttgacagaaaacgtgatggagtggcatggttctaattttccgaaatcccagtggcacgcagctgatatcataaatagtagtgacattttttttaatcagcatatttgtagtggcatggatcaccatgaagcgtgatcagctggacacctgggccaatcaacaggcggcccaagtagggtatgggagggtggggcgatgcgggctgtagctgggccagttgacccaccatgcccattgagcgctgctatacatacgaacttctgtttacgatggttgtacgatgaaactttgcactacgtggcgctggcgatgacgacgacatgcatcagaacgaggcaagtccacgttagccgtccgtttgatcgtaggaagatcgtactcaaaatgtcgtacgtatagtaattttcatgtccaatgggtggttccgccactggatccaattaacccaaatttaaaagtcaagattcaaaagacataaacaaagcccatatcgagaaaaggtcctcttcaccacatgcacaggtacgcaaccatgcaaaagcaggctgaaaaaaaaaagcatgaatgctaattcgtgtatacgcacgacaagcgccgagttagggttagggttttagagggatggcctagggaggcggtgggtggcggcgacgccgaagcggcgaggtcagcagcaggtggtgggccagtgttggtggcaggggcaaaacgaggtgaagaggagggctggtgttttcctcgttttccgtcggttgccgatgcctgaagaattcaagagaaaataactgaatatacctcctcaagactcaaagttaagatcatatggtagactagtcttatgatatgtatctgaagttctgaacttcttcttgacagagttctgatttctgaacctctgaagtctgaacacttgtatgaaatgatccaccggtgatgttcttttcagacttgatagttggaagtagctggctgcaaacctgtgtcatacgtagtctgaaactgaaagaaaggcaatcacatactcacacgtagtctgaacttctgatcgattatgcgaaatgaaggtaactggggaagttcaatgtcagtctgaactctgaaccaaagcaaagtaaatcatgtggaagatggataatgatatttcacactcaccactacaaatgatctcgcacacaacaggtaaaaatgaaccaagaatcacagatatgcacagctacattcaatcctatatgcaagcgtataatatatcaatggtgtgcaaataccagaagctatggtagtttactctgcaaaacgattgtaagtaccccctccgtttttgaagatgacactttgacttttgaacattcatcttactaaaaatattacataaatatcacttatttagttgtgtttcggtttatgagtaatcacactttaagtatgacttatatttttcatatttgcacattttctttagtttggacaaatggtcaaacatgtgtccaaaaatcaatggaatcatctattataaaccaaagtaaagtacattttatccaaaaaaaaaattggtagtctactttcatcgcattttcagatttgcctgaacattcattgaggaacctgatcagtaaccaggcaggcagcaagctggtgaagtttcagtattctagtttgatttcaccacaacatgagagctagttactattcagagcgaaatgaagtactagaaagtaacatcaatacttggctgaaatataggaacatgtacattgactgatggtcagacacataagtacattaatgttatgtatcataaatacataattcaaacttgagaagaatacatattcttcttagtttcttcagacagcaaagcaatagatcagcattgtagatcagtttcaccagaaagcgtgaaattcaacagaaattagtcatgattatgaaacatgaatacttttctaacataattgggcgcgccctgtacagaaactcagatacatatcataatgctagatgactctatcatgagatatcttcactcttaatttctaagattagtccttttttgtgggagttcttttccttcaattcttgtgtagaaaaacatcaggaacagcagctgggtcgagctcatagcagtcatggagctttccacctttctcttttgtgagacaaaacgatggtattcgatgagaaaacctcaggttctctttcacaggaatcttcagaattccccttcgtacatcaggcttgaacacagagatgtaaccatcaactttagtcagataaccaaataatgtgaaagcttcagtggagtcgacgatcttgccaatagcatacttagtaccacgagtgctgcgggaaggaacccacttatttgaccagttcttgtagatggcccagacctcacctatctttggatgaatttgaaccttgcactttgctccaatttgtttggtttctattaaatgggagaatgcacaattttcattaaactttgtttccatgttttggatttcaaatgtaccacagctcacaggtacatcatgctccaaccacagcttctcctgcgctcgttgagggcaagcctcaagccaggccaaatccacgttgaacggttccatctcaactttgcttacccaaccatagaagttgggaaatttatcagtatcactgtaaagagcccaaatctggccagcttcaaacttatcatgcgagcggtcttgttcgaagttgtagaattctgaatcagggcatacataactgattaattcgatatttgttttgttgtcaagagccatgtaggattcaagagtaatggaagtaaatgccgaatccaagtcacttggaagagctgcagtgtctagttccaggaacccttctgcaacacctaccctttcatttccgttcgttttatagaaggggatactgtgagaaaaatgaagtacctcacatgatgatatcgaaaaacatgactcgttcttcactttcgcaaatagactgacaaaccctgcaatcctgaccagcggtgaaaccgtgacaccatcatccattgagccactagaaaggacttgcacaatatcatacccatatgattgatatctatctgcatgagagctcaactgcatgctccatcctttataaagagcccacacctcacccatgttaggatttatatcacaggagttcccatttttgcctgtcgatgaaacactgtgggataagtaccttgatggattgtgcaatacatctgtttctcctaagcagaagttcccacaagcaaatggcagtttttcattggtcgatttggaattttgttcatttactgtgttgtgcaccagccaagtgaactgcactttgaggttggaaggatcgacatgatttattcaggcataagctctaggcatgcaatcatgaccttaatatactgcccagatctgatcaaccgcaatttgggacacatctctggacttgtcaaaatcaaagaagtctgtagaagagtaggcaatcacaggattggcagaattctgagaagaagtatcagtatcatctttcctatgactttgttgattgtctccatgtttttcatttccttcctcttcactgtccacttcggtggggacatgttgtttggcaaattgattctcagtaacagcaacatcatcattacatgtttgctcagtactccaatcagcatcagatggagaattatacttcattttcctctcaatattagagttcatagcacggttgctgtcagagctatcacagagctttctccgacccaatatctgaagactggatgatcctggagcatttgtctctgctgatacactttctccagtcaaattctgcacagcggtggagtttggatcaggactccttggtaccaaagttccgggtatatcgttgtcagcaggaggcacatgagatttagcttggctaatttctgaaaattgaactctgtcacttcttgtcaccaggcctttacctgccatgtcaccagcccagccatattgttttatggattcatcagtttcttcagcatctctggacttgcaaaaatcaaagtctggataagggtaggcaatcaccgaattgacagacttctgagaagcagtatcagtaacatttttcttacaagtttgttggttgcttccatgtcttgcatttctttcctcttcactgtccacttcgatgggaacattctgtccagtagattgattatcaggaacagcaacatcatcattacatatctgctcattactcgaatcagaatcggatggacaagtatacttcctttgcctcttaatattggagttcataccatggctgctgtcagaggtaacataaagctttctcttacccaatatctgaagactggatgattctgcagcattttcctctgcaggtgcactttctctagtcaaattcttaactgagatggacttaagatcagaactctttggtaccaaagttccaggcttatcattgtcaaaagcgcagatgtgagatttagtttgcttcattgctgaaaattgaatggcctcgcttcttgtaaccaagcatttaccttgttgatgctgattggggacactacttcgttgaaatgataacatttctgacgttgaaagctgagacttttttgcagcagttgataggattctcgagggaacagactgctcatgcagtttgattgcgaagaacctcttaccacaatcactgcagcgggccaaaaagttccgttggtagtacagaaatcgcttctgacaatgcggacatattgtccagaatacaagcacagaagcagatggtgtcatggatccagccacattgcttatgtttgaatcagtcttgtttggtggctgtgtagcctccttggccacttctcttgaagcacactgtcttttggtgtcatacagagacctcttcacatgatcactcaatattgcatgagcttctgaaacaaacctgaatgcggcttcggcaccaaacagagtattattatcaggatgaagccgatacgaaagtatgttgtattgccttcttattactgtttcgtctgccattttatccacctgaagaacaccataccaatccaactctccagagatctttgcctcagctgaagaaagaacttcacagataattaacagctgggagatgttctcaagctcaggaaaaagcctttgagctttaatcgcgatcttgcgggcgccgacaaagtctctattttccagcttctttacagcaatttctctggccctgaaggcctcctctctgttgcattccatcaaagtattccagaaatttgaccaagaaacccttcacatatacttgttccagaatggcattaacatgctctacctatcatgttatcaagaacaataaaatgtgagaagaactttcagtgcatcaggccctgcatgcatacaaaaggacatttttattaacagaagaaatatatatggcaaaattatgaatactctgggaaaaaaagaaatcacatttgggtatactcttgtagtcttattcacttgagaaaattgtaatttggaaaattgacatacagttccttcaaaacaaaaggcatccattttgaaatgttttttttttaaaaaaaactggatggcatctttccaaaccaccacattttgaagtggcatacatgcataaaaatctttaaaaaaattgcagaaaaagaaagaggggaaatatttcgatcctacttgatgtctactaccctagcctcctagggcacccaaatcaagagctctgcacgatcaaatctctggccattatcctcgcgaagaacacactaacccccgaaacgcaaaaccaaacctccgatccaaaaaaaaaaccctaacacgcacgcataacccggcttcagccaacctacccaagaaggggaagaccggaagaacaagggggcaatggaccgcaaatgcgtgaacggatggtacctccgagctgagctggggctggaacgtgatccgcggcggccggcgccggcgagccaccgtggtgggcggtgggcgtggttaggttcttggaggaagagcagaggcagaggtgaggtgagtgagtaggagactggtcgagttagacacgtgtcatgctgggaagtgaagtcttgagatcaaggacaggtgtctttttctaataggagtatatatttttttcattggccgtacttgtgagtatactgactgcctgcctgacgttttctatgattacttgtggatttaatagttgggtttcttctgcaataatttgtatcgtgaattcgtgatgtataattaagaaaagaaaagaatgtgactgagagaaaaaaaacgaatataattgagagaaaaaaaatgaagaactccctccgtcccaaaatataagtatttttaattttgatatagtttttgagatggtatgttaaacaacaatatctataaaagtaagatattttaaataaaaagagttgtatattatgatagtttgttgaatgataaatctaataacatcaaacttacatgattaatgtttttttgctattaataatcaaagctaaaaatgtttgacttggcactattctaaaaatgattgtattttgaaatggagggagtagtgtttactcatattcttccttatacttaacatgtatacgttatatctacgttgtaacaggctatgcccatatatgtagggataggttatagggtgatttggtataaaacattgatccgatggttatgggaggcggtgcgcacgggtcagtaccacatgtacattgtaacgggtcgggataacagaactaggaatgtgctatggggtgatttgagataaaaacattgatttggtggttgcctacattgtaacaggctatgcccatataagtagggataggttatagggtgatttgacataaaacattgatccggtggttatggaggcggtgcgcgcggttggaggataggaggacaatttcgctattaaggtagtagcaatattggaccaatataagccatctagagaaagggaattgtccatgctaaatgctaatacttatctctttcttgccgattaaataggccacgtatagtgacgagtgggtctaatggacgaatgttcacgcgcgaacacttaatttcggcccagcgcagatgtgtctagtccaacataaaaagctatttcagaaaattttgatatgcacaaacttttaattaaaaaatgaatgcaaatcgaacatataaacttctgtaataaatttacttaaaaatagaaactgtgcggtgccaaaacaataaaggaaaaaacatgtgtttggagtgtcgtctaagccgcacgcaaacatttattccctccgccccaacatataatcatttctagagtttggacacggttcttaagaaagtatgtagaattaaatagggaaatgttgtgattggatgaaatgtagaggtatgtagaaaaattaaatggtggagggttctgattagttgagaagagaatgttggtgtagaagttattatattttgggacaaattctagagactagaaattgttatattttgggacgggggggggggggggggggggggaatacatgatagtatttccggaccgcacactacacgtgctcaagaaataaagagaatgctctttgtttatgtgtagcagaaactcctatatataaaatttaatattccatatttcatttgtatagacctgtggtcattgtctgtctcactgtctgcatgaggaaactccttactgaatattgaatccactggtggagaaaccctttgtagtcccggttcgtaacccccctttagtcccggtttccaaaccgggagtaccaatccgggactaaagatcgctatctttagtcccgggtgaaataaccgggagtaaagatcaccaaccgggactaaagatggctcagccaccaaccgggactaaagatggctcagcacaccaaccgggactaaagatagagctgaccttttttttttttgcatgcccctgttgctgcatggtttatatatatatatatatatatataaaccatgcatatatatgtttcaatacatatatatgcatacatatatatatatatgtatttatacatatatatgttatgcaaatgcatatgtatatagatatatatatgaacaaaatatatttacattatagaaaatgtgtacacatgcatatagaaacatatgtagtcatgtattaattacaatccattatatgtcctagctagctacgatttcgacgtagtagtactcgctgctagcttagaagctaaggaccggtgaattgtgtttccgtcgtagtagaattcacccttgggatcaaggatttcttcgttgatgaatcccatgagttgttcttgaaccgccgcgataaattccttgtgtgtggtcaggttatccctcatgcgaataaactatatgaatgtatgaaattgattagtaattaaacaagaaatcgctacgtaatgaaattttgaatttatttgtacgtacatcgagctcttttgtggtgatgatttggtctgcaaggcagtggcaatactcgcacacgtaatagccgcacaagttagttccctgcttttgctttgcgcactacaaataaatgacaaacaacgagagatctaattaatatacacttgtatgtatttgaatcggagaaatataaatgtagagcatgtgtactcacaggaaatttgaacttccgcctaagtctttctctccatttgccgcggaccaaatgacggaaccgataccaagccctacatggagtttaaagctatgattcgtagtagcaattaacataacaagattttcttaattaacaaaggaacttatgacggtacctgtctataagttcgaaaaccttgtcaaacgtagactcttttttatccattgagtcatatacgttgacggtgcaggcctccaggtcgatgagtaaaagcacccagtggaatctgcaatgtgcgtgggatgcattacatatgaaacacttagcaagttcgtacgggaatgaaatttggtatgtaggaagacagtaaaattaaactaactctgtgttgtatggcaacagtatgaacgtcttgtaatgctgcgccttcaggagatggacgagattgtcctctgtttcttgtggatattggtcgagcattgcgacgtttactttccgagggtcgatgaatccagtatcgaaaaccctccgccgtcgggccctttgaatctccattctacaacgataaaagggagtatattattttctatggtctacttatatacaaggacctaattaattaaaggagacgtatagtaagaaatctaactgaacgatatacttacaaaatccagcaactcataatacagacgtcgagggcgtccagctggtatagttcgtagattcccctgaaattgatccagagaatgtcatctccttgcaagaagtccgtgtccctgatcctcgctccgatcatctctctaccggtggcgctcatctccatgtacagctgatggaacttgtacatttgtgtgggtagggactgcagcagctcaggcttgacaagcggtttaccgagttcgtacatgtatttcacttccgccttttcgattggtgcgactcctagcaattgatccgtagttagaccggtgttagtaataaattgttctatcgtcatttctttaccggtcaccaacggctcgatctcctggtttggttgctctccaagctgagggactggtttggactttccagaagatgctttcttcagcgttcgctcatagtccgatagcttgatggcctccttgacagatgcagacatacccctgaagaagttcctgacactggggtctataggaatcttcttttctggacttcgaggcttgaattgtctcttgacttctgatgcaacgtaagcgtcaagctcctcttgcgtgcaatcgtaccccgggtccttgttcttggcggcgtcaactttcgccatctttgttgcccttgtgtgggcaagcggtggagctgggggggcccttgactttgaaggtgccggaagaggagcttgcgggggagtaggtgtaggagcacgaggaggagtcggtgcaggatcctgaggagtcgatgctggagcctgaggtggagacggtgctggcggagcatgaggaggagacggtgcaggatcctgaggaggagatggcggagccggaggagatggtgcacgagacgccgcttgtcgcccagggaggatgatgtaccgcctgcgccatagaataatggcatggcatgtgtctcgtagatgcgtctcaccgtctcctccagggtaatccagctcgaggtcctcgtacgcgccttcgaccaactcaacttcgaccttggagtatcctgctggaatcggcctgcagtggtaagtacctgaagggtccgttgggatggccatgcccgacgccaccttcatgttgtgagagattatttattagtaatcaacatatataagcagcaactagcggaatggctaaatcttacctttattgataagttcttgaaaggaatatgcagctcacatggtgtccgctgagtgatgtcatcaacgggacaggtcgattcgtcctgtgtttgcatggcgtccatgctctgtgatcctacctgccccgttgaggcgcagctgctacggtttcctgacgggctcaccattgcaggaggaatggtcggctggggatcatgggaccgatgtgcggccatgcgttcatcaaccttccttgcaacctcctcttgcatgttgagttcgtagctcgatacccggaactctaggtctgcaatcttcgcctcggtatctctcttgctcctcatccgactcctgtacgtgtggatgtcctccttgaaaccaatcttccaaggaatcacccctttccctcgagttcgtcctggatgctctggagtctgcagggcgagtgtcagctcgtccctatctctgtctggtcggaacgtgccctgagaggaggcctccactgcatctgttagtcgtcgcgcagcctcttgtatctgatagccgaagaccagtgagccatcagttgggttgagcgttccaccgtgagcatagtaccagaacttcgatcgttccggccaattggctgttgccggttcgatgcccctctcaatcaagctagcctccatctgctcccacttcggcatcgcgacgctatagcctcctgaccccaagtggtgatggtacttcttcttggcggcattttctttgtttctttccatcatcgccttcccttgttcacctgtcttatatgcaacgaactcgtcccagtgatcccttagctttgggaatgtgtcgaagttcggtgtctgccccttcagtatatacttctggtacagatctcccttgaagctctgaaactgttctgccattttcttcagagtccaccttttcactttgtcctctgtacccgcaggaagggtgaatgtctcgagcattgtggtccacagcatctctttctccgaatctgggacaaagctctcatgatctccgcgtgcccttgttcttcgctagtacaccgtactgacatgcacgttatcccgcacaacccaaccgctgtgacgtacatagttcttggcggcttcggccggggcactaggacgtccatcttcttccacttccgttatgatgtgccgaccctcaagcttcttcgctgcacctcgttgcccgcgtgccctcttctgtccaacggagggttgactaccactagcctcctcctcctggttcccctccacatccctttccacgtgcccctgctggttcccctccgcatccctctccacgttcccttcctcgttcaagtactggtttggatcctcgttcccctcttctttattccagtactggctgcttccctccgcgattgtatcgtacaatatctgttcctcatcgcggtcagccatctgttgatacaagaaacatctgctaagtcacgagacatttatgttttaacaatctaattcatgtatgctaagtgtaaatgtcgtacattagaaccctacacaaccttacgtgctaagtctaattacaaatcgtgatataagctaagtctaggtgacgtatattatacaaccctagctagtaaataattatatactaagtctaattacaaataaaataatcttatattaaaactcaaataatattacatgctaatactaaaatagtcatgtatatgctaagtgtttcgtgcgtatatgctaagtctaattaagactacaatagtcaattgctacttgtcgcaccaattccgtagtcaataattacataccaagtctaattacaaataaagtaatattatattaaaactcaaataatattacatgctaagactaaaatagtaatgtatgctaagtgtttcgtgcgtatatgctaagtctaattaagactacaatagtcaattcctaggagtcgcaccaattccgtagtcaataatgtcatactaagtctaatttgcaataaaataatcttatattaaaactcaaataatattagaacactacacaatcttatatgataagtctaattacaggtctaataatcttaattacattgcattacaaatataacaatcatttatattattacgtcacttgcctgctccaattttccttctaggactagctcttccactcaggcttgacggacgactccgacaacacgtcttttctgcaagataaaaaaaatgtattaggataaatgcgaagtaacatatatatatatatatatacatgtatatatatatatacatgtatatatatatatacatgtatatatatatatattgcatttcacgttaacgttcgtcctcgttcgttcgctcgttcacgttccctagctcgttcacgttcgttcgatcgttctcgttctcgttcacgttgtcgcggcaacgtacgttgacgtgttcgttctcgctctcgttcgttcgatcgttctcgttctcgttcgttaacggcggtgtggcggcatcggggcggcggttggcgcggcggcgtggcgacggcggcggcggcgtggcgttgtggggccgtggcggcggcggcgtggcgtggcggcggcggtattgcgcgcgcggcggcgaaggcggcggcggcgtggcgtcagcggcgacggcgtggcgttggcatgcggcgacggcgttgcgcggcgtcgaagacggcggcgtcgaaggcgacggatagagatcgagatcgaagagatcgaaatgcat

SEQ ID NO: 22445 - DNA, 3660 bp, Oryza sativa
ccaaccgggagtaaagaaaagatctttagtcccggttgttctcaacaaccgggagtaaatatcttttcccgctatttcgaaattctttttaaacccggttagggttaagaaccgggactaaagattatagcactgcatatgattttcgcttacatatgtgtttataaaatagaagttaatgcattaacattatttaaagtacaaagattgatgacaattacttcgaaaaattatttttgtctgtaataaattaagtggataaatcgtaataagcaaatatatgacttataattaataaaaattccaatatatatatatatattcttagcatatatatgaatgatattattatattggtaaaaactctaattaagatattaatgtacatactgcatgatttaaaattaataaaaattgtaatcatcatatgtacttagcgtaggaattatattaaattaaatgctaacaactctaattaacatatgtaaatgccacatgcatgatttaaaccttttaaaaattcgaatagtcatatataagtagcatatgaaagatagtaaattaaattgtgaaaaactctaatatatgaatgatagttttaaaaatatattaaatttaatacttttaaaaattctccagtcaattataattagcatatgaatgatagtaaattaaatgttaaaaactctaattaacatatgaaattgccacttgcgtgatttaaaacttttaaaaatcctctagtcaattataattagcatatgaatgctagtaaattaaatgttaaaaactctaattaacatacatatgaaattgccacctgtgtgatttaaaacttttaaaaattgtaagtatcacatataactaacatatacatgatttaaacttgttgaaacctctaataatcgtgagtaattaacatatgccatacatcaattgatttatatggataatcaatacatccaaaatagtttacatcgtgtacacaataattacggcattacatcggcggtgacggttgaccgcacgtactttctcctcactattgttccctccttgtgatcgctgcgtgagtaaggggtgtcttcatttgataggaggatgctagggtcaatcgtcaccgtgaaagggggttgcccatccaactgatcgtaatcctcgtcagtcttgtcctcaactccgacgatttttcttttgcctgggagaaccacttgacgcttaggctcatcaggccctctgcccttctttcctttgctagacatgtccttcacgaaaaagacttgcgttacatcattggcaaggacaaaaggttcgtccgagtatccaaccttgttaaggtcaacagttgtcatcccactgtcatcaatcattacgcctccaccagtcaacctaacccattggcaccggaacagaggaaccttgagaggaccatagtcaagttcccatatgtcctcgatggcaccgtaatatgtggcagttgttccatcgtttcccatggcatcgacacgaacagcgctgttttggttcgtgctcttcatgtcctgggctctcgtgtagaatgtgtacccattgatctcatatccctggaatgtcgcgatagacccagacggtcccctcgccaggaaggcaagttgttggttgatcgactcgttacccatgagatgttgtcgtagccacgcggggaaagtatcaatgtgatgccgtgtaatccatgcatcggacttaccgatgttcctggcgcgaactagagccaagtgctcctcgatgtaaggagctaccaatgaagagtgttgcagaacagtgaaatgggctttacggaataaattgttgtctaccgtcattattgctttccttccgagagttccctttccccgtagtctcccttcatggcgtgattcaggtaccccgattgggcgaaggtcttcgataaattctacgcaaaattcgatgacctcctctgttccataacccttggcgatgcttgcctctggacgagcacggttacgaacatacttcttcagaacgcccatgtacctctcgaaaggaaacatgttgtgtaggtacataggcccgagaatacggatctctttcacaaggtgacaaagcagatgcgtcattatattgaaaaatgaaggtggaaatatcaactcaaaactgacgagacattgcaccacttcattctgaagggcttctaatctatccggatcgatgaccttctgcgaaattgcgttcatgaatgcacatagctttgttattgttgcccggacattgtctggaaggataccccttattacaactggtagcagttgtgtcatcaacacgtgacagtcatgagactttaggtttatgaacttcttctccttcgtgcttattattcgcttgatattcgtggagtatccagacggtacctttatgctctccaagcattcaaacatactttccttctctgccttgctaagagtgtagctggcaggactcaagtaatggcttcttttctcctttggttccgggtgaaggtcgccgcgttgttccatatgcttcagatcattacgtgcttccagtgtatctttcgactttccgtatacacctaggaagccaagaaggtttacgcaaaggttcttagtgaggtgcatcacgtcgattgcgtggcgtacgtccaagaattcccaatatggtaactcccaaaatatagagttctttttccacatcaccgcgtgaccatcttcgctctctatatgctggcttccaggcccctttccgaacactactttaagatctttaaccatagcaaacactgttttcccgctgcgatgtttaggattcgtacggtggtcggccttatgttcgaagtgcttgcctttctgccgtaccgggtggtttgctgcaaggaatcgacgatgacccatgtatacaaccttcctacagtgcttaagatacgtactttctgtttcatccatacagtgagtgcaagccttgcaccccttgttggactgtccggataggttgctaagtgcaggccaatcgttgatggttacgaacagcagcgctcgtaggttaaactcctcctgtttgtcctcgtcccacacggggacaccttccttcttccacaactgtttaagatcttcgaccagtggtcttaggtacacgtcgatgtcgttaccaggttgcttggggccttgaataataatcggcatcattatgtacttcctcttcatgcatagccagggggggaggttgtagatacacatcgtaacgggccaagtgctatggccgctgctcatctctccaaaaggattcatgccatccgtactcaaaccaaaccgtatgtttcgtgcgtcctttccaaattctttaaattttctgtcgatgtttcgccagtgcgaaccatcggcggggtgtctcagcatcccgtcctgttgacgctcttcagcgtgccatcgcaacattctagcattccccttgttcctgaacaaacgccttagccgtggtattataggaaaataccacatcaccttagcaggaattctcttctttgttagctgcccgtcaacttctcctggatcgtcccgtctaatcttgtatcgtagtgctttgcaaacagggcatgcttctaggttctcatactcctcaccgcgatataggatacaatcgttcggacat

SEQ ID NO: 22446 - DNA, 1027 bp, Oryza sativa
cctgcagccctgtccttcaaatccaacatactaagcaaagtccggaatattgtcgtcttccacttcatcttcttccatttcaacaccttgctctccgtgggatgtccaacaattatagcttggcatgaaccccgactcaaacaagtggaaatgaatagtcctggatgcagaatactccttctgattcttacacttattgcatggacaacaaataaaacccctttgcctgttagcttcggccactctcaaaaaatagtgcacgccatcaataaactctttggaccgccgatcagcgtacatccattgccgatccatctacatgagtcaaaaaaaccgcacacaaataattattcttacaataatgacagtcatacaataattataagatatctttattcatacaaaaatcataaaatattacaccaaataattcttaaaaactatttgtaaagttttaaactaattttaatgtgttttacttcttttaatttttatttcagtttgttttctattatttaatattaactttcactagagttttccttctcaactattttataaaaccttgtttagcaaatgaactaaatttctatatattctttcttccccacacacattttctctctcatcaacttacaactaaattttggagacaaaaaaagtgtgcaaaacataggtgcaaatgtagtatgacaaaaaaaacattggaggatgaagttgcaaaccttttaggcacctccgatttgtatgtaatcaccaaaataaattcaatagaaattttggcatgacctcccctcttttttgaagaaattttgaagcttgcttgggcagctggaggaggaagaagacatatatataggggtgggactttagtcccggttggtagcaccaaccggggctaaagatcaccgggatcattagtcccggttggtattaccaaccgggactaaagttaagatctttagtctcggttggtagcaccaaccggggctaaagatcaccgggatctttagccccggttggtgct

SEQ ID NO: 22447 - DNA, 27984 bp, Oryza sativa
  unsure (1)..(27984): unsure at all n locations
accaaccgggactaaagatcccgggggggcctgacaggtcctgacagcattcgaaccgggactaaagatgatctttagtcccggttggtaacacaaaccgggactaaagatcaaatatgcccgttacccttttgaaccgggactaaagatcatctttagccccggtttttattgcatccgggactattgtggaaatcggccgaccgacgaaagatggtttctctaccagtgatcaccagttcaccaccatatggcactaacactgagacctcatcaggtagtagcactatagttttctctgtgtaaacatgaatgatgaattgcacaaaaagttagcatgaccagacgaatctatatttgggtaaattcagataaatcaggtgtttgaacagctgaaatttgggtggtaatcctccattccttctgcagaaaaacgtcaggaacaaaagcagactcgagctcatacaagtcactgaatttcaaacccttttctttttttttttgggaagggggggggggaagaaccttcggtccctcgcgtcgctctcgcgcaggcggctcgggggggtgaaaaaccctagccgcccgcgcctccactccctccccaccgcctcaccgccgccggagctcgccggcggcaaagccggcagcgagcagggaaggcggcgacgagacccttccttcctggcgactcccccctggcgcgacgtggacgggacgacgccggcgaagtccctccaccacggtcggaggtggcgacggcggcgcgatgcggggaggcagcagatccggcgcctccaaggccggatccggccaccccgcgcctggatctggtgcgacggcggcgtgaggtggctggggggcggcggcaacagctcagcggcggcgtggccggcccggtgcggcagcgtgggcgcggtggcggcggctcgacggctgggacggtggcagcctggaggcggtggcggctgggagcggcggcagcagcacgggcggcccggtgcggctgcccgggcgcggcggctgggaggcggcagctcagcgtggggccggttcgggctgcccgggctcgcacggctcggcagtgcggccgtccgaatggcagcccatggcgcggctcggcggtgcggccgcgagcccccatggcgcgggtaggcctcggcagccgggcagccagggtgccgctgcagtgccctcctcggccaggtgggctgtgcggcgcggccagatggggtgcggcgaccgggtgacggggcgccggtgggttgtgccggagccgaagcagcagtagcttcactggcgtcggctcaagcccagatggcagtgtaaagggagctggtggcggttggtcgtcttctccgttgccggtcggcaccctcgcccttcctggagctcctccccttctctgtggggagtttctgggttggattgaggcggcaactcgtcagcgggggaagcctaggctgccaaagcaatgccatccagtcccgggttctcctttcgtccaaagttggcgaggaggccggcgggtggtggaacggaggggtcctgggccagctctcaggggcggtggttgatgttggctgacggaggggcgtcagtgcagtgtggttcgatgaagtcagccgacggaggagcgttggtgcagtatggcggaagctacgtgctgccatttgtctgtgtggtggttctgagttggtggacggtgatctgcagtcaaggttgtagggtcccaggcgaaagcctagtctggtggtgcaccgggccagcagcggctacgtcttcgggcgtcgtaaccttcttggggcattgtcgaggggtaccctcttcctttcttgatgagcttctctgggtgaaaactacatcttttttagataggcgatgacggcatcctggatgtcgtgaccaccgtggtggcatcgttttcggagtcttgtctctgtggtgttgccataggcctagcggcattcggccacgcttagcgggggtcgtttggtgctaggcttcaccctcagcggtttgtgcttgggtggtagtgcgtggtgtgttgtcatgcaccttggtgcattgtgatgttttttttttataatttttactcttctttaatacattcggatggcctccttcggccttcccggcgaaaaaaaaaacccttttcttttgccagagagaacgaaggtatctgctgcgaaaacctgaggttctctttctcaggtatctccagtatctccttcccaatgtgaggcttgaacacaagctatgtccatctagtcatctactttactcagaggagaaaacagtgtgctgccttcagagcacctgatgatcttgccaatggcatactcaagacacagctactgattgtgggaggagcccaatcaggtgaaccagttcttgcagatggctcaaatctcacctacctttgggaaaaaaaataatttgccgatttgaatcgcacatggatttgcagtttccaattttaaagatgccacaactgatcatggtgtatcctgctccaaccattgcttctcctgttcgggttcagggcaaacctctagctatatcaaatgcaatctgagtggctccagctttgatttcggctatccagagatagagattggggaacttatcatggtcactgtgcagtgcccaaatttgttcatgttcaaacttatcacatgaccggacttgtggaattcagaaacaggatacacgcaactagtgaattcagtgttctgtctcgtgtcgagagaaatgtaatggatgagagcaatagaaggaaatgttgaatccaactcacttggaagagctgcagtatctagttccagtaacccttctacaatgcatgtttctccgaagcaaaagcttcggcgagcaacaggcaattcttgatcagtccatttcgcctcttgcgcattcatagctttgtgctccagccagccaagtgaactgaactttgaggctggatgtatcaatgtgatctattcgagcatagactcttggcatgaaatcgtggtcgtcatacagtgcccagatctgatcaacttcaatccagttgacatctctaaacttgccaaaatcacagaggtctggatagtggtaggcaatcacaggattgttcagtcctgacttttttgggaatatgcgaggagcgcatcattgtattaagaaggaataaaagtatgtacaaagtgggtcagaaataaaaaacgaaagggacaagatataggaggggaaacgaagaacaaaagcctaatctccaactaaatttggcgacccttctccattcacaatgactaccacaacagggattgcggctttagccagccgccaaagctccgcttcacccgtcataacccttgcaatctccgcccatgttctgctcttctggttgaagacccaattgtttctttccttccaaatcgtccacgctaccagtgttgcgatggtgtcgaatccccggcgatgttccttgaccatcttcttatggctgtcatacaaccaagaatgaaaagagggctcattgagcggtaaacattgggaatgcccaatagctctaagagcaatccaccaaagttgccgaagaagcagtatcaccagcttctttttggtaattctgttgatctcctattctccttcatgttctgcatttctttccccatggatgtccaatttgatggggacatgatgttcagtagatagacttacagctgaattatcaatatttgcacataattagaaccagcactaggagctcaagctgcagctggtgaaggcaccatgatctgctcaacatttgaacttgtttctgtatccatgtgttccctcggttgaagaaagcttaatgtactgggtctgctgtgatatcggcgccaaaacgcttctgacgaagttcggtaatcgcttgctgaagctaaaaggaatctcgacggcacagcctgctcatgcagcttgaatgcaaagaagttcttactcccttttgtttgagagatgtttagatttgtgtgctgctttcatggaagcatactcccttttgctgtcatactacaaagatctcttcatatgatcacacagtattagatgagcttctgaaaccaagttgagagcagattcagcaccagaaaagagtgtttttatcaggataaaagccacagggcaaagtttgtcatgttgatattttaatgtggtgtcatctgctgttgcctccacttgaagaacaccataccagtccaaagtctcagtaggttttcgcctctgctgaagaatgaacttcgcagacagttagcagctgataaatgttgtcaagatctggaaaaggcctttggcacaaaaattgtccttgttttccaacttcttcactgcaatttatctggcccttacagcctcttctctgttgcattccaatatgtaaaaaaaataaaatttagtgcatcagttcctgcatacatacaaaaaaaatcactaatagagaaatgtcaactgtgtgacacatgcacccaaaaaacaaggcaaaatttcttgtgcacaaacaccacctcctatttcaaagattgactaggaaacaatcttacaatactacatggataccaacatcgcatacatgtagtagtgtagcttggaaacaatcttaataaaaaaatcactaattatcttgatatgttctgggttattagtaatttatgagtcattccatttatcattctctgccaaacctagcaagtaggatgtgttccaagtcaatggtattggagtcgacacagaaaaataaaaaggtgtattttcgggacaagtaacagaatgacagaactacagaaagccaaaaatgagtagcgtgcatcttcgatgttcttacgtttccaattaaatcactgaacacactaaaaactgtgtagagtactacagttcctggccttatctttttctggcaaaattgggtacactaatttattgattacaatgtactgaaagaaagaaaaaagatactgactgcaagtctgcaacccttccatgggcattgttcagtaatcagtagcagaggcctctgcaatggaatgtcaggatgggttttgaacataacttatccctgggtaaaacattgatggtattaaggttaatacagaaagtacaggttcatacatacaggagcatgctgccagacaacactatatgctgacaacagttccaacaggagtcagggctcaggagccaaacacaacttatgtcattttgacaggatttcacaatagcatttgaaattaggaaaatcactgaacacataaaacacttgtagaaaagttgtactgattgcagtgcagccccttccacagggtggcagccagcagaggcaactgtaatagaatgcatgttatgatggttttgaacagggcttatccttggcaaaacatggcatttgacaagtaagagaggccacataattagaatgttagtaacaggtttctgaatagattacaggtaaggcatatatgtacacagaaaatgagtagaaccatacatcaagatatatcataattaagaccaaatttcagttctactgtctcaagagtctgctatggcattcgtaagtcatggagtgtctgttatgggtggaattaaagtgcttggtgaggttgcgaaggagtggtggatgggtggctgaggccctagcactcatggataccagagcgtcagccgccactgctgcctttgtgcctggcacacctctcatgccactccagcccataacagtgttcctatacaggaaaacatcaggaacagaagctggatcgagctcatagaagccacggagcctgccacctctttcttctgtcaaaaggaaggaggggattcggtgagaaaacctcaaacgatctcttgtaggtatctccacaactgtatttcgcttgtcaggcatgaacactgctctgaagccattaagttgggtcagaggagagatttttatactttcttccgtgcgcccaacaatctcaccgatgacaaactcgcaagtatctacgctgggaggagtccagttcttgtagatgcaccaaatttcacctacttgcggaagaatttcaatctgccggtttgagccattctgtcctgtatgtactaaatgagagaaagaataatttctctcatacctggctttccagtcccggattttaaatttaccacaagagactggtaagtcctgctccaaccaccgtttctcctgctcatattcaggagaagcctcaagccagatcaaatgcactatgaatggttgtcgctcgactttgcttatccaaccatagaacttggggaatttatcaacatcactgtataaagcccaaatctacccaggttcaaacttctcatatgtgcggtcatcttcgaagttatggaattctggatcaggatatgaaaaaatagttggggttggggaagggcagcctggcccagaattatttttttttagataatggaatataatatcccggcctttactcaaaagagctacagccaattattacatagtagttttcatgaacatagtgtaaatctaaatgaatagaacacaccgaagatcactattattgaaactagcctaacgtaaggagatcacaattattgaagtctatttgtaaatctccaaccataattggcaaatagttgcataaccgtggtctccaactttcggcatgcaaccttcagaaactcttcatcttcatcacacctttgtagttgtgcccaaaaccagagccaatgagttgccctgaaaataacctgcatataggaaaatgatggtgatttgtcaaaaaccatatcgttcctactcagccatattattgcccagaattattgccaaaaccattggcaacgtggccatttttgggcaaggatgagtttttttcagaagaaagactctccttttgtgcttcagaaagattctccgtttgttcatttccaggatcctttctactacttctactgtcagtcgtcaaatcaatgagtgtactgccctttttcttgccaagggagatgtaagagtccagggtgacagaaggaaatatcatatccatgtcaatggggagacaagaagtgtcaagttccataaaccctgccggggcacctactttttcatttccagttgtcctgtaacaggggatattatgagaaaatcgaagcaactcactcgatgctatcacaactgcagatttgtctttagctgccgcaaataaactcacaaagcctttaatcctgactaatgggataacagtgataccatcattaactgagaaacctgacaatatttcaacaacttcataatcataagaccgatggctgtctgcatctgaattccactgcatgctccaatccttataaagagcccataactcacccttattaagatatacttcataggcaatcctctttttgccttttgtccatgaaacaatgtgagagaacatgagtctgtcatgttgaccctaagcaaaacttaccacaagcaacaggttgttcttcatcagcccatttcttctcttcttcacttgctgcattgtactccaaccaagtgagatgagctttgaagctggatgcatcaaaatgttcaattcgagcataaaatcttggcatgccatcaaggtcgtcgtaaagggcccatatctgaccaagtgagaacatattaatatccctgagcttctcaaaatcatagaaatctggatatggggacggaagttctaaagaacaggaatgctcattctgacgaacagtattagtagcttcagcattggcattgtccttatcatctgtgtctgaagtttttcctttaccttgaatgtctacttttcttgtcataggaggtggattatattgtctgtcagctctatgggcagtatcaccgaacgttttcttacgattcaagtgaacagaaaatggaagatcattcttcttttacttccttttaccattggagttcagtctactgttgccatcaacatctttctttctgttagctggtctggagacaccagaggaggccgcatatatactgtgggagagacagattggctgagaggaatcaccaaacctgttggaactatcactattcttctgaaaggttacctttttttgcaaagaaagatcttcatgatgttctgcagacagcaggcgacaaacatgtgcttcagactgattcacctttagccgaatagctacacgatttgccattctttcctcatggctgtccactttgctggtgactttatgtccagcgggggatgattgtgacacatgaaacttgcgagctttttttgtctttggaccttctgaatgatcaccaactgatgacaaccctttgcaaccatcattgttattttcttccctattgaggaaaatgtcaggaacagaaccaggatcaagctctaagaagccacaaagctcaccacctctttcctctgtcaaacggaaggagagtatttgatgagaaaacctcaaacgatcttttataggtatcttcagaactcccctacgctggtcagaaggaaacttttatagttgcttccgtgcgctcaacgatctcaccgatggtgaactcgcatgtagctttgctggaaggagtccagtcaaatgtccagttcatgtagatggaccaaatttcacctacttacggaaggatttcaatctgccaatttgagtcaatatgtcccgtatttactaaatgagagaaaacatcatttccgtgatacttggttttccagttccgaattttaaatttaccacagctgataggtatatcctgctctaaccaccgcttctcctgctcctgttgaggacaaggctcaagccaggtcaaaagcactgtgaatggctgtagcttgacttttcttatccaaccatataacttggggaatttatcaacttcactatataaagcccaaatttgtccacactcaaacttcttacatgagcgtccttcttcaaagttgtggaaatctgaattaggaattgcaaaataagtggaggaataccttggcacagtgaaattgttaaaaccattggcattataaccagtttttttcatggatgtgtctgtttagaagaaagatccatctgatcttctgtagacagcgggcagcaattatgtgccttagagtgattctgcttctgccgaatggctgtatgtgttgcatttccttcctcatggtggtccactttgctgggtactctatgtccagcaggggatgatcgtggcacaggacacctccgagctcttttcttctttatatcttgttaatactcatcaaataaagaccactcatcgcagccatcgttgtcattttcttctctatccttaccacgaactttagttgggacaatatcaggaaaatcaatgtgtcctctcttccttgccagcatattcccttgagaccttgaagaacctatagcttttgcagcggagctcttcttcccaagtgcttcttttcgtctatgaggtgcctcatcggtggatgcttggatcttccattgataaaaaaaagctaatttcagtaacaataaacagaagacaaattccaaatgggcagggaaaataatttccctgcattaaatatactatgacacagtcagttaaacccacctttttgtgacaagtcttctcttcagtgaaagcaagttcctgtgtggtcaagcaaattgtagtgaaaactaaatgaaatagctaagtgcaacaaccagaaaacttatgcatcacctcttcctcgtccttgtgaagatctggatacagcgtcaaaattaaagcatcaaaattaggatcaaccttcaaggaatgactacttgcaggggtgcggcatgctgggcattcatcatttctgtaaaaacaatgtgccactcagattatcataaaaagtaagtaccacattctatttcaaaaccccagtcaggtctattctttcgaaatgacattgacagaattttagatgaataatgttagggaccatacccaagccgcatggatttttctatgcagtccctacagaaccggtgcaaacactccgtaattatccttgccttctggataatacctgcaatagggccgtaatgcattcagatgatcagctatgcacagtttgtgcagagatgctagttaaaatttcacagatgagaagcttactcaacctagcgtaataaactctgtctagttgtgcttctctaaaatatgtagaacatgagcatagtgatgtagcttttaccaaagtaaaacaggtatgttctctagtcatcttgttatttatcagtggacagcaattatacacaatatttttttatgcgaactatatacatacttggataacagaaatatgtggactactaactttgctgcttcacttttataaaaaatagtgattaaaaaatcttacatctacagaacaatatccaacatgccaatgacaatatgaagtgaaactgtaaagagggaattgtgcaaagtaaagagggtttttatctctacatctggaagcaagttagggaaagcatattcttacctaagcatatagggcactgcacttccttccgtatatccattaacttcactagtataaacctgtatgagaaacaatatttagataccaacttagcccgcgcgaatgcgcgggcatgcatcgtagatttgtttgatacacttataaaatgaaaacatttgttgcacatcaaaaatatgatttctccatatgtttttgatcagtatttcttgcgtgaataattctcagcaattatttataatcttcttcatcgtcttttttagactttttttcattggaaaacatatataccattttttttgcgaggaacatatataccaaatcaagtgtaacataaaagtggtgtttttcttttttaaaaaaattggattactgatataatgttgtcaattttttattaatggatggattgggtgggacatgaggcttttttagcctaacatgaatacgctaggatggctaaatataattggacaatattatttttggaatatgatatatcatcaatacatgctagaataaaataaatagcggaaggtggagaggaggggatttgttttcttatatatataaatctactattataaaaatttaagatgtttttgccgaacaaaatttcgtaagtcgctcctactccgatttcaattgcccgtgtcgtgtgtcttcctttccgaaaacattaaaaacgaaatctgctctcaaactttttcgttggtgcatctcgaaagtcgtatgtcaagtccgcctgcgcgtcactcggatctccccagcacgtgcccgcgcatgacgtgcccaatgtcgtgttcttgttcccagacccagccgtgtgcctgtgtccagtgtggtttgacaggaagataaacaacttagtgtgtccgtatgtaatttggattaaggctgtgttcatttggttttgttcggaacaaatctcccgttcatgaaaaatagagtggtccattagagtgtgattaattaagtatttattattttttaaaaaaaaattggatctgccaatactttggtacgtcatctgtgtctgagtcagtttttaagttagtttgcttttggaaatacatatttgtatttgagttaatttttaatttttaagttcgttcgcttttgaaaatttagaaggagttgtataagaaatttcttagaaaaactcgcatactaacttgaaacgatcggattcctaattgcagctcataattttctaaaaacagaatatatatccaagcgaattctcacagaactaaaataatattcacccgttacaacgcacgggcatttgttctagtatatataaagtacatctaatggtgagaaataatgggtccatcggtttatatgataaggatggcaagatgtttttttttcttggaaatcttaggatattctctaatttatatagtgttatgcagtgtttgtaaaggtaacatatgctggctttatactgaaaggaatcatcatctaaagtcgattagatactatgtagaatatagaagatcatttggcttgtttggattatttgaacatgctatttttttaaagaaaaggacaattgcttattttaccctacttttataagcccaaaataccaatctaaccatatttttataagttttctcacttgaaaacagagtcagatggtaactctaattttgaaaagcacagtaaaatgagcttgaaaaaattggggtcatagttaggtttctaaacacgcacggataaaagaacatttgccccttttaaaaaaaaacaaagtaatcagaccgttttctctaaccaaggcttcatattatttttataaaatagcaactcttcatcttcatatttgagataattctttttcatatttttttaggcaattcggataaaatgtaaaagaacagcggtttgtttgaccatccaaattattttttaatgtagtgtcttagactattcatatttttactattttttaatgtctagtttagttatacatgtttgcaaaacaatatataatggcgcaacatgtgttgttgaattatttcttagtttttatggcaagtccgatagtatgtaaaatggcaacggtgttgtccatcaataaaaacattgattgaaacatgaaattacaatgtttctttggataatattgatttaatatagatatccatgtttgtagattgatgtataatgacaaaatatgtgttgacaattttttatagtattccattgctatttggatgacataccaaatgcatgggtcgagtgtgcctaaatgtcatattattcttttatatagaaaaatatagacatgtgtattttaaattgctggtttaaatattaatagagtaacatttggattatgattttggatcagaaatcatacatgtagtataaaattacgatctttcaatatctataattatttgttgtttcggttttagtttgacagctaaagatgaggagggagagactgggaaagaagaaataatgtagagctcgagcgagagattggaaggggttcgtaatactgtgtgcccatgatggactgatgggatgtacaggtggagaaaatatattaggtcggggaactctgtttttcaaatctttctaaaaatctaagtgaaaaccaatggttttttttctcagatttcaattcttttctaatatttaaaacatgatgtgatggattcggatttccggagaagatctaatgcttaaaaatagtagatctatcaatttatttttttcctttaaatttctgaaaaaaatttctaacttgaaaatgtgatacgtggtaatttcatagatatttgttatgaaaagtgaatttaagataacataatagatattgtcatctttttattattttgttcttatttgatttgtcatacagaggacaacggttttagttgaaaatagtagacttaatttcttagaaatagacttaataggttcactggtttcaactatgcttatctttctaatggttaaaataataggtccgaaaatcaataattcgacttttatttttttcttcataatatttgttctgtactaaactactttttagttaccctaacaaatttgttagctacaatagaaaggtgagatggaggaagcgtacgtacacgcacgtctggcctggactggtgggaaacagagagggagagaggagattgtggggtcctttttttcctctaaaaataaatctaatattagaaacagtgggtccactaatttattagattgccacgtggtggtttaggagcgtttgtaggaatgtcacgtagcgtcttaggagcgtttgtagaaagtttaatggatttttaatatataatagatagaagatagatttcatgcattggctaaaatcaaggtcaagtaaacactatccattattgcattggttactcatcaatattctacaatatatggaaaacagggaagtgtaccacaagattcttttcatttcattaaaacagaagaattaatagctactattcactgaaacctggctagaaggtattcacaaggtgactatacaaagacagaataaaaatatgattccattaggcattagcacatcataagtaaattgagactataagggcatgcacagcggtcatcaatgtgctgtcttagcaagtgtctcgttcaatagttgctaacatggaggggagaaaatagagttgtatcttcacaaaacaacaacatgagcgtgcaggttaagaaaaagtagagaggataaaataatctaagattgaactccatgttatatactatggtcatctgtccatgctgtcttttgagctagcttagttgacacgtacctataaaatgtggcagtggtctcaaatgttgaacatgccctaaagggcccttaattgaaagcttgtgaagtaacaattcacaggctgaaaaaacaaaatgcgcactagcagattcacgatgactgaaaagttcaatgaattcaattaaccagcagaggcatctatgcaggaccaacaaaatcgtaaaaaaataaggcaatacgaggtctacaggaattgcctgcacaagaactcagtttgtgcaaaacattcacctcatatttcggagaattgcctaaactgtcacatgtactatgtggtttgtaatgttacaataaaactagtactttcacacagataccatcaattaagcactcataatcttaacaactccctacattacgaatcttggggggtaaaaaaagaggggttttctccctatccgttcctccttgcgaccttgcatgccatcgttttctagattttctaccaaatcctatttaaaagaaatgttgcacaaaatttctaattaccgcgcaacctccaactgctaccccaaaaccccaggaaatcaaacaggaacagcatgagctgcacggaatcgaccccaatattcccaataaaaaggaataacgggagagagaaagagagaaagggatctagagcatagaaacaacagtcacctgagctagggggctaacaaggtcgtcggcggcggccggagccctgggacccaccagcggcgaggtggattggggcgggtccccgtggcactgtgaggagtgagggcgtggatagtgtggctagtgggcagaacttcaagtaggaggctgtgttccatggtaaaatgtagcgtcgcattagcatgattaataatgtattaattaaaaaataacaataaattaataagtttttctaaaataattttttgtgatactttcaaaaaatacatacagtttaacagtgttagaatcgtgcgcgcaaaaaacgatgggtagaagttgagaaagtgttcaaagaacactgttgtggtaaactcgtaatcccctccaaagtccaacagggtattttgatgggaaaaattatattgtttcatataataggaatttaactaacatttactatgttaaaaatataattttgcaatataaattgttagatttgtattcaaaagtcttgtactaattttttgtaatatatgatgaagttgagttttctttaataaatgaccaatgataattattcagctatatgatttatttaagtaaaatgaaatgagcgtcactagaattgtcattaaaaagtgattactatgtttgtctatttgcacaaatatttgttgtcttgtattttttgacagagggagtaatttgttaaggactacattaaatctttcagaagtcgtttacgaaaaactttaagatgtatataattgtagtataattatattgtacctctactgtaattacattgtgactaagtattaaatcgactagaaaccacgtctaagccctacgagcccttgctcatgagaggaagatattgtcatcagctttctagcaaatccataaaagaaatgctttgaactggagtgtcaaataaaaacgacgggagagggagtacttttttttctcataatgcaagaccaggaatattttaaattttaaattttatttattaaaatatttacaaaaatatatataaagttttataaatctacacccctaataccctttgagagggtattttttaaaagtcattccaaaggactttttttttataatgtggcacacgtccgttgacgtattctaatagtcacatgaagggtggccagtcattttgcagacaaccgcttgtcacctttccaaagagctacaaggaagccagttgcaaaataattgagacaggctatttataggcaggcccttgccgccctcccagagaacgttggagtagtagatttgtaaaactttaaccataaattaatttttaaaatattttaataaataaaattaaaagtttaaaaaattcttgttccaagccagtttgctttatcctccattcctcccaatagcaaacacgtgtcgtaatctacggcacgtgattcctctttgggcacttggtcacaaaggtgctatagtcatgctgtgttctgaaattcaaatttacaggaatatggaattttcactggaggctgaccgaaatttattaaatggggagatagacttatcatcatatagtcatagagattccgtcacgtacaatgatttagctatagttactaggggtactgtagcttgtagaaaaaaaaaaccatttatacaaagggcgaatcaggatttggccaacccatgcattatacctttcatttctccaatctcagagaacaccacttaaaatttgaaatgaagaaaaagctcgtgcactgatctcacgcgaaactgagtacgacgaaagtgcatcggataacagaatacctatggaatttcaataaaactcttagttgcaaatgctcagcagacaccagcataggctaacatacttcttccagcgaagagataatgcttcttttctagttttatcagctgaacatttagaacgttggcaccgaaaatattcacaggtgtacccaagttcatgtgaaaacatcactcgtaaatatgcagtgcgatgtatgtacagcagcagaattcatacattgcagccaaattttagaacagattatgtcacagaaagtagaaacttgatggtacatacaatggtcatgcagacaatgctgcacagtttcaacggtagtcaggagccaaagttatgtaagacccacatgactctaggaaaaacaataaacacatataacttcagaaagagcaatactaattgcttgcaagttgcaacccatatattatgatggttttgaacaggtcttatccttgggcaaaaccgcaaaacatgacaattgccaagtagcataggctatagaatttcaaaagttagtagcaggattctgaataaacaacagatcaggcatacatgtacacagaaaatggatagcagcatatatcaggatatattataattaagaccagatttcagttctactacttcaagagtctgctttgacgttggcaagtcatggggtgtccctgtagaggaaaacgtcaggaacagaggctggatcaagctcatagaagccacggagcttgccacctctttcttctgtcagacggaaggatggtatttgatgagaaaacttcaaacgatctcttttaggtatctccagaactccactttgcctgtcaggcttaaacaccgctctgtagccattaacttgggtcagcagagaaacttttataagtgcttccgtgcactcaatgatctcgccgatggcgaactcgcacatatctatgctggaaggagtccagtcagatgtccagttcatgtagatacaccaaatttcgcctacttgtggaagaatgtcaatctgccatgttgagtccctctgtcccgtgtgcactaaatgagagaaagtatcagttgtctcatattgggctttccaggtccgaattttaaatttgccacagcagactggtatgtcctgatccaaccactgtttctcctgctcctgttcaggacaagcttcaagccagatcaaatgtactctgaatggttgtagctcgactttgcttatccaaccatagaacttgggaaatttatcagcatcactgtataaagcccaaatttgtccaggttcaaacttctcacatgtgcggccttcctcgaagttatggaattctgaatcaggatatgaataaatacttggggagggacagcttggctcagaagaattgccaaaaccgttggcatcatggccatttttgggcaaggatgtgtttttctcataagaaagactttcatgattttctgtagacactgggcggcaaatatgtgcttcaggcagattctcctttttctcatttccaggatccattctactacttgtactatcattggtcaaatcaatgatcgtactgtcctctttcttgccaagggagatgtaagattccagggggacagaaggaaatattatatccatgtcattggggagacaagcagtgtcaagttctataaaccctgctggggaacctactttctcatttccatttgtcctataagaggggatactgtgagaaaatcgaagcaactcactcgacactatcacatttgtggatttgtctttagccgccgcaaataaactcacaaagcctttaatcctgactaatgggacaacagtgataccatcattaactgagaaatctgacaagatttcaacaacttcatactcataagaccgatggctgtctgcatctgaattccactgcatgctccaatccttataaagcgcccatacctcacccttattaggatatacttcataggcattcctctttttgccttttgtccatgaaacaatgtgagagaacatgagtctgtcatgtgatacctctgttgaccctaagcaaaacttaccacaagcaacaggtagttcttcatcagtccatttcttctcttcttcacttgctgcattgtactccaaccaagtgagatgagctttgaagttggatgcatcaaaatgtttaattcgagcataaaatcttggcatgccatcaaggtcatcataaagggcccatatctgaccaactgcgaacatattgatatccctgagcttctcaaaatcatagaaatctggatcagggaatgatagtttttcaaagcaggaaggcacattccaaccagcagtatcagtagattctgccttggtcttactatctgcatctgtaacttttgttttatcttgaatgtctactgtgctcgacacatgaggtggagcagattgtttgtcaccactagtgccattattgttgaatatttgctggcaattcaagtcaacatcagatagcacattattcttcttttgcttctttctgaccttggagttcatgctgccgttgtcaccagcatcttgctttctcctagctgatctccggagactggagggtactgcagaattgggcactggaaatgaatcttctgtaccaaagttctttctgtcaaaaacatttggatcagcatggtctggcttgaatcttccactggcattctcatttgcagtttgggcagaagattttctttgattcatcattgactggtttgctttcttttcaacacttgcactgctatcctcttttgtggtttccttccattgtgccacatttacccgtggtttggcatttgtgcctccacctgtcgaatgaagcttcgaatgaccaggcacattcatagcaggtgcaacagatgcatcttctctacccaacttttgcctgtcaatagtgtctggacaatcaggaactggtattgaacatccacctgaattcccatttgctgttggtacagaatatttatcttgattccttgctggaaattgatctttcccccttgtcatctctgactgaatagttctctcatcactgcctggccagctatatgtccccggcctcacatctgtgtttccacctgtgcaagaaagcttcacagggtggccctgtcgactgatgggatcacgccgttgatttggaaacatgtttgctggaaattgagaactataaggtacatttggtgtaggcacaggctgttcttgcaggttgtatgcaaaaaaattccttctgcagttcatacaacagacagtagtatttatggcattgttgtagtactgatatcgcatctgacaatgtgggcacattgtccaaaatgcatgtaagtatacaggtacactgtatttgtttgcctgagttttctttgtgggccgtgtagcttgctttggagcctttctgggaatattattccttttgatgtcataaataggacgttttgttggatcacacaatagtgaatgagcttcagcaaccaacttgaaagcagcttcagcgccagcgaaactatttttgtcaggatgaagtgaaaaggcaagcttgcggtattgctttcttatggtagcctcatctgctgtcgcctccacttgaaggattccataccagtccgtctgtccatttaccgttgcttctgctgcacaatgtacatgacagatatttaacagctgggatatgttctcaagctctgggaaaagcttttgagctttaagaacaatcttttgggcaccattgaagtctttgttttccatctttcttaaagcaatttccctggccctaaaggcctcttcgcggttgcactccatcatagtcttgcacaatacaccacagaatacctcacatgaaatgatctttcctggaaatgagtatccactgacacatgctctacatcaaatactatttgaaagtagatgtacagctacacccatgacacactagtccctgcaaatttagagtagaaaataattcataaactggaaatatccccctaccataccatcagtggtacaatgtaatacagatatgttgattctatgaataatattacaatgtacaattaaaactgaaggaacaataaaaaaataagcacataaggatagccagattaaacaatgaaggaaatgacttatacaacattaataagcagactctattgctggctccactctattaatagtagaggtaaaagatataaatcatatggcaggatcagacattcaagaatgttcatgattctatctggaggccgcacgattcatacaccaaataattctcttcgtgtaaacaggaaagtatatgttgaatgtacatagcattgaaaaccaatgcagaaactgaccaaccatcaggtgagcaaattggagcttatagtctgcatataaacctattaacaatacacaccattctcaataaaaaaatgttttctgacacgtccagttacaccccacaatgaaggcagtattacatagtcgatagctgcaatctgtctcatgaagttctccaaacacgcgccagtataaaacggtagtaactccacatggcctaaatcatcaaagcgttccgaaaacactaccaaacaggccgggtttttccttttagcgacagtactgtgttggtgtgactaggcttgaaagcattagataacaacaacgattaattcacatccaaatcagtcatttacaacccacaaatcggcagcctactatgactatgagcaaacaaatcagtaactatgactatgagcaacgaagcaaaagctactgagttagtcactgaccttcaatgttcaatcgcctgctgccgcgagactgaagaggattaagcaatcagaggatttggaggagaccagatcgagaggccgagacagcggcgggggtctgcaccagtgaactcgatttcagactggataaaacatcgagtaaaggaggcaccacgcacaatctcactaactgcacatatcaaacgaaatccgcgacaaacatttcacatatcggcaagaacacagaacgatttgggtttcggtcgcggcgcacaccaaaacccacccccaccccccaaaagcaaaagctagagagttcccttaccagcgcaagagaaacgagaagacgacgacgggggtgtgtgtgagggggggagaaggatcctcggaggagggggttcgctccggcggcgggaaggaggcggatgctcgctcgccggaggacggcggcgcgggcggagggggaggggaggaggttttcgaacgaaattttggtggtggcgccctcgtcccggagttcccgcctctcgccgccgccagatgaaagggaaaatggggaatagcgagaggggaaggggattgaaatatctagggcaaaatgggcaatttgggtatttcacattggtgtggttttttcaaaaatgaccctcaaaactactcgaaattgtattaacgtagatttatttccagagatgctaggtgacgtgattaatgctcccagagatgttaggtgtggtgaataatgtgccttgaagtaaagtgatcggtacatagagtttgtagcgtaacgtgtgactagtcaaatagcttaaaatcactctatgacacttctaactcttatatagtaataaatcgatagaaataagttcttttttcgaaacacgatacagtcgcagaccctgaaagacacgtgtgtgcatccctaaaaacagtggtggagccagaaattatataagactagggctaaagtagggctcgactaacggagtattagttttctgaaaaatttacatggtgaatcaacaaaatttaagcaagtttttaaaggcaagcctagggcccaagccctagccgccctgcctaaaaacgtcatacatgcatacattacctatatgagcacattctccaaagactgaactgatatatcttaagattgacaaagttattacagccatcatgttaccaatggattacctattactctctctgtcccaaaatataataactttagcactaaggatttgtcacaaaatataacaacttctccaccatttacttttcccacctacccccacttctcaagcaatcacaaccccttcctgttgatgcaaaaaaacatacggcctgggagatctgcttagctccagtgtaggtccaagatgttgatgagatgcggacgtgccagtcagtttgatcctgcaactgacaagacatgtaaacatcaaataagacagtcgatcggctgacaagccgatggaataattctagtcgatagccgatattagctgataccgattccagccgatgtcgatagggttttgagcaatcggctatatgtccaatgcagataatgatataaagacaatcggttgatgataataaaaaggggaaattgcaattttaccactgctttgaatcgttattgcaaaactgccactagaaaattgcaaaaatgccactagaactggcattcgagtggcatccttgcaaaattgaaaaaaacggtggcaaatttgcaaatgccccaacaataatataatccaatagaaaccaatcgactaataataatatgatatgataagtattgattcgatggttaaagcatacatcggctaaaattccgatgtcataaaatccaatcaatttagataaacagtgaaacctttgttgcaatcggctaaatccaatttgtatgtaatctttgtaagccgatgcaatgtccagataacttatcggctagcaccccgataaaacactagcattaacttatcggctagcaccctgataaaacattagcatcaacctatcggcttaacaagatttctattatcaacaacaatctagtaggtcggacctaaccgatgagccgatagatctatctaatgtgatgaatataacaaatctgtttataacaacattgtaattatagagatatatcggctaagacagaagatcggatctaaccaagacaatcccaactaaaccgatgcgcctctaaacacaatgcaagagatataattgagatatcaggtaggcaaatatatcaaccaaaccagagcgatccaagagatcgaagcgatgcagccttgaacaacaccaatgtagccgatagattcaccagggccgacggaacgtaggacttacccctttgtcgaagatcgaactgaaccgatgcagccccgtgtcaggtgccaaattccgccggttgataagtaaaacctcagaaaggagggtggtgatgcgccggagtagtattgatcgagagataaattacaatgaccccgggtatacatatttatacccatgagtagtatagtccttgtaagataagaaagaaactttactaaagataaagggaaaacataaactccttatcggatactaaagacactttcctaaagataaaaggaaactaaaccctacctaattaatagataaactgccatgtcgcatcctccttgaacttggactcttctagataagcttcatttaattgatctttacccgaatccatcaagaatacaactgttggcgattgatagtttccatcggtcgattctaggattttgaagtcaatactgactctaagccgatgattgctccgggcttaccaaattttgtcgttaacacttcctatttaattctacttactttcttaataaccgtgtccaactctaaaactctctatattctgaaacggagggcgtattaaaataataaataaccgtaaatgtgccaagtcaacttatagacagatttcatcaaaaaaacataaccaactaagctaggcacacttcgtgcaataggaagattttaaagaagttagaatcgaatcctcatgattatccaattttaaccaaatttcattagctacttgctagttgctatgtgttgcttagcctcgattcccgtatctaaaatgtgggtcgtagagagtgttcaaatggctaatggaggtatcgatatttttgctgcactttcacaagtacaatttctaaaaaccttttcattctagtattgcgtggacaactttttaaaaagttatttgctaacttgtaatatttaattaatctacgagactttttttcctttgttcgaaatctatcaatcatctagttagaatgcgcccttacccctttcttttctagcaccacattgatcatggccttatttacttaaaaaaaatatgaggatgaataatgaagttgtatactggcgtatcattttcatatatttctttataaggcataccttctcataactattcctattatcatatcatgcataaaaaaatcactatccattagaaccaatcaaaactgttgttacacattggatttttctattgtacttcaaaagctatatagttcaaaaatcaaaacataatggcggatgaagattaagtgcaggcacccaaaacgagaaagtatttagcacatgattaatggagttttaattattttaaatttgaaaaatagatttatttgatatttaaagcaacttttatatataaaaattttgcacaaaatgcatcgtttataacgaaactgaggtagaatttgtatcttcatcataaaagaacgggccttaatatgatattcccttgttacttccttcttaagtgtatcattgagaaaaaaatgcttttgtattggagaaggtaacatcaagaaagattagaactaatgggaggcatacacaattgtagtaatgggtaggaaagtggcatgaagatgtgggattaatctatatatcccatggaccactgcacatgccatgcacacaccacaaaaagcttgtgtccaatatgttccttttttatttctatggcccatagcacatgttaagcacacaccacaaaaggacaaattctttgtttgggtttaggtttgttagcttataattttaacctgacattttggcatataagttttataagccgatggtttttaagccattaagtttaatggtggggtcctacctttacttcacgtaaggacaaaactactctaatctagattttggcttaacagtataagaatggtttatggcttttaaaaaactactcgatgatacatttttcaaggaaattactcgatgccctattcttttcaaggaatacatgaaacatacgtttccagagtatcaagcatttttatgaaaaaactttctatttatacaaatttcttagaaaattgttttaaatccattttcaactttacaatatttaatttatttttaatccttgaataatttcacaaatcattcctctatttagctatttagcacaacagtatagggtgatatagagaaaaaaaaccattccatgtgagcatcatgcccaattctatcggaacaacaacaacaaaaagaaaagatagcagctagggaaaaaaatcattttgatgataagcccaattctatcgaaatatggaagaacaaatccttctaagagctactaactctgtcccatattatagctgcctttgctattcaaattttaatagcaaaggtgctataatatagaacggaagtagtataaccattttaatacattggcatgatgaattgatgatacaccaagaacaatgcaaagacatcagctcaaccatgcaacccccccccccgantggcnaaaatntaaaaggggctgtccaggcaccaaaatctttctactggaccaaacctaaaataaaagagaggccttcgttgttgaaacctcagaccaccagtaaacatggaaaatatagcacagcagcacacttatattggttcatctccctggctgatcatctctccgtggccctcctgctggctttgccatgaatgatctgcgtaattcatgagagaaaacattagcatgtactttttatattacatttaaccatcatcttattaaaaaaatagtgtaaactagctgaatgcccgtgcgttgcgatgggaattaaataagagaaccctatcatacactttaaagcctcgaaaattaaaataaaattattctcattgtaaaatatttagatcatattatttgtcattatttttacctcacttcaaaggaaatttccctgtttgatggcttgaggttagggaatggacaaaagtccacttacctcatgttcaggggatccacatgacagtggtggtgggtggtggcaaattcaccacttaccaccaccattagggtcttttaaagagtacatatatgcaaaaatagaagtaacgcttaaagtttctttatgagaaagcatgtcacaacaaaataattaaaacttatataattttgtttaatgagacaaattctcaaacgtcaagccaaaagtcaacatcgtcatgtattaaaaaaaatggagagagtatatgagaatgatttctacttcgtttttaacacagccaacaacataagatagcactcttacggtcttacctggccaacccgcagaacggtacatgcagcatctgcagagtattttagagaacaaaaactgatgagtgaaaagaaggcacatgataagaggtgggctaaaacaagcttaagtcctggcagtagacaaggaaatataaaaattgaattagacgcatggatatcatgaaaagtaacaaagggaaaaacattgcatgtgcttcccacatagtaagtacacctattctgccgtactagaaggtatggacacatagacttactttgtaagttgtaacatagaggtcccatattttcatgatcgagacatccttgcaaacaccttccaaatcaataccagctttcgtgtttcaaccagcatgctcggtataaacagaagatattaactccagagcactaagcccagcattttcagcctgggttcttggaaccatttcaaaacttcaagcaaattttgcaatggcatagtggtccaacctgcataactgttaaccatcaatataggaagcaaaaaccgaaaaatgtatgtactaaggacattgcataacaatcataaaccaaggtacataaacagaagctcatgaatcaaatgtgtcaggcataataacgcataaaactttaaaaaacaacaagtgaatacattaaaaaaataatctggatgggtaagacagtatggacaccttaatatacaattaagctatacctggactttatatagtttcattgccatagaacaggagaatgttagcgacagagcatattatatttattgccaatg

SEQ ID NO: 22448 - DNA, 17237 bp, Oryza sativa
  unsure (1)..(17237): unsure at all n locations
tatatttattgacaatggactggagatggaacatcttttttggccctgttctttacagctactagctactcctaaacgttatattttttggaaaaaagtttacatggaaaaaattgcttagaatacatttaaaaattcattttcaactttttaatattttttttatttatttgtgccctcgaaaagctataaaaaatcagaataatctttaatctataagctattatctacttcgaatggggcctttatcatcatgttccatgcatgaaaattatttggtgtaacaaatatactaccctgtttccttcagagagaattccttcaatctctttgccaattctatttctgttgctgcggcaccaggaataatccgactatccctgcacattgactgtataaacaccaatagtccgataatatctcagcaaattaaacattaaaacagcaggtgtgttccaaaacaatgacaggaagctgatttacacacataccttgtaagtgttgacaccgtcatcaacagctcttccgagatcatccagtatactatcagtgctgcctcttaagacagcaatagccaccgagtttcgaccttcttcattcttgagaacagttacccacaaagaactaaacatggtaagaagaatgaggtcatgtctattggaaaaagagcagaggcatgaaatgtactcgaacacctccaatatcttccagcgaaacagagtctgcatatcctaattcatccgcatttggctggctcagtttcaactgttttttggaagagcactggcatcagcatatacacatagtactgtgaaattgagcaaaagcttgagatcagaacttacaagtgcaatagcccccgtagtacgacaaaacattctcagtttaaattttgaattcattttcctaataataatattagcctgaaaataaaaggaaaagtaagtactcctctaaaacagaaccaaatcaagcatgaagtacccaactttgagatgccttttaatattagaacttccagggtttcagttgagtagagtatttacaatatttccaattttgaagtgtagataagaaagatgcaaagcactgacttgttcacaaaaagtagaagtggagtattgcaaccatccagcaaattcacagaagcacaaaatagtgtaaccaaagtacgtgaattacatattttaatcactctaaaaaagaacaggtccacaaggttgctgtttattgcaatgtaggtgtacagcctctacttgatcatgtactcaatagtccatgacaagggcagtccatatgttagattattgagcacatcaacagcaaaaggaaggaattgtaagaaataccatgagtattctaaagcaggtttacaactactatgccatataacaagagaagaagagtgttatcatacagtgccaattaggccataagatcataactaggtggagacaattgaataccggctaccaattttagaaccctgctacagtgctaccttctaagccttcaaagcttattgacaagatatattccactaaatctaaccaccaaataaaggcaagccttaagaaaaccatttacaccatcagagtgcaataacaaagaaaaatgagtatcatatctcaaataaaaatttcaagaagatgaatcattgagttactagaaactcccgattcatagtggaaagctacaaagataagaacaaaaatatttgatctcagatgatgatatacttcatccatgaaagggacgacaaaggaaaatagaattatcaccacctaatgtatgctactatacagtgtgggaacagccctgactaaacagtatcatcaaatcaagaatagataatgtatcaacagactggcaaagacacaccacaaattaagtgtaacattttgttctcacctttgccttctccaccctttttgacgatgctcccaacagcgccatttttcagaaccagcccgtgaactacagaagagttatgcaaacctaaccacctcgaagtagcttctcaactctaacattgtcaacgttgaagacttgaagttagcaggatttttgggcagacttgcttacaggcctgaaaaaccgtagtacaaaaacccagctactagttttcatccatgagcgcaaaaaggtccctctcacgtaagaatgcaagatggtaacttacatcagctagaagacggcacaatatatcctcctggcctgaatttcttgatcgcgactgtagatcttatccgcaacacaacctcctccttgttcctcacatccatgttctctgaacctttctccaccagatcttccaagatctcaataagcatgaataaatagcctgccatcaggcaacagggttaacaatacaaggccagctcaatcaagagggtaagtaaccttattgatggccttggtgtacacagcgcgacgatcacacttggatgcaaccccatcctgacaagctccttagccttctcaagcagccccatcagcaaaagatatggtgaggttagctccatcaccaatctcctattgctgagcaagtaccaggatcttagcagcagggtgctggacctcaagctcgttcacaattgttgcagcagcgtttgtgacaaagagcttgtcgagatggtcaatgaccatcttattcaatcctaccacaacagaacaacaacaacatactccctccatccctaaatgtttaacgttgttgacttttttaaacatgtttgaccattcatcttattcaaaaatttaagtaattattaattcttttcctatcatttaattcattgttaaatatacttttatgtatacatatagttttacatatttcgcaaaaatctttgaataagacgaacggtcaaacgtatttaaaaaagtcaacggcgtcaaacatttaggtacgaagggagtagttaagaaactagcttctggtgcttatttgaacctgtcaaatgttatacatccacagacaaaatgtagcagaagagcatgtttacgcggagcaacatttggcaatcaatagcgggaaatttaactgaactcaacctcaaaccgcaagacaaaagcaaaccatttttttactacccaaaaggccatagaattttcctcagcgccattatactaacccaatgagctcccacaatattatcttcaactcatcgctaataactaataactaatgtcttaacaatcaaaatccgggctcttctgcagctatgacactaatccaagttggatgcagtagcagtaacacggccacaaccctaacccgtttctaccaccacgccacaacactcacctcctgagctgcgggtaacgagaaaaacctggacatgaagcggggaaggaaggggagggggcctcaccgctgctcgccggcgctggggacgagggaggtggagctcgcggcggcgtcgatgtttgagggcggcctcctcttctcgatcgagaccggaggggggggggtgcttgtgcccctcgcctcgagcatggtgctcagtccaaccatcgccggcggcggacgcgagaggtgacggcggcgttggaggagtatgcgacggcggcggcgtcgcgatgatctcggcgatggcggcgaagcgcgccgaccttgtgggcctccattttgggcctggcccatgaggtccaaagctgcttactactctaggcccaaaatcttaatgggctaaatttggggcctgaaatttagttgactgacaataaagtgacctaatgctttttaaaaagtaaatttcacaaaactttaatatatttaaagtgactagcaaaaatgcccgtgcgttgcaacaggtgaaaaaattctaatgataatatacatttttcatgcataatgatttcaatgacaatatttgtattttaatgagcggcttgtttttttttataaacagtgttcgcgattttctcaaaccattttttaaaatggcacatttctttctaatattttttcttagcatgttttttttttgctttttttactgacgacgaaaaccatatttttctccctctttttttgcttttttttctcgtgtgttttttgcctattttttctgacaattattttctcacgcgttttttttgcttttattttcgaatgttcttttttgcttttttccaatacaggagaatgtatgacgaaataaaagccgtgtagtagatggcaaaaaattgatggattctatccgactcaagcgcccatcaatttagcgtttttctgatagtttttcagagcgatttgttttttaatagacggtgttttttttcttgcgaggttttctcaaaccattttttagaaatggcatgtttttctggcaattttttcctcgcatgtttttttaaaaaaaatttaccgacgatggaaataacttttctcgcatgtttttttatttttcttatggaagatgtaaaacctttttacagtgtttttttttttgcgcttttttctgacttttttctcacgcgtttttttgaactgtttttattttctcacgcgttagagtacattagagatagagaagagatatatactgattagaaatcagattttgtttcacccattttatttttttctcacgtgcactttttaattcatacgaactagctttttattttttacgaaccatttttttgccattttcttagggaatcggacgaacttttttagatgtttttttcagatttttttttcgcctttataggaatcagacttttttttccgtttttaaaggaattggatctagcttttttttaccactttttgtttgccttttataggaataggattttttttgttcggatctatggttttttttggccacataggggaaacagacttttgttgttgttgttgttgtttttctttttttctttatttttttgtggcttttatttttctttttatgcacctttcttcctttgttatctcccttttattatttttttaaaaaaacgacctcaagtaccttattgcaagattatagggacttaaatgtaaatataaaaattacagggactcaaatgcaaaattacataccaaaaattaaaatcatataaaaatagaatgctctcgacatgtaggttccatttttgcaaacagatctccaatctggcacatcaatttttttcaccaagatgtatgggatatcacggtatagattaaaaccgtatggagtggtgcccggatcttggacaagcctagaggagtggtgccttttattttttgtttttaaggggaatcggatttagagttggatttttttcgtttagagataaagaatcggacagattctttttttttatatatttttttcgtccttatttttacccggagtcggattcgtttttttccttttttcgcctttttttttggatcggacaggtttaggttttttttttcacccggttttttctggatcggatagaattggttttttcgcccggttttttgttttttcgccctttttattggacaggtttggtttttttcctttttttccgcttggtttttttacggacagatttggtttttttgtcccgtttttttacggacgatggaagcacctcttatttttttaagtagtagagatatatcaaaagactacaaattgaacaataaaatcataaactacaagttgaaggcaaagtatcacataactactgatttagtaataaaattatcactgaactatagattttagtgcttaaatccttagcactaatattatgtttgagttaaaaatatgagaaaatttcttatttgccattgaaagttcacaagtttccttatatgccatcgaaaagttgctattcctttatatgccactacttgaactttttctttccctatatgccatccatgtcatcatcttgtgtaatagggatgcaaaagtacaatattacccttttaccttttaatccctcgaggggttgttcacttgttttttttttttgcatgtcatccccataattataaatttttttactaacaaagaataatatgtaatatatcactacacaaatatgaaagtttaaatttcacttttacaattttttttaaaaaaatcaaatttggttatagcacacgtatactagtttcgattaaatttattattttcattacaacttgtgaagatcaaatttgaatttgaatttttgactgatatatcaaatattaatctatcttatcatttaatttttttaaatatttataacaattttaatgacggtaataatgacatccttggatggactagcaaaatttgacaaatcaactgcaagataaaatcgttatgctcaagtgtgtacgttgataatgagtgaataaaagcagtcagaagaacacacgagggtagttttgtcattttgttaaaaaactgacaaggtcaaagcggtttgacctcgatagtggcatataaaggatggaaattttcgttggatggcatataaggaaatagcaactttccaatggcatataaggaagtccgtaaactttgagtggcatataaagaattttctctaaaaatattcaattttggtgattgaattgatattaaacttgtcgtttcgtgataactttgttactaaatttatagttttgtactatccgccttaaatctatagttctgtgataaatctagtgttaaatatatgattttgtgatacattatgttaaatatacagtcttgtaacaatttggtgaaggtatctttaattttgtgaaatttacttttatttaaaagaaaaaactgtggcctatacttaatcgagaactatgcctaaattttctacagccttcttggttagtgaatagctgattgattataaggcaacagaatagtttattagagaaaaaataatttttaagtaaaacttttataaatgtgttattaacgacttaaaaaccaaattatagatgtgttatcaactgtaaaattaagttttaaaatttaaattttaataacggctgaattatttttaaggaaaacgatgaggccccctagctttataagcagaaacaatacactactcatataaacgagcagaaataaccaaagtatagtggtacaaattttcataggcttcacctatctacagcctctgcatacatttcacctttcaccgtatctaattaagtttcagaccaacgcaaggagcgcggccaccacggccgccgcgcacgccaccgccgcggcggcggcaacggcggcgcccaccaatgccgcggcggcgacctgcacgctgaagttgcaggcgccctgcgccacgtccctgtcgtcttcggtgacgacggcgagcccctggaagtcgcacgccgcgtcggcctgcccctgcgcctggtagtacacgttgaacgcgtacgacgcgttcccacgcgcgtcgagcgcgccgcagctgcacccgtagccgagcgccgtgcagtcggagtgcgagcacgcgtacccgacgttgtcggcgagccggccggcgtcgtcgtccgtcacgttcgggttcagcacgcaccaccgccgtggcaggtacttgacgcccttcgccggcaccggcatcgccggccgcccggcgccgcggaggtcgagcgggaacttgggccggccgtcgaacgtgaagatgccccagtggcgctcgaagttgcccggcgccacgctcttggtgtcctcgtccatcagcccgaacaggtacacctcgatgcgcgcgcgcggccggagcggcgtgccgcgccgcgccgccagccgcttgagcaggccggagtagaaccgctgcgcgtacggcacggtggcgtgcttgtcgccgtccgtcggccacccgacctcgccgatcacgatcgggaggctcccgaacccgatcctcttcagcgccgacaccagcgtgtcgaagttggcgtcgaacacgttggtgtagttgatgccgttgtccaccaccggccgcggcggcggcccgccgtcgaagaaggcgtagtcgagcgggaagtcgtcgttgccgtagaggctgaggaaggggtagatgttgactgtgagcggcgcgccgctgcggttgaggaacctgaccatgtcggccatggtgccggcgacgtcgtcgcggaacctccccgccgacggcaccgggttgctcgccggcgagtcgtacacgtcggcgttcaccggcaccgtcgccttgatccgcttcccgtacccggcctcgtcgagcgcgcgctggatgttcctcagcgccggcacggtggcgcggtcgaactggccgttgtacgccttgaggaacggctcgttgccgacggcgacgtacctgatgtcgacgccgccgtcgaagctgtacctcgtgacgttctccttcacccactccctggcgcggccgtagtcgccgacggcggcgagcatgtcgttggggacggcgatcatcgcctcgatgccggtgccggcgagccccgacatggtcgtcgcgtcggcgtcgaagatcttcaccttcttgaacccgttgtccttgagcagccgcgccatcaccttgggcggcagccggtgcgtcgccattgtgccccagttcaccccgagcccatccaccaccgccgccgccgccatgatcaccactccgaccaccaccgcgcaacgccacaccgtcgccgccgccatcgccgacgtatcgatccgatccaagaaacttcagtacgcttaaaaaggaagcaattcgatcaaccgatcgaccgacacggcggagtaacgccgagtacggatcaagcgaatgaattggaacgcaacaaccgcaactttttttttttttttgctccgaaagaaaagtagatcaccgctccggcattcaattggaaggtggcaatcataagctggagcaatcaattcgcgaggtttctggtggttttgaggttaattagtggaagaagaacacgcagttagttcagtactacgtgggtaaacaatctgagccttgaactgaaactaaaggggaaatttttcaaatttggcgggagtcctgcactgatgtttgactactctgcagccgtcggatcgcgcgccaacggctgatcagagtggatcacaaaacttgcatacacaatgaggattgacagtaagtgcacggcttcagttcgacagttttgtggtttgattaattagctaagataattgtatgattatgaatacaatcaaatcaattgacaattgctacatgtataggcgtatagcctaagcatatacagagaaactttagggactaaagtagctattctcccggtagggtttggaggacatgatgcgctgtttagtacagtttcttttatttatgcatcaaacaacaccaataaatagttaactaccacctcattactaaccaactaaacatcactaggagaacatggggatacctaacacataatgccctatgcacactactacagtactacctggggcggatccaacgtgggtgcagggggacttgagtcccccctacaccataagacctatggataccctccgaagcatccccttnnnnnnnnnnnnnnnnnnnnnnaaactaaaagttcctaacgggtcgaggttgaagaaaatgtgcccccccccccccccccccccaaaaaaaaagttcctggatccgccctgtactactatggagacaccattgatcgatcaagttcatttgccaacagaggagaaaaatactgcaaagactagagaagaagaagcggttaagtaagcattgtatgaattgtactcaattcagtaaaagatcagtcatctagacatattcaccatcatatttgacactaaagacaagaaatgagagcaagctgtaaagtagatcagtcatctagacctattcaccatcattcctgtggaagtcaagatcacaatagcatcctactgctgctgatgataatatctcctgtggaactctagatcactgtcttttagaaatctcgcattgcacaagttgcatttggttcccgcattctgatgtattgtttggcaatgatgtattatctgagttataagaagaaggttaggatttttttcttgaaataagatgtgcatatttataattcagaaaataacataacttacctttcctgaagccattgcgatagtagaatatctctcaaagaagcagatgacacatagttcctgatcctttgggatcttagcctgttctcttctgtatgattggtgcgaatgctccacctcgtatgggtcaaacttatttgctgcatcaacgatctaccaattcaaaacaaattagctaagcaggagaaaattaaacattttaacaaaaagaacagcaatacgcaataataaaattacctccacaagtctatttactggagtcacaacactttgtccaatagctggcctgtgtaaagcgctatagccataccgagtggcttgctgatttacgatccgcggatcaggagggggctgtatggatagtagaaatcagcagatcaggaggagatatgcacagttagcgcaaatgagaggcatatgcatagcaaacagaaatagtgttttaccttgtataaagagggatcagagatctttggaaccaaaatcttaggaacgtcctgtactgagttctgataattggaggtgcctgcaatttcatcattgaattgtccaatttttactgtattatgatattgttagtaagcaaaatacaatacatttaccaactaacagaacatatttggaaatggaagcatattgttctagcacaagactagacttagtaattctcaagagaagatatctaaaaaaatcacattaaaaatgaattcatcagagtaacaaataaacaaaagagttttattggttgtcaggaatagttacaacataggacaatagcttccctatacactaagaaacattgaacaacattatgttacagaacatggatcacacctttgaatatctaatgtgaacttctagagtatggaggtgatgatgcttcactgcaggctataaactaaaagttcaattaccaattccatctaagcgcatgtatatttacttccattctgattatattgaattaaactcaaatagcttctgtatttgagtaaaacttatgtgggttaatcttgccaggcagtcagcaattaggccccaagtatatttggtttgagaagtgaaaactgattaaaattatcaagatctctgaaaaaaaatggaaacaaagaaaattaggcaataagtgagatataatttgttttgcatgacaacaaaacaaagctcatggaagagtcagtttcatgagtttaataaatattcataacactgtctgtataaaggaatatagattgcatagttctaataccaaataaccatgcaatatcagaacagaactcaagatataagtgtgcgtttctttcttaatttcactgttacagtatataaagtgggagtgctatttattaatctggactgctattccagaattatactgtaattatcgtaacttaagatgggaaaaagacgttgaaatcaagaggtcaccttttgtttctagtgtcgctgaaggcttcaccccattgtcctccacatcaatcaattccaaatctgaggggttagcattttcaacgaggacctcactgcaccaattaataaacatgtgagttcattgcataactaacaaaaaaagaggctaatttaacaagagtaattgcattatgcacagtccattattgaaattcaattgctcagaatcactatttttcccgttcatcagttgcaatgcgttttcaccataagcaacagagaactcaagtcaaccatcaaatactaagggacttcttggcatccataatgtccagctagtaaatactgtcttctaattagaccacatagaaatagtagggtgaccgcccccaaggcccaagaacctgaaatatgttacgctgtttctcattgttttcattatttttcgcacttgtttcaataacctgagtgatttctgcgttctgatgcaaagtttcagcactgaaagtaagtagtggagccgtgcaatacattgtacataaatcaaaaccattcagataattggaacaagtgcaaatggtaatgaaaaactcaagaattattgctaaaactttgggagagtatatttgattacttcaacaacaaagtaggttgaaggatgggtaaactataaaaaggtagggttgtttgtgaagaaattagcctaatgctgtgatacattaaatcaagatgcatacatttataactataacttcagcacacaattttagtttgacggaaagctagtagccaatcgccatgacactactaacagttgcaccctgtagctctgccaaaccaatcaacgaaaaaagacatagaatcttacaagatggctgagagaaggctgcagacaaagctaaacagcaactctaccgaaaacaacaaaaagtagtgcaggactgctcaggccttacaaaagcaatgaactagactgcagtaataaagatcttgttgcatagggcccttagaaaccaaacttgcagtaataaagcaatgaataaagggcatagcaaactgcagacaaacctttctggaattaactgaggtattttccttaaccaaacttgcaatattagatataaagctaactgctattcattgatcttacacttaccaactcagaaagatattgtctttatgacatcatgaaagtacactatacttttctacactacacaatttgtttataattcccttataggaaaaaaaaaagttagccattccctttgtcaggttacattataaacaaaccgaaagtgaaagagcctgcacaagtggatcataatttaacagcaaaacatgcaaccatattgttgaaacatcagataagaaacatgaaaacaaattgcaggaccagtatacattcaatataataatgtaaacagactaaaccagtcagacaacaaaaaaaaggagagatggttctttttaccttcttttatcttctccagcaattaagttgtcagaatacgaaagctgtaaggaatttcaatatattattgttttaacttcatgtaaaacaattaacaaaatgcaactacatcttacaaattatcgtgcaaaaaacctttaagtttgttgtatgcatgttttgcttatcagtctttgaatcaagttccaaactagcgttccactcaggcgaacaacaaccattcataaatatatcatcaatatctttgttggtaatgtttggacgggaagtaatttcaccctgacttatgcatttcttgagctccctctggaaagatggttatatgtgagcacacgacatgagcaaacagttgattagctggaaaacaaaagaaacttcagatgtaaacaaacccatcggtggaatcgaagaaggggcaacacgaattctcggtaatcagtgcatgaacttttgaggagcttatgacacatttcctgaataattttacaagcaacatggaactgcaaaataaaaccaggataagaataactgtaagcactataatggacatcaggatgaaatgttgaactcaaaccatattgtgtaaaagtaccagacctcattacttgatctatccgaaggtaaattccgcaacttcttcttgactgccttgatgatgtcatttccttcttttcgtttctccctttgcagttcagcagcatcagctacttcctttgcagtaaatggactgaggagaaaggatccaaatgcaccttccacattcatgaaacaaaataagtcatgctgacttgagtccttgcacacatctatgacgtctaaggaacaacaatgctcccccatcacatcctcacacaggtttggatctgaaacttcaagtagtttctcccctagtgaaccaaaatgggaattacacaagtgagtccataacatgacagtgctgtcgaatgtaatgttagagcatcctcaatgggggcatttcctcagaatccatgatttgctactactcacgaaatgatgagcatctgttagagacttggatagtgaacggttgattttgctgtagtattcgcaaagaacatcaagcctcacagataggatcattcgttgcttttcacttgttataaggctccaatcacgtcttgcgaatagtacaagagtttgtagaagcccatggatctgtttctttacaaagcaaatccgatcatcatattcatcccctttggtagaccctacagggatgtcgtgactgcttggatcgtcagccttctcaatgggctcgacaacactcatcctcagctgcagcataatcatggaggacagccatcagtcctgcacgaaacagtgcgatcacaagagagtgatctgatatttttgcagcactgtccatgattttcagggcacattgtaggacctcctccttatcagcatctggttcaatactcttggcaaggtccagtgccacataggttggcagaaattgcgcacgagctgacttagggaatgtggttgcaacagctgcggccctatgcaccgcatacgcgactcctgagctctttgcaatgctgagaacacgctccacatcgacttcacaacaagcattgttgtttatatcgattgctcgttggagcctttctcttgctgcagtgattctttggctcttagaggctttttcaggtagggatactccatatgaaatgttatggatggcaggatctaatggtcgtgcaattgatagtgctctgttgaactgggattccgccaaactgtactccttagatgcagaaagagactcaccgtgggcggtagttgtctcaatgcaatctggaactgcttttgcagcagaaccatacatatcagtagcaattcatagagacatttctgggctgcccttggccgctcgggagtgaaatgccttcatattcaggtcccctacgaggttgtagatcatgggacatggagaggcgttgaagaggctcatagcgcgatcaagcgccatgtctagatcgccattcctctgtaaatccagaacttcggcagcttccctccgtaacctcatttcatcctccttttgtcccctcttggaccggctggccctggcctcctttcctctgtccattctgccgcacccgcaagctgttcgtcaaaatgccgcagtgggagcgagagcgaagcaacgattttacgaggaaggagatgtcacgtgtagtagttggaggacggcggcgacgcgtgggccgcttgggagcggtaggagaagcgaagcggcgaggcttggaggaggtgtcgagcgcggcgaggcctggagacggtgtcgaacgcggcgaggcctggaggcggcagcgcgacgagtcctggaggcggcgaggcgcggaggaggccgcgagcgcggcgaggaacggaggcgaaggcgagggcggcgaggtgcgtgggcttggaggtgcgcgacgggcgatggccgaggccgcgagggttttcgtgggatgttgggtgaggtgagtcgtgcagggccaaagggcctaaaggggaggaagtaggtgaagcggagaacgcgtgtcctccgcgctgttgtccgatcatagccgttcctttgaatagacgatcaagatgtgctaaaagagggataaaattttagcagtaaccacttgaacctctgaatattctgcattttttaacagaaaaactggttgatggcagtggcacgtaaaaatagtcatgtgaagcaatcacgcaggcaaatgatgtgtattagtagtagtgtatatgtgtgcgtgtctgtaacataataatcttagaaaagagaaaatagccattagctatggatgtgtgcatacccatcatccatgaccatgatcccaccaagcttccgccacccgagtctgcttatttgagcttaccaatttaggtggtgtttggttcggatgtggtaacgtaaacgctaatggtattgcctccagccgtaacggataccaatttatccgattacatgattagtttggttgcaggcggtaacgtcatttatttacattactgcgtttggttgcggatggcagccaaggaacgggaggctgatcaataggacacaattcgaaatttgaaacagaagcctttgggaagatcatttgctccgattacactaatcaaagaactgcttgcttccagacaaccattgatcaaataactgattatacaagtatgcttatacaagtacgcaattaagcatatgacataagctatgaaacattcgcaccagacacactccagtactatatcaacagcagctgacatcaaaagctacataaagaagctcaataaattttgacatgcaaatgtttgaaagataactcgagagttaatttcctatacatgcaacgagcagagttttggcagatagttcataatattccaaacactgtcacctcatgtttggatacaaattttgacagtgagaactcaagacaaaaagacattttgcagattagtaaacaataagctaggggcaatacttctgtctgaaaaacaggacagtactttgatcacagaatatgtagattgtcatggttcaagcaaataaagctgaagtactgaaactaaacatccttaggacataggtagtctccaatccccaaggcctatgcttatatggaattctaataattcaaaaacaaataatgaacatcttgtagatcatgcttgacagccagcacatcagtacatcaatttttctttgcctcatctgataacaaaaaaaattcagaaattagtgaaagaaacattaggtgaaagaaaatatatagtgctcagcatcataccaaattaagaatattcttgcacagacaagccatatatgatattcagaaaaaaggtagcattttttaactttaggagtacaaaaactcccagttaggtgtaagcaagtaagcaagagaccaagcacatactccagttagaagtgaatataatattactatggcattgagatggacagctgggtccattgatgcattatactagtgcaaggcaaataatatgaatgcatatatgaaatgctaagtggtaaagagcaatatgcttacaattaatgatcacaaaataaagtgatatgtttcctgttgcatttgcaacactacaagattgatcaagtgaattaccagcaagtattttcagtacgtactccctcctgagagactctggaagagcgagaagcatactcatttgagccggcacttttacaaaagcagctgcagcattgacaacttcagtaccagtcaatc

SEQ ID NO: 22449 - DNA, 938 bp, Oryza sativa
ttttttgctacggtaaatgccacattttttgtagtaatcttgccaagggtcaggatcctcctcctcccattcaccttgatctgtgggctgcttctgcgatccggccgcttcttcccgctcgagctcccgcaagatgtagtagaggacctccttgggtcgaagcggtaaaaaatcaaggtgcaccgccgggacgttgaccatgatactgcgacggtagtagtagtctggagcaaccaaagtttcatgtgcaatagcaaggacttccttattatctgcatctggtgctacaatggcgatggacaacgtcacgatggcgtttccaggaactccctcaatccactccaataacttggccttcacgtagtcgtccagagaagggggctcaaagacgggccatcgagcagaatgatgggccaacgttggtgttgccacagcaaattgtccttcgcggtcatcttcatcttcttcttcatcgtccccagcagcatagccacctgttgcatcaggtgcggccgccttcgtcgtggctgggatctcaacgccatacctcagtcgtcgctcgccgacgtcccgcgcccggtccttgagctggcggagctggatggccgctcggtgctgcgcgaccatcttgcgcagggaccagtagacccaccagaggtgtcgccggagtctacctttggcacggtggatctccgggttcccgctgtagaggtagaggtcgatgcagttgttgcagtcctgcgcgagcaggcgcacctggttcatccaggtgcgcacctgctcgtcgtgctctccaccctgcggcgcgctcctggctaggtgccctacgaagctgttcatgctctccatctcctccttgatgaactgcacatcgtcccggacgccgccaagcagcacagcctctttgcggatgaccaccagcagtgagctcacggcgc

SEQ ID NO: 22450 - DNA, 7154 bp, Oryza sativa
catttggttaatttcttaatccaccaatgggattgccgcacattctacaagacaccttggatactgagtactatttcgatgcaaggaataactaaataaatgtaactagccaattacgatgatgatgccggcgacacgtgagtgtgataccagccgccagtcatattgctttttcctggaaaaccattgccccaagctgtcaagttcactgctctagattctccccggtgtggtcaaatggataagggaggggtaaatgtgcttaagccacatctagggttttcagtgaattccagctgatatctatcgattcggtgacgcagctcgccggatttgtagagttcctgagagagattatgagaccagagactgatcgtttgtggaagtggtgatggatttccgtcctttctcaaccgcacaacgagcaaattaaatccgggcgaacaagcaccgagtgatggaaggagggaaccacgaagctaattagagtcccattggttggtttaattagtcaaagcaaaagctaacactcaaacttaaatttaattttaaagttgattttaagatatttttaatataatttctttttaatattgatttttaagtcgctgcgaataaatataaaaaagttttacttataaattaatttttatttcctattaaaccaaaataacttatgagaaaaatgagcaaccgatgaggctcttgcaagaaaaggagctgcacagataacttcgtgtcttttatagtagtatattgctagatggcaagagtgaggcatgtttaatctgaaagcctcgaaactaccgtattatactaactaaggtgtgtttagattcagggagtaaagttttggcgtgtcacatcggatattatataggatatcgtatggggtgttggggcattaataaaaaaaactaattatataatccgtcagtaaaccgtgaggcaaatttattaagcatatttaatccgtcattagcaaatgtttactgtagcatcacattgtcaaattatggagcaattaggtttaaaatatccgtctcgcaaattagtcgcaatctgtataattagttattttttagcctatatttaatactttatacatgtgttcaaacattaaatgtgacgaggtgtaaaattttgggtaggatttaaacaccccctaacgatgatattatttaatgggaaagcggtgccgaaataaaggcaaacccaacacaacaccaaagccaaagaaatgcgccgtcgatatgataaggtcctttcatcatgcacaaggcgctcacgctccatctttgcttcagaagtcccaactgatgtttatattggtagagtacgcagcccggctcatcaatcgtgggctatccaggttatattgggtctgctccaccacagatctaaccagagcaacaactttatcccgagcctacacaaccaaaaaaaactagtctgatgggtgaggaccgcccacattttaagtcgtgctcctccatcatcaattaccgatgtgggactaaacctaacaatctcccccgtcacatcaacccatgtgaccccgaagacttgttatccgacctccccaccatatgaccaatagaaatcgttccggttccaaacctgggctcttataccacttgttagagtgcgtagcctagcccaccaaccgtaggccacccaggttacattgggcttgctccaccacaggcccaaccggagccacgcaactttaggtcatgggcccccacaacccaaaattggttatatagcatcgaaagttcacgttttttttattttgtaacacagaatcattataatatattttaataataaattgagaaaatatatatgctattatatgatagaaaatataatgatactatccgcgtaatttgcgcggaccaccatgctagttgtaataatgataactaatgcgccgctaattaggacagaccgctagcgcgagggccatggggagcgcacggctgtaatagttaattaagcaggtggtgcgtgcccactatgaaccccctatacataacctgtatttggttttgtggatgttgtgctttatgctacacgaatctcagaacatgtatggacggctggcatcaatggcggatttgccatggtcggcggggtctcgatcccctactaccggcgttgcaatcatgggagcccctattaataagccctcactaaaatttgttgccatacatgtattataggagggggttataattttgtatagtttgttcagtccctactattagttcttcttggatccgcccttggctggcatactgcgtgtataaaacccggtcctgttgatgaagaaataaaatcgatccttatttgtgctgtcgtgagaggagaggggagggttgtcaaccgtgagaattgctacctgctgcttactcccactgcatgccatggccggatggtagcagctaccagctgctgctgtatcggggtaggcggatcacattggcaagtttggtagagctaagaagagatggccgacgtcacgtttggcgccgtgaaattggtgctgggcctcatccaggatgaggcccggctgctcagcggcgtccgtgaggacctgcgcttcatcatgcaagagatggagagcatgaacaacgtgctccgccacctcgtggcaaacaaggggagtgccgccgctgactaccagctccgtccgtggatgaagcagatcatggaactcgccttcgactccaaaaactgcgtcgagctctacacgcagtccggtggcgggcactgtggttggcagccctggacaatggtagctcgccaccgggtcgtcacccggatccgcgagctcaagatccaggcgcgcgaaatcagcgagcggcaggcaaggtaccacattgctggtgttgctcatgcccagcagatggacgcgaccaccacaatagagcgctgggatgctagtgtgcccaaccagagtcgcgcctgggccggcagctctaacaacccatcccggcgtgccatactccacgacggctggtttggcgactacatcagcgtggatgaggctctctcgcggctcaacccgttcacgctagaccgttatgaggtagagccaccggcgcggttggacagcgatgacgagcagcagccacggcctcagttgaacagcgacggtggcaaggagcagcccctagcgccgcagtcggatggcagaaacaaggagcagctgccgcctccccaatccggaggcggcaatggcatcaagcagcagcagccactgcctccgcagtcagatggaggcgacaaggagcagccgcctccttcgctgtcggatggtggcgacaaggaccagccgcttcctcccgactgcggcgtcaagcggcagctgccgccccagtcggacggtgatgacaagcagcagccgccgccccagtcagacggcagcgatcagccgccgccgccgcagccggatggaggcgacacggagcagcagccgcctcagtcagacggcggcgacaagaagcagaagcatattagagtcgtcacaatcagtgtgcaagacggcacggatgaagctgttgctgcagaggccgtgatcgagcgtttcaagagccgctgggcacggcggggactctggtcgcagcagctctgcctccacgtttctgtccatcggcctccgattctctcggagattacaaaggtcatggttgaaaagctgaaagagaaggaggatgatgagaagaatgaggcggaagacagggagtggcttggccataaattgaaagatgaagatgtgctgcttgttctttccggttttaattacccagcgttatggaaccaggttctggatttgctgacctcgatgagctgctctgactgtgcagtagtactctgcacaaacgatagtaagatggcaaaatattgctgcagcaatgactctgccaacgatgggcctcagataatctactctctcgttgatatttacctcaacagagcgctcgccctgctttcccacagctacggatacgaggaaggacacttgaaagaaattctgcgcaacatcctcgccaagtgttgccttgatgtcttctgcatgaagatgctcctccatgccctctactacaatcctgacatgacgaaacaccaactgcagttcctgaatataagccttggtaaagaatttacagatcatgggagacaggaccgaataatggccttctgctaccaagcactgccaaatagttacaagaactgcttatggtattcaaccattttcgcccgtggaagcggcgtccgaagggcaagtttaataagacgatggattgcccaaggcttgatagcccaagtgaaccagtcaagtgcagaggacgaagccgggcactgtttcgaagccatgcacagccagaagcttattgtttcttctggtcttagtggtacacgcaaggtaaagagctgcaccgtgcatccagtagtttctggcttgatcagcagggagtcttcgacagttgaggacctattgctcaacaaccagctgccacttgacttggatctcctctactcaatccggcacggcatgcaactccatccggcaaactctaatatcaaaaagttcttgaactcactttccagcagttcaaggttgctgctgacagtacttgatttggaaggtcgcaagggcctcaaggcaggcgacctccataccgtatgcaagattcataaactcaagtatctaagtctccggaacacagatattgcccaactgcccaaggaaataggtcagctcaagctcttagagacacttgacatccgaggaacaagggtacaagtgttccacacggcgctaccaatgctaaagcacctgcttgctggttgcattattgactacccaaaggaagacatcatcaagtccaaggaatcattctccacggtttccatgcctcgtgctgttgcaactatggaaaagatggagatattgtcccgtgtcaaggtttcgaacagtgctaaagaactgaacaacattggtgacaagctcgagcacctaaagaagttgggtgtggttctatctggcaagaaagctagcttgatagatttgttccttcaggttgacaaactccacagatgtcttcggtccttatcaatccgaatggatccaccaggtaactgggattctattgatgttattttattgagacctccaaagcttctggagagcctacacatctgcagcatcagaagcgggttgcctcccaggatcaaggagctccatcagcttgccaagataactctacgtgacacctttttgaatcagggtgccctcgatatacttagcatgctcaaaggcctacgctatctcaggctttgctaccattcattcgcagaaggcgctctgagcttcgtgaagtttgtggaacttgtggatcttgtcattgaagatgatattgttaacagtgtcgccttgggtaataatacttatggtggagaccctgataaacttgaaaagatagtttggtccttcactcacatggaggagctttcaggggtcagtacgctgcagagtctgacacacatcgaactcaatgggagaacatggcacctacagaatctggaaaaactgaaaagagaagtagatgaatgtgggattactttcacgctcaatccacctgagaatggccaaggatcaaggctgtaggtgctatcgtaccccataatcatcaatgctgagaaagatggaactccgtaatcctggggagtatttctaaattctactacggctgcttctactatggaataaagatgtttttcctcttccatctgtcatgttggactggtattgcacctttatgtttcgagtgttaatggcaatctcatattgtaatattgtttccattgctttcagtttggtttagttgcatcctgcattttatttctgcatgtattagctcactggaagtagtccggggttatcggaattcagttgagccgttaatttcattttctgttaggatgctgagctgatcactccaaatgtgggatgtcacgatttggtggatgggcgtttaatcagcatgctttgcatgtaaaatcctccagctttggagaagagcaaaacaaaaaaaaaaagaaggaaaaaacagaaaatgctgcagcttcacgcagcacaaaaacttttgccttctgctttttttttcagtttcgtcagacattttattcacgcaccacataatcgtcaatgctgagaaatatgcgggttgtattaattagatttatctgcatccagaagaaaacatgtacatttaatatagtgatttgagattgcttaatgtgcttctttttttaatccaaaacatgttttacatattttgcatcagcgtgcaaacgattgttgggctgagcaatttctttggacttaacttatttccccacaagacaatgagcattcttgagcctaacgtacgcgttttgaaaacttaacaccagttgctagttgtccattcctagaataaactgcacaagaggagtatagaggaagcaaggcagcatataggccagcagctgctaccagtgtgtggttgtagttacagctgatagtaaaatggaattggtaatcaaccgaagaatagtcgcgcttcctagctatccccattcgagagagttgccacgaaaagggactcctaccaattaatagcagaagatttgcaattcctaaagccatctcgcacctactcctatccaagttacagttttgctgccgcgccatcgatctctcgctctcaccagcagaaaagataagataacatcatccattcgctatccctcgccaatctaatcccaaaaagtgaaatcgcgacgtctcgatgttcaattcgaaaagcagaacaacaataatgcagctgagacgaacctgcggtgtgcttccccccttctttcgtccagctaggcgaggttcgaccccgcgcgcgcgcgctcgcgcagcgcggacctcggaggcccggatccgccgtcacggtgggggtgcttcgccggtggagctcgccgcctcgccggcgccgccgccctcaaacccttgcgccgccggccaatgcagccatcctgggcccaaaaccgccatggatgacgaaaggcgacaggccgaagaacatttgttgggctggcggacgtgacgt

SEQ ID NO: 22451 - DNA, 9708 bp, Oryza sativa
gtacatgtgaggggtagcaccgtcatatcgcgtgcgtagatgggtcaatagcgatcaaggcggacagaaaacgatcgagaattgatggaagtgttaaaaatgggaacaaggtgaattttgggtgctattaaagtgaaccgatatctttcggtgctataaaataaaaaacgtgaactttcgatgctatataaccaatttttccatgtcatatatgtgtaatccctccgtcccaaccgatgtttgtataaggccatatttggcctagctctaactcccaactccaacttacctagagctagagttgtgccaaacagtccagattctctgtttttgagagtggagttagcagaactactcctaaaaactgaactacgggggtggagctaggtttttgctgcttcacagctccactccaacccaaaagatccactaccgtttaatttttttaacatatttacacaaaaataccattgaattaccccaaacccatctcttcacctctctctccctcccacctcccaccagctggtgcccaggcgacgggtccatggtggtgctctgacggcgtgggctggtggcacacggcggcaacggacaacgcgagcagggatggcgcatgggtagcgaccggcggccggcagcgcaggcgggacaacgcacgggtgcacaggcggcacaggaggtgtgagcggggacgacgagcgggcagcgcacggtgccgacagcagcgggcgagcagcgcacgacgcgagcgggtacagcgcatgggcctcgtgccgtccgccgccgcggcgacgcaaaggcggcagtaggtggggacgacgcacgggcggggacagggcggcagcatgcgagcgacgcaaggggagcgccgtgcgggcgaggacagagtggcagcgtgcggacgacgcaagggccgcggcttgcggccggcgaagggctgcgcacgcggggacggtattagggatttttttttggtttttttcattttcagatctggagctaaaagttagccaaacacttttcaactggtatctactcccacatgagctagcttccactggagtaaaagtttagagctaggagatggagtttggagtcttatcaaacggggtctaagtacgatgttggttttttttagagggagtacgagttttttattggcacccgaaagagggatcacatacacaaaacatagccagattagaaaaataatttcgtgtggcatatgaaagatgatttacataaaacaacatcaatgcagaatattctattagcatatgaaacataaattatattttcaaaaaaaaataatacatgtaaattaaaaatcttaaaatatacgcacccttcatattatgtaaggagctgttctattcccccgaaacaaaaacacttcctgtggtagagttaggattcaatctgctgttcaacttaagaagagttgggttggttcggggttttgtcaactgtgtagccaaattgagaattcagttcatatttgctttacatgcccttttgcaactttcacctggtgtattatgcttttggatggccaaggattcctcatgactttgaggatacccttaccatggtggctggggatgatagttcgaaaaaggctaggattagatatatgttgcttgctacggtgtgctggattctatggtctgttaggaatgatatgattttcagcaacaaactcatcgcgacgcctctaacaattcctctttgcgttgcagtggaaaccaatgctgaaacctgaggaagttcctacgctggatgtgacggtggaagatgtgcacgatgacaatctgcgaccggcatgagtaggggttggttaggttgtgagtctgttagtttctctgttttctgtagttgttcattgtcgccaaggtcgctggttggcacacttggcagctgtggctgagttttgttgctttaaagttgttcccctttggatgatggttctcatgttttgctacaatgaaagctggatatcccagcaaaaacctatgcaatctctattgttttctgtaaaaaacagggccgtctggcctcctttataaaaaaaaaatatttcattaactagtactcagaagagtagaatactccagtattaagtacactatccattgagaatatatctcaagtacactgctctagacataacacgtcagggcatggttagtattgggtctgctcggttcagctagacagtggctgtacagccgcagtgctgcagttgttttagtataaatttacttggtagatcctgttggtgtggctgcagcgcagccactgctagctcttccgaacacagccattgggtacgcggcggaggacgcaagaagtcaggagcccgtgagaccggcggaagcgagacggcgcatattgcaaactgaatgagcgcgtgtcgggggagctacagtaacatcgaattggattgagtttgttaggattaaataacatattgttagccaattgttatcccttcttcttagcattagtttgttactacctccgtcctaaaataagtatagttgtgagtattcgtgtctaacatttgatcgtccattttatttaaaaaatttatgaaaaaaatttaaaaattagtcacacataaattactattcatattttatcatctaataacaataaaaaaataatcataattttttttttcaaataagacaaacggttaaacgttggatatgaacagttccaaactgcatttatttttgggatagagggagtacaattgtaagctcatttaaggagcaccgtaccgtgggaagagaataaacaagccgattcaatctattactctcatatccatttatcttttcctctcatcttcttctgttcgtctctgtcggcgccatgggtcgccgatcctccaagttaccgaagcccagacctccgaccactcattcctatcctatttgatcaatcccaggcgctcgtgacaacttgacataagagaccatgaaagaaacagccacaagtaaacagccgctcctggaacctgccgatccaattcaccgagcttcaagacacaatggcggatgcccttagtggcatttcgctgcttgcgtctaaatcggatttggccgatctcagccgttcggtcgtggtggccacctcgagcatcacatcgctcgaacagctggcggcatcttcatcggtgaagtccagcggcgctccttggctaggtgggagcgggatcctcgggccccaacccccggcaccgcatcaaccacggacttccggcgcgccacacgactcttccgcaccgacgacaggcgggggtgttcctcatttctacaaactcgaattccctaaattcgacggcaaagatgatcccctgaactggctcaaccattgtgagcagtttttttttaggacagaaaaccggcgatggcgatcgggtgcagatggcaacctaccatctcaccggtgaggctcaagattatgaggaacacaagggaccccccaaattgggagacattcaaggagttgtgtcacgtccagttcggccctccaattcgaagcaatccacttggcgaggtcaaacggctgacacagacgtcgacggtggcgacataccaggccaagttcctcaccctgtctatccgagagccagctggttcagctcttcaccacgggccttcgcgaggatctcgccatcaacgtctagctcaataaaccagaggacctgcaggaggccatgagcctcgcacgcgcctatgagcgcaaggcgtccaagcacggcggcagggccaaaatcggcggcgcagctccacggtggcacggccgcggcgacagcaccagcaccgtccgccgaaccgacggccgacacgggccaatgaaaattccgccacctgcctccggcggaactagcggaacaccgccgccgaggcctgtgttacaattgtgacgagaaattcgtgcgcggtcacaaatatgcacgcttgttctacatcgagtacgacgacttggcgtccgccgccgccgcccgccgatgacgacgcaaaacctgccgaaccccgcgtctcgctgagcgcactatccgtcgtcggcggcgacaacaccatgcggcttccagtgatgatcgacggcctgcgcgtcgtctcgctcatcgactcgggctccacacacaacttcatccacaccgagctggcgcatcatctacgactccgtctcgagccggtgcgcgacggcctccgtgtcgtggtggcgaacggcgaccgcatagtcagcccggggcgttgccacaatctgccgctgttgatcgacggtgaaatcttccgcgtcgactgcttcgccctggacttgtgcgccgtcgacatcatcctcggcacggaatggttgcagttgcagaccttggggccggtactctgggacttcaagaacatagaagaacaccgactggttgcattgtcagctgacagagacttgcagtaaactgttgagatggatcatttaagcagaaaccaatatgccattagcaaataatttgtgaacatgagaataaactggaacacagccccataccacaaaagaagggaattggagagtttatattcataaatctcaaagcggtcttgaattaatggcggtgattagacaaacattgatctcaaaaagatcaagcggcatgctccaaattgtatcacagaccataatcattaaagaaacacacgatcaccagcaaatggtgaagtattgcattactactatggacaattgaacaatcacttgtgtcactaccaccggaagaatctaactattaagggcccctttgatttataggaaaaatatagaaattttggaggatttcaatcatatggaaaaaaaatcctatgaaggcctttgaaacaaaggattgaatcctatctaatcctttaaaattcctatggaatgggtaatcctatgcacattttggaggaaaattagcaagaggtctaacctcttggaacatttcctatctctcgtcttctgattcctgcgtttttcctgtggtccaatcaaacggccattcctgtgttttttttatgttttgtaattctctgttttacaattgtattcctgtcagaatcctgtgtttttcctattcctctgttttttcgttcctacgattcaaaggggcccttaagtgttactctccttttgacatttgccatccacgacttcacacatacaaaattaccttgcaacaaaactaagggcccctttgaatcaaaggatttatataggaattttataggattcaaatcctataggaaatttttctatttggccctttgattcaaaggatttaagctttccaaatcctatgaaattcctatggaatgacacattgtatgtggattttggaggaaatttagcaagagctccaacctcttggaaaattttctttgagtctatctctttcatctgattcctacgtttttcctgcgctccaattaaacgaccattcctatgtttttcctgtcttttgtaattctctgttttacactgcaatttctgtcagaattctgtgtttttcctatccctccattttttcaaccctgcgattcaaaagggccctaaatggatttggtgcaatggaaaaaagaagtataaaataccgagggggaaacgtcttgtgtatctactaatgcgatgccaatttcatcctcctgggattcggaatcagccaaatagggggtggccagttggaccaaatctgcggggacacaatttcttcacggcggaaattttccaagtccaacactccaatatcacgatggttgttcttgtatccaaaaagatacagttcgttattatcagtgaagtaaacatgatttgccttcagctgcaggtactcttcagcgtggagtcaaagcgtttggccgtgcccaagaaacagcaagttctcgtccaagctacttatttccacaatctttccttctgtcaaactcactttatgtaccttgatcgtgttagtatcacacacatatgactcagagtcgaactcagattctgaatcaaacgagtgatcatcatcttcatccccctccggtacatcccacttcggtagatcatcggaccgccaaatttgcagtaggttaccgcatgaagcttcaacgatataaatattctcatacagaaagtccttcaccttacccataactatctttggcgcgacctttgggtcggtaagatcaaacatgtgtatttctcctaacaaagtcgcagcatacagcaacccatctttaaaaaaacagtcctcatagtcggaatacgggggcagccatgtccacttatcatcaccagcccttgcgaacgagagctggcaatacggattgtggatgagcaccacagtatatcctcctcccatggatggatcacaagacacaaatgccttgtaatagaggatcgaggacgagtcggaaaccgtcacctctcccgtgtgccacaagtatttgtacccgttggcagcagcagcatcgtcgtcatagatgggcttcacctgctcaatggtggtgaccgatggcagggcgatctgctcgccagtgatgggattgacaaggtgcaactctgatctctcatcggcgtttacaatccagccatagcaggacactatgatatgcctattaggtagatcctggagcggcaaaacgtacgccttcttctccacgaggctgtagaggcccgtcgccttggtgccgtcagaatcaaatgtgtacagcatgcatggtgtctactgtggcttgcaatgtccaaggctgcatatgcttgtgtacgcggatcgccaagaggagcagacggaaccagcccggacgaggtcagggacctccaaggtggcaaatatgctcatcaaaacatcctgtggaagctccatcagtgctggatggatggagagatttatcaagcagactacttgcacagctacaattaacttgtcctgttgttgttccttcagctgttctaggattcagaattgaatccgaatcgcttgttggcagaaaccccaaaatttgcttgcccaaacttctcacactgtcaatatcatgaatctgaactactgaaggcagcagcaacaccccagttcagagttcctccttgttttccccctctaaatccccagttgacaagcagtgattcttgcgacaaataattcttccaggtgcacatatataactcgtaaagcaatcaatctctatccgaataggagactgaagagttaatccccaactactccctttcttcgattgagcgacggattcgggcaaaaaagaatttccaactctttgccaaaaatatggcatcacataagatcagatcccagccgccattgtccatttccaatgccctgattaacaagcagagtgggattgggttgttactaaccatatggaaaatcggaaacctccggctgcgagaaggcctccgatttctcggacgcgtagcgccagccgccaggttcttcttcttccctccgccgccggccgacgtccacaccgatggaaggcggcgccccgcccgccggcggggagagaaggtggctgccgccgggataccagaggagacgagagcggcggcggcggccgggacaacctcgacgagttacacaatgcaatttatatatttgtattttggcccagtccattaaacaacaaactatatacgtagaaatttgatatatatattttttatgtagaaacattctatgtataaactattcgtgtagaaactttgtgcatacggattcgatagtacacgagtaaagaagatgtacaaacgttttacgaatacgaaagcccaattttatgcatagaaactgtcgacatatagactttatatattcaaataaatttaaagggttaattgatcagtgccactataaatatgttgattaaaaaaataccactattattcgtgatatctgctgcgtgacactaaaatttcataaaattgaaaccataccactccgtcacgttttctccgtctcggcactgacgcgccaaccaccaccaccaccaccaccaacagcggtggcagcacccccattcatcggacctcgccaccaagccacctctttgcgccgaccgcacgccgccactgccccaaccaccatacaggcacacattgtgtcacgccccgaactagccccgaacggaactagcccgtgacgctccaaattaacatgttaatcgataccagtcctaggaaacagtgctggtatcacaggaagacagaatatcacagcaatagaggtctctttattacagagtaggagtatagtcatgttgggcggcggacagatcccgagctcacaactgcattacaaaagggaaagcgaaagccaagacttggcccattcatcacaggcgcgacttgggaactaccccgaaaccctaaaactcatggtagcggacgtgctcctgaaagaactcctcgtcagcgggatccacttcatcttcttcagcaactgggggggattatttatatagagcaagggtgagtacaggagtactcagcaagccatgggaattaagtgtttgatgcaggcttcaaaggaaagactgttgtttttgcaattgattttatttaaactcctctttgaaacaactaagtgagtgcttctcaaacgacacggatgagacagtgtgtctcgtccggtcggagtatgtgcaatgtatcagtctttgaattgattcaaggttggcacccggccaacagctttcaaacggccacccgggcctggctgatcccatcagccgcggattttccaaacatcgaacccattccacaacagtaatttcacaagcagtagtcaatcaaaactacgctaggaatcacctcacatccgcccatgaccgtgggcacggctgctcgaacaatttagtaacctctgcagagggggtacactttacccacacgacattactaacccggatcacccagcccgtgcagaacggccacgtttggagaccttgaggctttcatgacaaggcatttcgaaagccgacacaggttcactatatgccaacgagaggggtcccagaccgacatcaggttaggtcccagaccatgctgtgccaggaagcccgggggttctccccagcaccaccccgttgaatccacattagctaattactcagccaggggtgtcccatttcacccatgtggtcgcacttgtcttatgtacggataaaattccaagggaaacggtccttaagtgcaagagcgggaaaccgtactcccggttcgtcccccggtctgcggttttggaaattcatttagttcacaagcaccgacccaggtgttgggttttccaagtcttttgtaaaaccccaagttttacccatcgtcggatattttaaatttgaggggaggtgttccgatgcccgtgcccgaaggcccgtgcatcgaagcacaacagttgacaaaggaggtttaagtgtccaataattcaaggagggtaattgtagcaattaggattggggccagcaggctatctcacaagctgcgaccgaattacttgtgttaaacctattcatgcaatatttctggaaaagaaatacttagatttaaattataggtgcaacatgatcaaaggtgacttgccttgctcgagatcttgagcttgatcctcgaaatcctcgcactgcgggtcttcgggctccgaaactacacgcgaagcgggacaactcaaca

SEQ ID NO: 22452 - DNA, 7410 bp, Oryza sativa
cgccacccaatcaagctctactaagctacagctctgcttcactagcgccacattgctgatcaacccagacccacaaccacaacctccctcgacccatcaagatgccatctcccatgaagccgcttagctagatcgccctcttccccagccaccaccaccatcgtctcaccaaaagagaaccggaaggagtcagccataggaggggaggagctccatcgagaggaaataggggtgcgattggttagcatggacaaacctgccatgcttgcctaggcgaagccaacggcatcatctcagccgccgccgtcatccgcgtccgctaccggtgcacctaaccaccacaaggagccatacctgccatcgtccacaccaaacgccaacctgtaccatgtgcatcagttgtctactatcgtagctgcgccgacctcacccactgccattcgccgcatcggcctctcccgacaccctcggccgctttggcctctctcgtagccctcggttgtgcgtgcctctcttggcgactaggccacaccagcctctcctgcaaccctcagctacgtcggcctctaccatcgccatcggtcgcgccggccgcttgctaccatcacccacggcaaccccaacctccccagtcgctcgctcccacatccgctcgaccacggcctagcctgacgtggaggtgttggatccggtcgtggcggtgatggatccctagtctcctgcgccaagtacgccgcaaggcccgcaactgcctctggtgcacctagaagtattgcttggacaggaacgcgttgttcaatatttatgacgattgcaatacttttatatatttattccatattgtattccctataatcatataaaatttatttgctgcacttcaaaacaaataactaaatgtggatgtgttctcaatgaagttctattgttcaaatacaattctactaccttcatttcatattataagatgtttggcatctctatcccttatctagatacactaattatatacatttgaatttgtatatatacatacatacatgaagcacgtacataaatctatgaatgaatctatttaagacctaaaatatcttataatatgaaatagaggaagtacatctttagaatctacttattaagtatttattaagacaaacactcatgagtatgaaagtatggtctatatatgagtgttgaaggttgtgtatgtgcacacattagttttttatatattatgagaagttctaaatagcacgagtagagaccgaacacatttaatcaatatcaagtttttgccttttctactccaatatgccaaccactgagcctcaacggtcaccataaatcccatttttagcactagccacaaattcacctcagcataacaaattcacaaataaatgtggtgatagagataagcaaccggcaaccacattagcagtaaaccacagccttgtccgcgcgataagatagtgtacttaattaaccccatacagttaatttaccttgttagcagtaaaccaatcattttaaaccccagacagtgcaaagtttcatattgatatggtagaaaaaaaaatacaagattacaaactgggatatcgtaaccaggaaaaaaacaaaaacaaccagcaccttcgcatgttggccacacctcacacaacctaggagaaaacacaagcgtcaagccgaccgccgctagagctaaggggagtcaaacgccccccacacaccaacttcatatggaagatcgtcaacaagttctctgacagagcaggggactagggttcgccccccgtgccacctgcacagagagacgacatggggtctgtccggactaggaatagctttgccgatctagctaggtgtaaactagtagactcctttattttttgcaagtattaagggctttctacattttcaaattttcgacctagttcaaaatttcaaaatgttttagtacaggccaaagtgaaagaatgaactctaaagaatatagtcgaacagttccagaactacaagtcagatctatacaagaaatacatcctgaagggcctgacacctgacttcaacaaattcaccaagctaaggaatcattgggatgtgtttgtcgcatacaagacagaagagcacgggcaagtgcaaatagaaaaagaataaagccaatgccgctaggaagcagtaccatcaccagctagggtcaagcggctataacaaggcagttgccaagtgggagagaatggaaactggattgctagaaagaggtattgttccagccacagctaactggcctgaacgatcaaagcattggtactatgctcacagtggaacgctcaatcccagtgatgggtccttgctattaagtgatgagattcgcgaagcagcaagctgacttatggatgcagtagaggcctctgctcagggaacattctagcccgacaaagagaaggacgagcatacgctcgcactacaaaatcccgagcatctagaataaacgcgaggaaaagacgtggttgtttggaaatatggatttcaagaggacatccacacgtacaaaagtcgcatgaggagcaagagagataccgagacgaaattagtagatcttgagtataggcttgcgacccatgagctaaggatgcaagaggaggtgtcacgacatgtggaccaacgcctggccgaacagtagatccaacagactcagccgtctgttcctcccgtcatggtgagcccctcaggcaatcgcaacaactgcgcttctacagggcaagtaggagaacagggtgcagaagctgcagcagggccctctcacgacaaaccaccctacccggttgatgaaatcacgcggaggacaccgtgtgacatgcatattccctttaggaacttatcaatcaaggtatgcgcgtagttttatgatatatgacatgtacattgcgaaagttggtgtatatgtcaattactaattaacctcgattctcatgaaggtggcgtcgggcatggccataccagtggaccaaaatgggacatttcattgcaggtcgactccaccttggtactcaaaggtcgaagttgaactggtggaagaaggcttcgaggatctcgagctagacatcccagaaggagacagggagacgaaactaggagacacagccccacaccattatactatagtgcaagtactacatcatgtttcccgggcgaaaagcagcgtcctttcctccgcctgcaccgtctcctccacgagcaccaactcctccacgagcactgactcctccgaggtctcctccgtgagcacggactcatccgatgtctccgctgcgggtatcgtctcatccatcttcaagtacccgaaagtcgtgcccacttcgtcccatgccgtcaaagtccacaaaacaaacgaagaagccaacacttaacaagccaaaactccccgctctcaagaaaatggcgtacgactgcactcccgaggagactgacaagatcataagaacagaagtgaaggcgcacttcaagccagggagtctaaaaaagaagactcctatagacccgtcagctaagaagttctttcagaagatgagcgcaccaatcacacataccttactatcggactatgaccgatcaataacgaagtcttttaagaagacaagaggaaagtccaaagatgtccctcagctcggaaagcaaccaaaacaagcagttgagccattgttaccacctgatgaaaaggagataagactatttatggcagagatgggtctaaagagggagcaataggtgggagacacacaaataaaaaaagcgacagaagtgtaaaatatatatttatacatatacatgtataatatataaacaagcagcaagtagaacaagcaaattaagaaaaatggaaaaagatctggactaaaggtggttccaaaccagaactaaagataggttcctagcagtggcaattgcaattacacattaattgagtggtcaaaattaggagttcgatcgtcactaggacaacgatgataattgtattgtatcatatacatgtttatccaaaaatattgctacatcagcaaaaattgctcacgtaggacttacgagcagtagggtgcatatgtctgctagtccccttcctaccgtatgttggtccccattcccttccttccgtataatggtcctgattcctgagagaatcacgaaagcaagtgactgcacatcatcatcacattctgggaaaggtggctacgtcccaaccactaaccattatatgccttcaaccacccaaaagtgttgcccaaaatcggatgtgatttgtaatgacaattatacatggattttttcctcatgtatttgcaagttccaaggcgtttaaaactgtacagataccatatagaatgtgtcaaggggaatgctcaagattgaatcccaagttaattgtataaacaagccatctttcaacctctggatgacttctagttttatcctcatactactgtaaaaaaaaaaggttttatcctcaaactaccgtggaaaaagagtagaaaatatagtttaagttcagctgaaagatggagaagtcattttgccccttaagaaaatgcccccttatttcttgtattttatctaaacggttatgaaaaattttcaaacaaagtaactaggttcatgcccgatatatcactccacacacatgctctggacgttgttgaccaaaaatttgtgctcggccgatggtgccggatctgtgttggcgcgaactaaattgacgaacacaacggcctgggagatctgcttagctctagtgcaggttcaaaccttggtgagatgtgggcgtgccagtcaatttgatcctgcaactgacaagatatataaattaaagatcaccagagagccgatcggctgacaagctgatggagtaattctagccgataccgatactagctgatgccgatagggttttgagcaatcagctatatgtccaatgtagatgattatataaagacaatcggctgatgagaataaaacaacaatataatccaatagaaaccaatcggtgaacaatgatatgatagaataagtgatccgatggttaaagcatatatcggttagaggtccgatatcattaaatcaaaagattagataataaatgaaacttttgttgcgatcagttaaaaccaacttgtatacgatccttgtaagccgatgcaacgtccaaataacttatcggctaaaaccccgatgaaacccttattataataaaaacatgttagcctttataactctaagcacgactagaaatgatgcatcgcaaagtatgcgaagaagtcataaacataatgtgcataagagcatacatactgatccattgcaaaccaaattctaaattcgtatggttgacggaaagaaccgatcaaaacagaagggacaaccttgctaataatcgatggtactattaacataacgatcaatcacataaacataaaaaaaagaatataaaatgcagtgatgaatttttttctaatacctgcaaagcatataattggaatagtactcatgatcagatattacacactaatacaagtttttgaattttcttttatattaatgaagacttgcgtgcataaacaccactgtgcaagtacacatccataactgcgtaatcttaacacttgctcaaaaacatggagatcagcggcactgaaatttagttaaaagggcacacacacgtgtgcagtatggaaaaatgggaataaaaacttagaagttagaactctactagactgtgtttagtttctaaaattagagagaagtttaggaaaagttaggagtttggaaaaaaagttaggagtttatatgagtaagaaagttttagatgtgatgtgatgtgatggaaagttgggagtttggtgtgaactaaacaggtcctagataaaatcatacacttattactccaacacatttctaatgttgaatgttcaaatactcacgtgcctgaccaagccattaaatggaccatcacatttatgagtgatatatggctgctatgaactctgaagtatcgacattactgtattttagaaggcaaattaacaagataaataactttttaatggtaaagaacagaatcccgtccatcattatccatgtggtatcctcgcttgcttctcgcacacacaccacacgtcggcgtgtgacgatgctctcaggtgatctacgcatgtgtgtatggagtatggacactcacacatgcgggctttagggacttggcttgtgatacatgtgggtcgtgctaagccacactgtgtcccttttctactttttttattttatctatttttaagttaaactcaattacatacaaatctaaagtttccaatcaaacatttaaaggttacatgaattgatagtagcatgctatattagaatggtacccacatgtaccaacacctgggtacatcaaacttggtatcaacatataccatgtctggcactaagtattatgatacctataggtataagtaatgatacgtgtaagtattttatcgcgagcgctaaacgagccaaggaaagcagtgggctagcaacccaacaccatctctaacactaagaactctaaccgtgcgtgtgtgtgttatactcatccgtggcatgcagccttctctcgattctcaatttaactcatccccttcatctactcgtcacctcatgccgctccactcagtcaataatctcaacatttagaatgctctagctatgtgtttggttgattgtatggaagcatggaaccaatttgcagttacaatgtgataaacacataatggaactagtgatacatttacttttatgtacgcaggtttgatactcagattgtatgcaaacattttcaaacttgaactaatattgctttgaatgtgttgggctgttagctcacaagtttaacaagccaacaaatgggtcaagccaagttaggcttccagcttgttaggataatgagccgagctaggttggctcgatatacgaacatatctctagtgatgaatgtaaatatgtgtgccaagtaccagtaatgatatgtataagtaccaacaatgatacttaataggtatcgatgatgataactagcagtgatgatacttgatcatatatattaggataccaggatgatatggaggtttgtcgagatgtgggcaagcaatatgcgcagctagctagcccacatcatgctcacgcttttgtactcacacaagcattttcttcatttgttcataccgacgctggccacaactacctagctagccgcggagtacataggtaggctcatgtaccgtggcgtatgcgtgttgggcaactcgtcgagcatatgcaaagagccaaagatacctcgtgactatgtgagaactattccataatagcatctccaaa

SEQ ID NO: 22453 - DNA, 2015 bp, Oryza sativa
tatgtcaagatgaagcaatcaattaatcagccaacaagtcaactctgggagtcatcaattttgtcttcgcttcagagcagtaggtcaagattaaatttacatgtctgggagtttggagtcatcaaccaatcaactcatatcagattcaatgagttgaacaacagcatatactttcctccaagtgaagcatctacaacagtttgatggattattgtcactgacatcatcaccagcacatctgcttcatcagctctgacattccgccgttgctaatggatgactaagaccttgccaacttgctattccgccttcacggttgacctactatgcaaacgctgatgagcgtcttcgtcattatcatcggctattacaccgctattgactggatcaccgacatcgtcatcttcatcaacatcttgtcaagcctcatcaacatagcctactctgcagccgttgatgggaaacttcatcatcatagtcggctatctctgttgccgctaattatcattaccttcggatgcgtttgtcgccgccgattattttcttcatcttcatgattggtggatttcgccatcaccgttgatgcgcgtctacgtcttcatcgtcggtttgcttttgtcaccaccgactgttctttcgttgttgttgggcgcctacatcttcactgctagctgacctgactgttgccgactggtttcttcgcctccatggttatgcaactttattacatttgattggtggcatctttactaccactgacatcttccgttacttctgatgagcaatttcgtcttcatgttggtcatttcatctccatgccgactgcgtcagctattgccaatagacaattttgactatgacagaaggacaagctatatgctcaggggctcatcaactcaagcgtgaggattatatctccaatttggacttgttccggatacattccacatggattcatagtcatgagtctattttctatgctcaaagactggactatttattattccccgtaaaggttatcaaccgaatacttgcgccagtcgggattcaatttttatatctattttggagtatcccataagggataatcactcagatcacatagtctatatcacccgggagcatgttacatgcgtcatcctttaaagggtatcgaaggcatattttttggcctaggcctaatatgtctgcagcccatattttcaggtgtggcctgtcacgttcttttagggacttaggcactttttgcttaggccaaagtgcgcgtgatcaagtgcccaataccttaaaatccttttataccgcagttacttaactttttaggagttggtacaatgcatcttaaaaggtgtcaaacagtaaagctttatatagctgtcccgctgacttttttatatataagtcaaggtgctgtttgggtttttaagcaattgattggatataatatcattgcttttcgccacgtaagtgtgcatttttattgaccaatattatggcttaggctgattatatattgtggtcattttctaggcggttggtaaatcctttatgagtttatttactcggattttacaccacatatgccatatatttccaggtgtggtgaaaccatgtgtcttctagggacttaagcacatatgttaaagcagtgtgcgcatggcgtatgcccaatactttggaaatttctttattcacaatatacaagcttctttatagctattttgctatatcactcatcatattttacaaagcagttggtatatcactcggatcatgttatttggaggattcacaccgcatatgctatatattgatatcaagtcacttggttgattacgattatcaaaaccactcggttggttggattatttattccttgactatatgcttggtttgttcaattaaccacattgtcgggggctacacctattaggtgcatctggtcggtgcacctgactttattttccagccctccacagtcttcagatttggtaaaagtactcgggagaccatga

SEQ ID NO: 22454 - DNA, 13543 bp, Oryza sativa
cgactgcgaaggtctcaggggctactgtggatattatgggtaccccatacccacacggcatggttatccgactagttataggggataacttatatctatgtaatatgtaaccgatcatgacttgggtattacgtttccttttatattatggagcggcctaaagtcctgattcgattatattgtaaaatagatttaggaaaccgataccgtattggttaaggtttctatcttgtaatcctgccccccatcctatataaggtgggcaggaggccctctagggggcatgagacaacctgatcgtcagatctatactacacccggcggattcaaatccccaaacaggagtagggtattacctctcattgagagggcctgaacctgtctaaatcctttgtctctgcatccatccacttttaggtctcgtgcgctacccccttttattattgccgaaatcatgtttcgacaccgactcatataaattccatgcattctatggtgagccacaaataatgttaatctttccttaagaaaatcccaatatcccagacggcaaacttcagcaggaaatgggcgttcaatatgaataactgatggaaccatgccattttattttctcaccccccaaatttggtccagcctatgttgagcaatattttagctgagaaatgggccaatactaggcaaatctaaattaataatgggccgattagtacaaagtaaacacattaacaacgatatgatggcgatggcgctctttctcggaataagttcaatttaggttcctcaatttgttgcccagtctgattgttgtccttgaaccacaaaaccggatacaacgcaaccccccaacttacaaaaccaatgcacataaggtcctaaggcggtttggatagcggttttggctgacgtggcgcctacgtgactggtttgactaggtctccgtcccacctggtagtgacgtggcgcttacgtggcaatcatatctcggaaaaataataaaaaccatgggcccacatgtcaactacacaaaaaaataatttaaaaatggtggggcccacgtgggcccacatgtcagctacaaaacaaaataaatatggtggcgcccacctagtccccacatgtcattccctctcccctgtcggctctccctcctctttctcatcgcgccacggtgccgcctcacagccgttgccgccgccattgggcgtcggcttggatctgcgtggaaaggaagggcgggcggcgaggagaacgacggagcaagcgagcgaggcgggcagtgggcagagcgaaccgacggcgggtggcgaccttggtgagacggacagtgggaggagcgaactgatggcggacggcaacctttgtgaggtggggaggaggcggaggggagcgtggagaagtcgatagtgacggccggcaggaagaaggcaagtgtgctggagatcgagcagaggaaatccgcggtaggtccatcgtgaaagacgacaacgacaaggacatcggtggcttggagggccacgtcagtggcgaggacgggcgccaccgaggccagcctctcacctgcggcaccggcgttgttgtcatcgtcctctgcagccttacccctcgtttgtgccgtggtcgccgcctgctagagatgcgtgtggagctcagccttgcccctcgcttgctccggccgccaccgctccgccggcctgcttcggccacggcccgccccacccctcgcctactctggccgggagagagaggaattattttgtgtgtagctgacatatgggttccacgatttttattattttttgggataaaattgccacgtaagtgccacgtggaacaaagatctagtcaaaggagtcacgtaggcgccacgtcggctaaaaccgccctccatactgccgagggacctcgtttgcctggttttcgtaagttggggataggtcgtactcggttttacggttaaggaacgaaaatcggactagccgactaatagagctaccttaagtgaacttattccctctttctcccatataacattcaagttatttgtcctacggcccacggccacgagagaaggatgacgcaaacgcaaagcatatcgtttccgaaactcctagttggcgattgatcgccaggagtgatcggtttcccccctttctccacgtggtttcctttttttttttgtcaccgcattactttcctattttagtaaatttatgcatctaaagtttatacatctcaagtttacacatctaaagtttacagacccaaagtttataaatcaaaagtttatatattcgattcaaatttgaatttgaattcaagtatttttaatatataatatttctatatatctaaagtttatgcacctaaagtttatagacctaaagtttataagtcaaaagtttatatacccgattcaaatttgaatttgaattcaaatattttttatatatagtattcctatacatctaaagtttaaagtttataaacctaaagtttatagacccaaagtttataagtcaaaagtttacatacccgatttaaatttgaatttaaattatatccgatttaaatttgaatttgaattcaaatattttttatatatagtatttctatacatctaaagtttataaacctaaagtttatagacccaaagtttataagtccaaagttaacatacccctttcaaatttaaatttgaattcaaatattttttatatatagtatttctatacataaatttttttaactttgtttttttatttttttaaaaatttatagtgtagtaggaagagaagaagtggaggagaggagcgcgcgcgtgtacagaggggcatagggatcaatcgatcggacgcccattagccacaccctatggtttccgttgctttggttgctatgaccgtcgttaatcttagtttagatcaccatttctttttaacgaaaaaaaaagaatcaccatttcttaattctttcggctgtgatattaccaatctggtttacaccgtaggaggactttccggtaacagccttaaaaataagttaccacttgtttgaattgggttttaatgcacagcttaatattcccgtcacttaaaacctttttttcttaacactagcaatatgttcgtgcttttgtaactgatcatacctatataattagtgattaactaggtgggtggattgagtataaatcatgagctagacccatataattaagaattggctatgtttgtggattgaggagaaagtagttaacgacggtgtggttaattcgcacatacgaaagagcacacgacctcttgcattcagtgagaaggagacgtaaggacggcaactatgtttttgaagcagtagagatataaacacaaattaactcttaaacttagagcgattagaatattatatacatataattaaacatatatccgtatttgatattattcaactattatatgggatacttgttttcgtttctaaatccaagaaaaatatgaaagaaaacatagtaaaaaaatattctcatttttgtgccatttttcacctagtaggtcaaagtccggccaaggttacgttatgttcgtttcagctaacggctgatgaattttgtgtactgattattgtaccatgtttatagaaatatgattattgaaaactttatatatcagcagtactgaaacctaacttgttctaaactatttattagcattatagggacaagcaatttgtcaataatctggccaatcatttcatttcaaacgctcccaaactagttttgcttccgccttacaaggtttccgccatgtaatacgagcatttgtggtatttgaaaatttatctacaaatataaatattttaaaccactcacttcgtatcaatttacttgtcattcttgtactcaattttttttcaaaatacttgttgtcctctcctcacatccaagtaattttagagatgcatttccttcgtacctttcatcaatacagctatactagtactcctcacaaagaattttaaggcttgatttaggaaagatgattaggatttaattaatgagagtagtaatataatttgatacacattctagttttacgtgagattagctagaacgatagataaactaaaacggacagagtactactctttccctatccatcatacaactacatttatctttctcaatcaagtaatctctcatgtgggtattaaaagtacttttatctctacctaatttctgctaaaacccctaaaaaatacttatatttgtcgatgtaaagaatatttccatgtaaacgagtaaatgctgctggcattattctatcgtaccaagatgccaagtacatagtcttttcgtcccaaaatataagccgtttttaacagagattaaatagagatgaagttaaactagctagagattattgggattggttgagaaaataaaacagatatataagtttatcatattttacaataaattttgaactcttaagaaattgcatattggaacggagggagtggtaattataaacagacaaacagtagagctcacaacttaccccgtccgtgcgtacgtagcagcactgcagctgtgaagcagagcataaatccgataccaactctgccgcacaagctggaaccgaactaaaagcatccatccgatccggatccaaacgtagtacgcgactccgacctctgctctcttccttttacaccccatatccatcgtcccgcctttctttcccttctttctttctatcttttccacgaccgtgccacggcgtcagccagcaaactaatactaactacacaagcctcctccgttcctcctcttcttcttcctcattctcctcctcctctcgaggccggccgagatatcaatggaagtcgaataccacgaggtgagccgcgcttcgcattgcatctgttctatcgttttcccattttctcgcgtactgaacctgacatgcattcttccgggcgccatggatggatggggggagcaggagtacgtgcggaactcgagaggggtgcagctcttcacctgcggctggctgcccgccaaaacgtcgcccaaggccctcgtcttcctctgccacggtacgtatgtagtactagattcaaagctcgatagctagctgcatatgcattgagcaaaagaaccaaccgagaatgaactttgtctttgtttctctctgaaatttttagacggaaacgagattgttctcatgtttcgaggctaattgattcttgttgttttgtttctgtgtgttgttcatcaggctatgccatggagtgcagcggctacatgagaggtatgaacctggcacacatttggcttgtctgtttttttccccttttcttttgcttgtttagcttttgcttgcctcagacagagtagagcatgcatgcacagagaaatcttttttttttctgtgacttttttttttggttggacctctccatttgttctgctgccacctgggcacgtagcgattaggaacccagcaaataagaacaaagaaaagaaattttttaggtggggtttcacgagttagatgttggtaggcgtggatatcacaactctgcttctagatgcattgatggattcacatgcagctttattcaggctgtgtaattgttggtcattatacagtgcttctagatgcttttggcactgaaaaattctcatacagtcctggccaccaatctgctgtaggcagtaaatggtggaggatctcagtaaatatatatactgtcttaatactattgccatatgtttgatatactaccaaattaacatgaagaacccaaaaacgtattagcggttagtgctataccatttatacaagatggtagatagttaatactccacttgcataattctggtgggtgcccatatagtttgctcaacaacactaactcttctgcatgctacaaattcagttaagataactttaaaatatattcagttcagagaaccttaacaaaatttcagttcagagaacctttccaattctgtctgcactgcgatgtagtactagactactagtgtatagtgctcgatctgtcattaacctagatcatgaactcagagaaaagggagggttatattcgcagtaatagtgttcttctgtctcaagaggatgcagcatgcaagcatcgatcacatcgacatggatattgatcaatgtggacacacactgcagtagcagcggtaggagtagctgctgcgatttactggccgatcgacgcatttaaaagccgtcctgggcaggtcgatctcgatcgaacgatcgatcgatcgatcgatttcgatcggttcaattcaaggcagcaggcaggcaggcagtgatgcatgcacctcccaaaattaaattaactgctccccatcaatcattcatatgcttctgaccttgaaaactacctcctgtctcctcctcttttggctgtcaccagtggtaaccctgttgccacatctgcgagctcattgacctccatagttaatcgactgtagagtggtctagcgattagcacgaccattagtcgatttgcacgtgttgtacaatgtagaacttgagcaagggtgatgcatcattgttcctacgaaaagcatctctcaccttacattctatatagtcactatgtgtctgtcatctttgtagcatgtttttctgttttaggactactttgaaatagaaaaatttcgtgagaagaaattatcgggtttacactagttttcctccgaaaattctgtaaaattcttacatttcaaagcaaccctaagatttagttaggcttttccaagtcatttggtagttgctgatcgatgagctagacacattggtagccaccaactaatgctgctattattgaagtacttgatacgtccttgagccggaggctagccaggttttaagcataagcctgcataatctgttctgacggtccctttcaagcatcttctgcaggccatagttgtcaacaatgcaacgagtcccttccatccatgcatgatgcatccattaatttctgatttccatccatttatatgagatcgcgagaaggaaattagagaaaaaaaataagaagggaggttgcagtacaggtgagcggcctgacctgccggccctgaccattaagttaagcaccaaccacaccgccaactcttttccttaatctaaccaccatatttaacactaatcacacacgatttaagcagacgacacttaatgagttgctttagcatcattgttattgttgcgtttaatttagctgagagatggcgaggcataatttgccacttgtcgaatcgcctcaatctctattaaaccatctccttcgttgtttgtatgccacgttagtaattataaattaattaaaattttgagttttttaaatgtttgaaaagaaataaaaattgggttgggtgggtgtgggtgtgggtggttgcaacgctgcgtcagcttggctgatccgggctatttggcaaccgatcgaaggagtgttgatgagcattgggcacacgacgagaaggatggcctacgtacgtgcctgcaatgcaatggctgggtgtggttgagctgccattaaaattccttaatggagtagaggttgcagatcgatctagctaggccaccaagtactactactgtagccgtaatgcttgggttcattcaatactgcgacttgacgaattcatttcctgacaatcttggctgtgtacagtatgagtagtactgtgtggtagcaaattaagtattgtgtatttgtgtttgtgtagtgccagttttacagtattatactcccaactgcatgcgtgcacaatactgtaccctgaacttacactgtgctgtattacacccctgcagaattggccccgttgatctgttaaaagagatatagaaaacttgtaggagttaaattctatatgaaaattgtctatttggttctttaaatcaaacgattgagactccaataatagttctataaaattcatataaagtggttcaagaaaaggagagtttgctggaaatttagcataaggtcgaatcacatggaaacttttccttcatgcctctgcgttgctgtagccaaggcagcagatcaaccgcttatttttcatatgtttttcaaccatgtgctttacactcgtatttccattaaaaaaaaccttacattttttatagttctgtgtgtttttcgatttcttgttttaaaggcttaatttattagctagatgaagtgagtatgtgacaatatctgaatcttttttttatatgagaaatgggttcctggatatgtggaagagtaacatttgggattggatggatatgggatgcagagtgtgggatgcggctggcggcggcggggtacggggtgttcggcatggactacgaggggcacggcaagtcgatgggcgcccgctgctacatccgcagcttccgccgtctcgtcgacgactgccaccgcttcttcaagtccatctgcggtaaacaacaaaatctctaccctttcttcattacttccctcttcaacctctctgcttactttacattcagctacacaatttcagtacactatcaagccaggctctgtctgtgtgtagctatgcaatgtttcaacttagctgccgtttactgtacgtccgttttagcattagtgatgacatgataattcaggcaccaactagcttttaatccttgtcgttgcccgcttaggctaaatacctgaatccaacatatggtagctagccagctacttgtcatttgtcccccacctaatgatgaagggggacgtacgtacggagtttggcacgcattgaatcgatcttggttcatcatcggcaatggagggctcgatcggtaggccattgagcattaatcatatatatatgatcgtcatcggtgatggtactatagtagggtacccactgttcagcgatcaccactacccggcaatcaccagtgcttggtcggtcctgtggcaacattaattattatcggtttgtttggattgaagccaattttactctactaaaatcttagtaatttcaatagcgtcatttgcatgtttggtttggtatcaatttttttcacgctagttcagattttatactactaaaattggtagtattaaaatttggcccatgtggctggttactcgagaggcgtccgttcctggttgctgttgtatactgaagcctgatatatcgcagtaagctacattctccgttttatattataggccgttttgattattttaaaatcgaacttcttaaaaatttgatcaagttaataacaacgtttatagcaccaaattagttttatattaaatctaacattgaatatattttgatagtttctttgttttatgttaaaaatattgctatatctttttcataaatttagttaaaaataaagaaatttgatttagaaaaatatcaaaacgacttataatataaattataaaactaaggtagtgatttcacagtataacatattagtgctacagttacatgcctatgcattctttcgtgctgaatagctgaatgatttgtgatatttattggatggtataaacgaatgaattagctgttataaagtttcaaaatacgcttaaaacagcgttctgaaaaattcatatgtacaaagtttttgcaaaacaagaaaaagaaaaaaaaaatcgcaccatttaggcatttactagttcggaaagcaaatccatggtttttgttcattaattcgttaagtgcagaaaaaaaatatactccctccgtttcagcttataagactttctaacattgtcaacatttatctatctattatatactaaaagtccatgaaacatgctacaaacgctctcaagccgccacatggcgctctaataaaatagagaaaatcctagaaattctaagaaaaaagcaaaacatctatctcttgattttcacttaaattagtgggtccaatatacaccgttagataaaattgatcttaaaacaaactaaataccatgggtcccacctatcctctcctcccgcgcattggcaggtggagtatatacgtacgtacatggtacgtacgctacctccccccctttttttttccttttttcttctttttttcatttatatatataatggatatattttttaaataatcataattttataaacaaagaatctaccatcatataacttaagccggtgtactctgtactattattttcaaataacgcactattttaaaataagttttacataattatatcgtgtacctatcaaataaacaatatctatattaactaatttatacgggtacttaaactgatggctccattatataaatcattagatctactttttattacattggtctattattatcaagtaatgcactgtttcaaaataatgcctacaccattatattgtttacccattaaattaacaatgtaaaatctatattaactaatttacacttacactagaactggtggacctattattataatcatcggatctattatttgttaataaataaagcgtccaaaattctctttttgcccgctgcataatgcaacgtctgcacttttgcctttcgcatgtgtgacaaagcatagtgtttgagacatctaaagtgatcacaaccgctatagcgctaccgctttgccacatatcaaatcatatatggatatgattaattttgttaataacatgaaaagaaaattaaaggtgtgatgcagcgagagaataattaagaaccatgggttgtgtttttctcaacactaattagctctgtttaagttgaaaccgagagttgattacataacaattataatatatttgtgttatgtcgtatttggattttgtactatttgttcgtacatgtgaaaggattcattacgttataaatgtgagcgcaatattaacgaatatcaatagaactcttactacgacaagggtgataaaagggagtttaaggccttctcttttttttcccgattccatattttggatttttgtttgcacgctttccaagtttctaaatggtgtcttctttaaataacattctaactttttaggagtcatgtcatttatttataccctcaaatagctatcacataaattatataattcatcaatttcaactatcctaaaccttaagtactacatattttttttcatgcgagccatggtgatcaggaaattggtgatcaacggatcatcaaagtcgtaagatgaatatataagagttactcttaacaattgtaaataggtgtcaaaattagttgctattaattagacatctaatggcttgctagccacaaaattaatttctctctacatgtatataaacatggacgaagttggaacaaatattaccatatgtcccatacatatatattgcgcagttaatattctaattagtcatttaaaattccttaaaatactctcaagctgtcacgtggtgctataataaattagggcaaatattataaattctcagaaaaaaatcaaagtatctattatttgattttcacttaaatcggtatgtccaatattccgttagattaaattgatcttaaaacaacctaaatactacgaggtcccacctcgtcataggtacgcacctacatacgcgggtacgtacgcctcccctccctttttttcatttttctctttcttctttttttcctatgtatatgtttccctccctttattactatatcatgcgccttcatgagacgatttaatcaaaagaattttgagtaccttgcactcacatttttaatttgcggccataatacacggtatgtatatacatggactgtatgataattaactatcaatagtttctaatttactcgagaaaaaaacatgattcaaaaatcataattacttaatccatctcctactcaaaagtttgtgaatggttttctaagataccttaagaaaaatagaacccttaaattattataaaataatattatccaaactttagtttgccctaaatctatgagacaaaatttctgaacaaacaataattttacctttcaataatatagtgcccgcgcatacgcgcgggccaccttcctagttcatatagatgctaataaatctaagcacatatatttgtctaaattcattaacatatatataaatgtggacaatgctagaaagtcttataatatgaaacggagaaattacttctctgacttctaccagaaaaccacagcaggccaaacaataatcttacctttcaataatatagtgcccgcgtatacgcgcgggccaccttcctagttcatatagatgctaataaatctaggcacacatatatgtctaaattcattaacatatatatatatatatatatatatatatatatatatatatatatatatatatatatatatatatatatatatatatatatatatatatatatatatgaatgtggacaatgctagaaagtcttataataagaaatctgacttctaccagaaaaccacagcaggccattttaaaaagacgtggatattagggaatgacctaatatgaaataattagaaagggtgagacgtcgaacccaggtcgtctagcccaccacctcgtggagctagctgcaagagcgctgcgcttttctcacttcaggccattttcccaggtcttgcatggatgcctgcctcactgtgactgatgctgctcgcattgcaaaatttgcagacatggaggagtacaggagcaagagccggttcctgtacggcgagtccatgggcggcgcggtggcgctgctgctgcacatgaaggacccaacgttctgggacggcgccatcctcgtcgcgccaatgtgcaaggtagctcgctgcatgcgcgtgcagaaatattcttctgaataatttgatctgagaaaaattaagactgaaacttggtgcgtttccttccgatttgctggtgttcagatatcggagaaggtgaagccgcacccggtggtgatctctctcctgacgcaggtagaggacgtcatccccaggtggaagattgttcccaccaaggacgtcatcgacgccgccttcaaggaccctgccaagcgcgaaaaggtccgtgcaaaaacatttgcagtttttttatttctgttttgtgttatcaagtcagtttcagtaacatttgcttcagttaacattggtagtagccctatgttaactgttaagtttgctagagaaacccacatgatgagttagttcaacatgatttctgaacatttgatacagtggtccaacagatttgttgtcgttgagcatataaactcagtttggtgtgttctttgccatgccatgccaaatttaacagatcaggaagaacaagctgatataccaggacaagccgaggctcaagaccgcacttgagatgctcaggaccagcatgtacgtagaggacacttgtccaaggtatgtacccctcgtcttcaaatcaactcaatatatgcaccaattagttctcacatctttaggatggcactaagatcacttgagtatgatcttggccatg

SEQ ID NO: 22455 - DNA, 2313 bp, Oryza sativa
acccggaggtgagccgggcgctgtacgagcgcgccgcagcgccgacaaggccatcaagctctacgccgggatgtggcacggcctcaccgccggcgagcccgaccacaacgtttacgccatcttctccgacatcgtcgcctggctcaacgggcgcagccgcacctggacggtggaggaccgcctgatgaagatgatggcgtcgccggacaggttcatccgcggcgagaggggcggcgccgctgacgtcgacggtgacgccaagcgcggccctccacggcggcgcggcggctgcttctccgggctcgccggccgaacgcatcaccactcggaaatgtagctttgtaacaatgtaaagattagaggctccagcctgcctagaatggtcaataagtggcacagtgtgcatgacttcgtgtattatagaggtgttaagagtcaagacatatgccaacttgccaagtaatgtaatgtatcacaaaccattccttttcctccaatccagtgcaaatttggtcaaaaaaaagtttaaaaagatgcttcatgtaagcaagtggaatgttctgttcatactgaaacatatatcgagtttccaataaagattacatgtataacaccatatggcttctatgagcaagaccaaaaaagacagtagcttacagtagtgcctatgatagattgatagtattagtagcatccccatgtgtccaaagaactagctatgtattcagccatggccattttgtccgtgaggtatgaagcaaccaaagaaccaaggcaccaatttcctttccaagtatttctacccgatttaacttctccacatgtagttactataaagtacaagttataggattttaatgagttgtgtgccgttgtcatgttgaaatttaatacatgccaccagctgctgcagattaggcttcctggtcgccaaagatgcgtttgcggaagtcggtaaccatgaggggaaggccctcacgcaggggaaccttgggctcccagcccaggagctctttcgcacgggtgatgtcaggcttgcgcttgtgtggatcatccgcagtgttcggacggaactcaatgcgagcattcggatcaatggtgtcctggacaaccttagccagctccagcatggtgaactcacccggattacccaggttaaatggtcctatgtgctccccttccatcaagctcatcaacccttccacctgaaagaatcatcacattagcagcttgatacacgcattatcaataaaattagatggcagatctaaatattggtttataattaaagaggggattgctccttgtatataaacaaaaaaagatgtgagatgatctaatcaccataaaccctcaccgtcaatcaaagttactggatacctaaatatatactgcaagaagtcaacattctgctcttcagcagatcataaatgtgtactcagagtattatgcagaggacatcaagtatattagtcatttcggtgatgctactttcatgtatgagacaacaaaacacaattatatgctcagggaatgtatgcaaataaggtaacaggcagatatcaggtcattgatattgttcaggtgtctcatcatgttatagatatacccaccaaatcagagacatattgaaagctcctagtctgcttgccatcaccatagacagtcaaaggttccttcctcagtgcctgaaaaccataattgcagaaacaagatgtcagtatcaaaggaacaatcaaaccatctgtaaattcgggagccaaaagaggaagatgcaagtgacggctacctgagcaacaaagttgctgacaacacggccatcatcaatgcacatgcgaggaccatatgtgttaaaaatccgagcaatcctcacctaaatacaacacaatatcataaattaacataatttccaaaagaagaaagtagcctgaatgctatccatcacaaataacctaaacagcataaacctcaaggttggcaccacggtggtaatccatggtcaacgtttcagctgtgcgcttgccctcatcatagcagcttctaacacctattatcgaataaataattttcattaaaaatctcttgtggaacaagcaaaacattgcttaaatgaaaccacacagtatatgccaaaatataaggactgctttttggaaagggttagctgttgcagtgttgctgtcaaatgtcaagttgaagaaaatactcctttctctactgttgtttgattcttctctaatgctctattgctgtcactattttggaaaaaactatgctgacttggtgtagtttttatcctactcttcccttgtt

SEQ ID NO: 22456 - DNA, 1739 bp, Oryza sativa
ttcttctctaatgctctattgctgtcactattttggaaaaaactatgctgacttggtgtagtttttatcctactcttcccttgtagcgaggtatccaacaagtgggggggggggcccttttggggaaaaccccccttctctcggagctacttctaccaagcaaaagtgtaatcttctaaacgaaagattcaaagcatgggtgccctaaaaattaggacagcccagccacaatccccagcatttggaattccagccagtagccctcctttaaaaaaaaaaaaaacaaacatctatattctcaacggttcatattagcagtggctccatagtactatagccttttcaaatcacagggtaatccaataatagcttatttttctgtcagtattttgattcttagaaaaaatttctagaacaaataaacataattttgttggtttctgtcctacagtaaaattataagaaattaatacggagtattgacagcataggtgttcccatactcttatctgttatccaacaaacaactcagtccaaacatgaaaggtaactattaagttaatttgtcagttaaatgctgagacattaaataatatggcaaacaaaatattggcagagaattattaccaatggggttgacattgccccagtaagtctccacctgagggtgctggaggggatctccatatacctcactggtgctggtgaggagaaattttgccccaatcctcttggccaatccaagcatgttcagtgtcccaaccacgttggtcttgtgtcatctcaaatgttaaggctcacagtaaccatttgtagaaactaaaagaaaccgctcatcaacaaatcaaaacacttgcttgtttgacctttcgggacagacattccgattaacaaatcggcacgaaatccactaaactagatctagttgttggaaaaaactgtatgcaatcttgacttggtttcttccactaaaaatcgtttttttttcacagttacttaccacaaaaaataaatagaaagcataattttgatattcaatcctttttggagttaaaacaacattaagcaaacttcgtttccatcagttcatgaagtttaaagcaactagagatgcgggttgcagaacgccagatccaaagatctttaattagagcaatccagatatgccagtttatgtatcagaaagcaagccctgacttcatgttcagatggagtataaagtatgcaatgaatttggccaaaaataaatgagaaaggttgaccagacaatcaagatgaacacctcagctccagaattacagctgaaatctattcacactctatttgttatcggaaaaggctatacgtactaactttttcttactaaattcttactaacacggatatgtcatgctatgagtatatctagattttttataacgtccatctacctaaatcaagcagttgaatatatatgcttaaaagaaggaatttccccatccaaaactaaccgaatccagcaaattcacctaaaatcgacaaaatttaactagaaatgggaaagtaaattaaacaacccagctatcagttagcaccaaaacttagatgagcatcgagaaagagtaattgatgagcaaggatatgatggtcttgatggggttgtacttgtagtgcacggggctagcggggcaggcgaggtggtagatctggtcgacctcgagcaggatgggctcgacgacgtcgtggcggatcacctcgaa

SEQ ID NO: 22457 - DNA, 8687 bp, Oryza sativa
ggaaggggcgtagagggagaagagggcggcggcgaggagcatcccggcgagggcgaaggcggggcggtgctcggcggcggcgtagcgggcggcgcgggtgagccaggagagcggcttggagggcttgggggagtactccccgccgtcggaggcggagcccggggcccccgcgccgccgcggtacgtgagctccgacgccatctccggcgaacgtctcagatgtagaaaaaaaaagcttctctctctctcactgagacgtgggacccacgcccctataattgcgtgtaaggaccaaggacgggaggttggagagtcagatttctctccgcgccgtcggcgaggtttatcgcggcgagggaaaggaaggggagaggtgtgtttaatacgacagccacgctgcggggtggtgtgggttgatctggtgcgttggatttgagatggacggtaaaattcggggagtttagattttttttttccgcgagcagaaaagaagaaatggacttggctgtatattgcgattgacttatcagcacaatttaataaattttcaaatttaatttgattttgagattttttgtcgcagtttttcttttatccctacttttagatagtttaaaacatgtatataaaagttttatttataaattaccttttatttgcaaatatgtgcttttgttttttcctccattatgcaaaatgatggggctactaccttggggtaattcttcacgtttcaacgtttgggggaatacttatgttgcgaacaataaaattgcgctaaaaaatgtgaaacatttcgaagaggcatacagatggataacaatattttattcaaccataatttgatccgtaaaacaaactgaaataattatatattcgtatctaaaatttatctccacgccaaatcaattattacaaagataaacaagtgaagcaaccagaaattaaaacttaattgtactacttgtttattattctgcttagaaggtgtttttacaactgcagcttataatggaaaaaccaagtaatacaaataattttagaatagaacttctataattctactcttgacagtacaaaagtcaaaactgaaaaaattaaagtgatggaaaaagaaaaaaaaacctagactaagttctgattttcaaatttggttatgactttcacacctcaaacaaacatgctcattaattatttacaaagtatgattcaagagaacgtagcttaaattccacgtgtaaaaattaactacatattcccacgcatccttagtgcagtgttgattctctcgaacatgctgacaaataaggtatggagactcggatgaatgtgttggttgatatccgactcattttttcggagctgctgatcatgaatataagatgtgcatgtatacattcaaaagggtgagtgtttacttgttgtgatcgtctatatttgtaacttgtgagcacccctttgccccgtgagccacctccgtcggttgtgggcagcacacaaattaatcgaataaactccctactattttgctgagtgtagatatataatttattttattaagaaacacactacaatgcagacacttacaacgcgtacaaactcactcttataaacatgtgcatacattctatttctatgaagactaaaaaacaatatgtataaacgtacacacacattctacctctttaatcaccttcgaaaacaccatgctatgtcgcagcagatcgcgaagagaaacaacgacaatagggctaataacacgtactcgtactactttggacctggagatataatatatcgtagtcgaccttatcctcgttaattagtcaccgttcttctatttgctacaagatgacacctaatccgctctagccaattgccacctccgcttgctaactactcatttggatagttgcaaaatgaaatgggcgtttgtaactcccttaaatttatactatctatgtagtactacatgccaaggatgtatgactgtttactacgtgtaaaagataaggagatctgaaatatatttagtgagtgcatttttcaatctctctctcaacactgattaattaagaagaggtagaaaccgtagaaagccagcaaattgctgcaaatgtggaatgtactattgcaccttactctttcatgttgaactttcagcgtttggacgcatgagctcgctttacgcgcctccagatgaccttaattacaaaaccgcaccttcctgaattcttttcacatcatcagaaggaaaacagaaaacatggcaatccaagagcggctgcctaaattgtgtatctgtttttttcttttccttctcctcacaagaaaataagtcttgcatgcccaaatttgccaaacttcgtttggttcagcagagaagaaactttgatttcaattgttccatcaacatcaagtaggcatagtaccatcatcaaacttggactagctggatgcatggtttgagtgtctctgcatctgtaccggaaatagatgaggtgcagtgcaagtcactgtttggagtgtgtttttgcatttttggagggccaaaatcgggattgctatatagtattcgaataaaatttggggatgaaatcttacagattttggaccattggatccatgttaagattcgtgcatcggcctctctcctctaactccggcgggctccccttcttctccggcgccagcgacaccccaactccggcgggttagggtttgaggttggggtgagggtaggcgggggttgggggagggggaagagaggggtttcctcggagcttagagggatggccgtggacggcggaagaccggtgatgggcggtggactccggcgggcggagaggcggcggtggcgccgccaaagctgcggagatggaggagggcggtaggccggcatctgcggcgggggcaaatcaagcgtaagattaggaggaggcggccggtggtggtgaatcctgcggcggggagccgccggatacggtgaatacggcggggcgggggcacctcgtcgtcaccgctgtgaggagaaagagggggggggagggggatgggagggggctcgccgggagggtctcgccggcgccgttgactctttccggccagccggcgaggcgggcggcggcccggtggggcggtggtggcggggaatcgcgggagaggataggaggaggagtggtggcggcgactcagtcacggggagaaggaggagttagggttaaggggctgcacgaatctcaaagcatatctaatggtctaaaattcgaatgataggaggtgggattttctgtcacatgatatatagacagcgccaggggcggatcaagaaacaaaaagttggggggactcaacataccaagtacaccgatataaacacataatctcagtactaaactatgctaaaatgctattataagacctttagcacctcctatcttatcaactatgatgaaaaaattgaagtgggggcttaggggggtatccataggttttgtgggtgcaggggcacgttggatccgcccctggacagcaccactaaaacaatagtgcatatcagtgcgttgaaatgatgtgttgtactaattcgaaatcgggccttacatgttaaaaatttagaaatatacgtattttctgtagaatttgcaagaaaatatcgaacgcgtgaagatttgcaaaaatataccgccatcgtggtttcgttgagcgagatcgtggtctcgcacgatcgaggcgcgagaacgagagcggtatcgctcgttcggtcagcgaggacagagcgcacacggtggcctaggcggtgcgattagcgagagcacacggtgtcgcactctaaaagtgcgagagcgagccggtgggccccgcaactgctgcgatgcgcgatctagcatgagaggaaagcgagagtgccggtgggcgcggtctcgcgcaagagagatgcgagagcgctggggccgcgactgcgatccacgcagtctcgcgctacaggaacacgagagcggtaattagtgattaattaccataattagtgattatttaatgataaataatgatcaattagttgctaatcaatgtgattaagacattaatcattggccccacagcagcccatgcggtctcgcacattggttgtgcgacaccgtacgctctcgcaaaaccaacacgcgagaccgcgggccctccacgcgccatatcgcactcccactgtgcgataccgtggctgcccgatcttccaactaaaaagtcccgctatcgcgctctaaaagagcgatactgatgccgctctcgcgattcgggcatgcgagaccgcatgcccgcgctctcgcgcgtctaaacccgatagcgaccccgttctcgcgctgccaataagcgagaccgatggcgccacgtggcactctcgctcggtggaaacacgaaaccgcatcgatattgcataacaaacaagtgacaccgccagctcaaatctcctcgccaattcgacgcgcgagaccgtcaagctctcgcacattggtaatgcgataccgtggcgatctcacgcttttccgtagcgaatctcggtatcgtgttttctatccgtgatttcgatggtatatttatgctaatcaaaccacatccggtatatttctgaaagaaagatcgatgaacagtatttttcaaatttttttcttacatgttcttccaaatatttggctgtgttcgggagctcagtttggaaacttctccttccgcacatgtagaaacgatgtctcattatcgtatgattattattagctaaaaaacttaaaagagtaaagttcatcaccggtccatataaacttgtaccgctgtgtcatcctggtccctaaactagcaaatcgaccgtttagatccttaaacttgttcgactgtgtcatcccagtccctaaacttgcagatgactcgtttaggttctccaacttattcagttgtgtcacccaggtctctaaacttggatttgaatatcatctgggtcaaataggacggtctaaagactttatatttaaaaataattcataactttttcacgtgaactctaatgaagacaaactttatatcaaacttgtagccctcgacgcgatctacaactttgtagttgatttttttattttaagtcattttttgtcccaaaatgtaatttttaaattaaaatttcaaaatctataaacatgcaacaatattttgggaccctaaacagttttaattcaaaaacttttcaactacaaagttgtaggtcgcgtcgagggctataattttaatgtaaagtttgtctttgttagagttcacatgaaaaagttatgaattattttttatataaagtttttagaccgtcctgtttagggaccggggtgacacaactgaacaagttggatgaccaaaacaagtgatctgcaagtttaaggaccgggatgacacagtcgaacaagtttgaggacctgaacggtcgatttgcgagtttagtgaccgagatgacacagcggtacaagtttagagatcggtgatggactttactcaacttaaaatatagattaatataatttttaaagcaacttcctttttttaaaaaaatgcaccacttagcaattcgagatgtgcgtaaaggactagtaaaggactagtgtgtagatctcaagaactttgcacattcgaacacagccaagcatagttggctcaattttttgtccataaggctctaggtatggatgggaatgatttaggagtgaagtacgagtacttaatacttaaaaagtattacgtacaatatgcatgccgtacagcacttagggctatttaggggctgtttggttgttgccactttaaaccttaggcctgtcataatttattaggttagtgtttggttgagtgccacagttaagtcaagtcacactttgttagtatactggccacacatcatacttttattttctagctaaaatttgtcatagctatggctaataaattattggccacatttgtgtctcttgtcactgttataacaaaatggagttgtaacaaagtcatcgaagtcccacaccggcaacgtacgccatacatgccattcttgagatggttaagcctttgctcatttcatattcacgacgaatatttgatcaaactttcaaaaaattaatcatcaatatgtttttaaattcttacctttaaaaattgtatgcgtagatttacctttagaagacactatcgtactgttatatacttatcagattttatatattacatcgatggtcaaattatcaaaagattgactatatatttatatgatcggagagaatacaaaacaaagctttttttatgtgactgcgagaaaacttatgttttgtcactctgagaattgccccttcaattatgttactactatctaacaaggaataagttcattttatgacccttaaaagtgatcgaaatctaatctataaccctaaactacaaaaccaatatctcgacccccaaactcctaaaaccggtacaatttgactccttggacggttttgggaggcggttttgctgacgtggcgccacgtggcgcctacatggcaatattgaccgagtcttcgacccacgtggtgttgacatggcattagaattaaaaatatgtgtgggacccgtttgtcattcacacaaataaaaaaaattgtggggcccactgacatgtggaccctacatgtcatccttcttccttcttcctcctccctctctccccttcttccccttcggctggctgcggcagctagagctagctggagcggcggcggtggcgggtgggcggctcggccctgctctagctcggagggccgaaacttgtggccgccgccgccgtcctgctcgtctcgcaacggccccaagtggccgcctccctcttccacgtcggcacggctgcgccgccgccttcgactgcgtggaccgccgtcttcaacctccgcctctgtcctcagccatcgacaacgccaagtgcgaccccccctggtcgacttcctccacgacgccgaccccatctcgccgagtgttagccttgccatcgtcgactcctccactccggggaccgccgccccgtcggaggggggcgaccgcctctttgtcgcgccgaggtccgtcgccgtcgacccgggggatgagctccttgcgccacctccgtccaccatgccggcggtgctccagaacccactccagctagcttccgctgccgccgccgcttcagctcccgccggcggccaccacaccgcggcccatgccccactgctggtcgagggtgaacaaggggagagagagaaagaagggagagagggaggaggaagaaggaaggaggatgacatgtggggcccacatgtcggtgggccccacaatttttttatgtgtaaatgacaaacgggtcccacaattgtaatgccacataagtaccacgtcaacgccacgtggatcgaagacttagtcaatattgccacgtaggcgccacgtcagcaaaatcacctcccaaaaccgcccagggagtcaaattgcaccggttctaggagtttggggttaagatatccggttttatagtttagggccatggattagatttcgatcacttttgagggttatgaagtgaacttattccatctaacaatgacatgtgtgaaatcatcttggtaaacaatttgtgggccaagagcccaagaggaaaaataacgaaggccattttgtaaagtagctaaatactgctacttagtcccataataatattaaatagtctttggccttgtacatccatgcgaacttgctaatggcgcgacaaaccgcgcggcgagacacgtgacgcgcgcggagagggccgcggcggcagcgcgtgcgcagtgggcccgggcgttttttttctttcctgtttggttttttctttccgttttttttctggttttttcttctttttttcttttcgtttttttaaacatatacttatacaaactttttatacgtacttatataaactttgtgtatgtgtatataaagtttgtatacatatatacaaactttgtatatgtcatatataaagtttgtgtacgcgtatacaaactttgtatctcgtacgtatacaaaccttatattgtggccaatttttgtttctgcctttgtttctgattttttttttcgattatttccttgtaggtttttttggtttttcgttttttatacgtatggaatacaaagtttctatacacgtatacaaagtttatatacgcatatacaaactttgtatcccgtacgtatccaaaatttatatgtgtacaaactttattgacgtgatgtattttttatttttgttcgattttttaatatatacatatataaagtatgtatgcgttgtatataaactttgtatacgtatacagaagtttatatacatgtgtgtgtctatgtatgtgtgtatatatatatatatatatatatatatatatatatatatatatatatatatatatatataactactatacagcaccctaaggcgctacttattaaacaacacctgatatagccttcagccccaccaacccacgctccctaccaggtccataatacgtagttaaaatttaactcaccgacgaccaatctccaatccacccctagccgtagtagtaatttttttacttgcattttgcaccacctatatatgtatttgt

SEQ ID NO: 22458 - DNA, 7347 bp, Oryza sativa
gatcaccttagatgtctaacactatgctttgtcacacgtgcgaaaggcaaaagtgcagacgtgcattatgcagcaggcaaaaagagaattttggacgctttattatttgcaaataatagatccgatgattataataataggtccaccagttctagtgtaagtgtaaattagttaatatagattttagattgttaatttaatgggtacacaatataatggtgtaggccttattttgaaatagtgcattacttgagaataatagaccaatgtaataaaaagtagatccgatgatttatataatggagccattagtttaagtgcccgtataaattagttaatatagatgttgtttatttgataggtacatgatataattgtgtaaaacttattttaaaatagtgcattatttgaaaataatagttcaaagtaaagagtacaccggcttaagttatatgatggtagattatttatttgtaaaattatgattatttaaaaaatatatccattatatatataaatggaaaaagaagaaaaagggaaaaaagggggggaggaagcgtacgtaccttgtatgtacgtatatactccacctgccaatgcacgggaggagaggataggtgggacccatggtatttagtttgttttaagatcaattttatctaacggtgtataatattaaacccaccaatttaagtgaaaatcaaggcatagatgttttgctttttttcttagaatttctaggattttctctattttattagagtgccacgtggcggattgagagcgtttgtaggaagtttcatggacttttagtataattaatggtataaaatatagttgtgtaacctttattttaaaccgcgtgttttttaaaataatggttctaaataaaattatattatattgttaatataatgggtaaaataatagaatcctaaaaattttattttcaaagattatggatctaatttatttacgtatatattgtgatatatataatctatgtttataaagttatagttctttaaaatttaatatcactaattatagttacgatctcatcagagaaaagaggggaggagatggaagcggatgtaatttttaatgatatatgcaatatatatttatttgtttttaattgtacgttgctgcgttacagttgtatatgtatttttttggtttttttatgagcagtatgtaagtacctttttctcatcggtgtgctgagagagattaggtgtgaggttattaatagatttaatttaatgatctgagataacatatctactaatttcaatgaaaatcgattactagatgttttacatttttcctcagatttgcttgaatttttttctaatctattaaagtgcattttagaacttaaaatattagcagttaatatgtgtattaaattattaatttggttttctatctcatctaactaagaagaagggaaaaaggaaaaaaaagagagtacgtatgtatgtacgtgcacgtatgtggaacagtggaacttttttttttacgtgcaaatctttcacagctaaacatagttagaaaatctgcagatagatataggtgttaactaaaaaataggagcagttaccgagaaaagaggagagaaagagagagaccggagggagggaggtatagcacgttcctgcacatgccgcatatatgcacgatggggatgagggctaccagatttttgtttcttgcgtcgtacgccaagtttgaggtatttataaaagcgagatattaaccagagaacatctatcacgatttctccataaattctttttgtcagtattaattaattgtttaataatattttaacctattagcttcatattgtatcatatataagtaatatctataagcaatcatttataatcttcttcatttgaaaagaaggtagatttattttctttagaaaacatgtcaacgaaagtaaagcaagtgtaaaatagaagcaaggtgtttttttaattgtataatatattatcataatatgttaaaagataaattgggtgggacatgaagctccacgaaatacatgggtttatatagcctaatattattgatatattttgagaggtgatatatttatgaacatttcatgtagagtggatgagagactccacgcaacctagtaggaatacgataacgacgaagtatcattgcacagtaatatttttaaaatgtcatgtaccatgaataaacacttttttatatataagatagatctaacggttagaaatactggttctaccggtttaagaggcataggagtattttaaaaatgtagcttaaaaattatggttgtttttatatctaactaataaagtgagcgtagttcaactagttaggtttcttgttgtgaaacttgcccacccatgttattaatcagaaggtttaaactgtattatgattttttcttaaaaatgcatggataagtgaacaatagctatagttcgtagaatatatatgactaaaagtaatgaatttctttaataatatagttaatttggatcttcaattttaaattttatagttaataatctaatagtgtgcacaaataaaaattatctatctgatttagataatataattgtttaaaatttgttatcataaaatattttttccatataactaaaagaggaaaacatgagagaagaaatatgtggggaggtaagtacacacatgcatactggactggacaggcggagaggatctaggggcccttttttttatcattttgtatttggataaatcataaaatatttttcaactaactaaaaaggaaaatagaagagaaaggaaatatatgggagaggcacataggcacgtacgcaagcatacgtactagatgggaggggtgggatatgtgggcccttctttttatcgctttctatttggataaataaatctaatggtagaaaataatgggtgcacagtatattagtaaaaatcgacggctagatgattaaatgccacgtgacagcataggagcgattgtaggagtgctatgtggcggcgatggtcggatttctcttatttattagagtgccacttggtgacttgagagcgtttacaaggcaccacttgacggtttgggagcatttgtaggaagtttaatggacttttagtatataatagataaattagaaaggtagcccgcgcacatgcgcggacaccttatataatgtgagaaaattttattatgaatatttatgtgcgggtagatttttattaaaatattttttattatattctaaactaaaatgaaactcatcttgtgtgctttgaacgctggttatttttttataactaaccatgcaacatataaattctaaaataaaattatttgagatcatgccgttttgaattggtgagaaaatattgcgtcgaaacaatgcatgtggtttctatgagaaaattttgggtattttaactcgctagaaggatatcttacaacccaaaagaaatccaataataacatttttttattggattgtattttaaaattttttatatatattcattctaacagtcctcgaaaaattttgaatttttctattaagtatgggttttaaatccagcaacgtttgtccaattttcaatttatttcatgtccatttatttttcttttggagattttcattctattaatcatccttgaaatgatttgatctttacaatttgggacgaaaatataagtgcatataacctggcatggggtaaaggcatactttctagattttctctcataaaatattaaagtaatggtcatagtgtttttagtgaatatcactaaagtggattgtcttgtaacaaatacacgtttctagattgttctacgtcaagactttacaatggactgtagcaagttttacaaaaaataaaaaaatagacatggtctttaatttctatatggaatgtacttgatttattgctaaggccactgcaaggtaaggttatttctcagtataatgttcaaccaaccacacctttattttcaatctattgtctatattgctagatgaatatttgttatgattagtgacttcatagatcatatgtgtaattcggacgctatgatcatctttcttaataatatttatttttctcctaaaagatcatcttaaaattatcaaggtcaatttgtataggtacgtagccctcatatgcatgttaagagaaatcaattaagttggtagagagtcgttagatgcctaatgggatttaagtaatagatagaggtccatttgtgttttttgtttgcccatataaataactttaattttaattgtcaaggagataaaaaaaaatagagagaaaagaatggtgcgtgctgtacacgggagggagggagggaggtttgggatatttttgtaaatgattaatctgacaacctaagataatgtgttagatttgctaaaaaataatgtgtcagatgtttatgttgaaaccgatggtcgaatgttttgttttctggtcagaaattttataagtttctctgatttaagagaatgatgtaacatcttaagagtgtttataacatatgtgaccgtctattaacaccacatgccgcaaagaaggatggagggatggatgtttggggtgttcttcttttaaacaatagatttaataacctaaaataacgcgtccatctttttttatgtcaaatccgatggttggattatttttttttgcaaaaattctaagatttttctctaatttaagatgtcatatagcagcttagaagcatttataagatgtttaatggattttaatgctgcaaggagatggggatggagggaaaggtttgggtttttcgtattagaaaactaacaaatcaatagacgaatgccttgttcttttttaagattttctagtattttctttaatttaatagcaccacctagcagcgtagaagcgttcataggatgtttagagtgacagagtgagagttgctagatctagcaggtggaggtctatttgtggttttttaatgtaaaaataattttgactttaatttctcatgaagatagctcgttggtgcgtacgtgacggggaagttccggatgtatgtatttaggaaaaggatctaaccttctaaaataaaataacggattcaccgatttaaatgaaaatcgatggtcggagccacttgatgacctaggagcatttgtaaggtatcgcttggtggattaggagtacttacaggatgtttaatggagttttagtatataatattatttttctgaaatttttaagatttttttgatttaataatgtcatatagtagcttagaggtgtttataaaatgtttaacggattttaacactacacgggggtggggagggatggagagaggtctaggattttttattaaaaaatctaacgacctaaatccatcaatttaagtagaaatcgatgatcggttgcttggaattttttaaaattttctagtactttttctaattcaatagcaccacgtagtgatttaaaagcttctgtaagatctttaatgtgacggagggagagctgctagacttagtagttggtctattttgtgatttttgactgtaaaagtaattttgattttagtttctcattaaatagaaaataaaaggaaggaactgaaagggaaactcacgcacgtaagttcggcaatatgatgccaaaaatattaggtacgttggttccagatgttttttttttgcaaaatagatctaaccatccaaaataatgggtccaccaatttaagtgaaactagattgtcggatttctcttatttattagagtgccaattggcgacttgagagcgtttatagggtgccacttggcagtttgggagcgtttgtaggaagttttatggacttttagtatataatagataatgcaaaaaagatgtaataaaaatagtatcgttaacacaaagaaactggtgtgaaaaatatacggggagtaatatcgagcccctaatttgtggggagtaaagttttaataaaatttaaactaacttgtggggagtaaaattttaactaagtttaaatagaggggagtaaaattttaactacgtagatataaaggtctgattttgctatggaattttttactggaattaatactaccggatgtaagtgggaaaaagattaacaaaataattttattagtgagaatggaccaactgcagtaaatattttacttaacacaggctggcgtcgggagtgctgcatgcggaacgaataagtcgggaggaggtgggaggaaaaaaaaaagaaaagaatagcggtactaagggagttaaaaccgggaaaagcggaggcaggagggggaggggggcgagtgttactcgagatgtcgactagagggggtgaatatgcgatttaaaactaaatgacacctaatcaaaactaacttaagttgctagggttggtgagggtgaactctaactaagcaactaagttatattttgcaaacctagggtgatagtggctcaattatatctctaggaaagtaaatcacactcctatgtcaatgtttagcaatcctagggtgatatgatctcaagtatgtctctaaaaatgtaaattgcacaaatgtaaatgcgacaatcaaatgagacaaggagacaagagatttttcaccgaggttcggaaactcgctggtttcctactccctgttgaggcgagcccaactccaccgctcaaccacaaagccaccgcacgcccccttcgtcaaggggtgggcaaggcgggagccggcccacggagaggactacccaagcctcgatcactagggtagttcttccttcactccgaaggtggtgaactccaaaccactcacaaaccggcgccaggcctcctccacaatcttctcggagaggtcaccgggcaactcctccacaagccgtctaggaggcggcaacctccaagagtaacaagcaatgacccggcgtgcagatgatcaatcaagtgccacactagctcttcaaatggaagcaatgcacttgactcttggctaattaaccctctaacacattagatggatggacacaaagctcaagtgggtgtgagagaggtgcaaggggtgtatgcaattgaattgggtgccaagagagcccccttgctgctggagggggagtatttatactcccaccaaccaaaactagccgttgggggcgaaatcccccaactttgtgctctgtcggtttgaccggagatatgtggccagtcagaccgtgctactctgcaacgcctagaaaactagccgttgtagtgctgtcagagggccccatcggcccggccggtcaaaccagcgttgagtgggcggtcagac

SEQ ID NO: 22459 - DNA, 3637 bp, Oryza sativa
tcagaccggcctcggcttgttcagaccgccatcggctcggtctgaccgaatacggctccgtcggctctatatcggccaccccgagcagcaccatcccggcctctaggaggccgggctgaccgcgcaagtgccgccggtcagaccggccgcccctggtcaggccgaacccagtgaattgcaaggtgatttttgtgtgtgtgatgaaaatgtgagcacaagtgaaaatgcaatgaactaatgtggcaatttaatcatctctttgctaggtcattaccccccttgatagtacggcgaaactaacaaataaactagcaaatttgagcgccctacacctcgatcaattctaaattaaagcactagttttaccgtcttctttctctttgctttgcgccgtcaattttaatccatcgataatcatccatgcgcacatatgacttggtcctaacttaaaatatatagctcaaagacaatagttagtccacaattagtgcttgtcattaattaccaaaattaacaacgggggcctagatgcttcaatctccccctttttggtaattgatgacaaacaccacaaatatatatataatcaaacatagaatacatggacatatattgcaatgtaaatcaaaagctccctctaaacatgtgcatatcaatcatagacaacaaatatggagccaatgcacatttcaatttcacatttcaacaagcacaaacacattagcaatatttcaatgtgaacttcaagaaatattcatccatgagcataacatggtcacatatatatcaatatcacatacaccattcatcattgcataagttcacatcacttaaccatttaactcacaaaagtcacaaatcatcctaaaagggctcacaaataaacataggctattacaagaccacgaagggtccaaatgacatagagtttaacaaaacgacaaataacacacaatataaagtaatagcccatacccatacaaaatatagcccaaaccaccttaacctattagatatgagggcactatcctcactactactagtcctaacccacaaaacataaagcacacttttctcccccttttggtatcaagcaccaaaaaggtctttactcttgtggaggagaaggaggacgcgccgaagtggaaggatgagtagcatcacgacgacgatcatacacaaatgcttgggagctcttcaacatttggactcgagaatccaatgcacccactctagtgtgcaatctccccatggaagcattcaagtctccaacatccgtgcgcaagccacgaacatcctcatgcaaagcttcatgcccggtagacaagcgttgaatgctttcacttaggggattaatagccccaagtaccgggttgaagtactcgttgggttgcattccaaaataagcatactgtggatggaagaaagcatttggatcatacccaggaggaggaggaggtgctgagcttgagctagctccaggatgagaggagggcgccaccctaggagcacggggagctccaagctgaaggcggggcttgtactgcttgtgcttcttcaaagcttgtcttgaatcaacctcatgatgtaaggggcataatagattccctgagtgaaggtcctcttggagatggcaatctcttgcatcatgagagacacaatgtcgaactgacggccctaaataattccatcgatgacgtgccaagccaccccccctaatgtcatcattgttgccaaggcgacggaggatggtagctctcacaatcctgttaaccacactggggatagtcctcaagctggcaaccttcccatatgtgtaccgcactccatcttcataaaactgagagagatagtctatgaagagcggattgtgggtgtgctcctcatattgaggagccatcggaattgccacctagagatagaacactggagggtgtcggacatccacttcatctcactatagtctccagcgacccacactgtagcataaaactgccggatcaaatcttcattgtagtcttgcttgagagtcacaattcggtcaatgccaacagtcttgaagagatcctgcaagccctcaaactctggagtctcattgatgtctctccaagaaatccacttatactctgcaaaagctttccctgcataaacttgctcatacacactcttctggaaagcaatgtgaaaacggggatccggggtgtcccgaggcctcaaaaactgatcatggtgcctcaagatggtatattgcgatggattactcatgttcacaacaaactggatggagggatcaatgtgcatatcatcacttccttcatcctcatcctctccacttccactgacatcatctccactttcctcctcactagccccctcaacattggcctcaacctcttcatcactttgagcgtactcatctccgcttgactcctcactcacgggatcggccgtgggctcacgacgaccatgatgagtgcggggaggcatcactgaaaaaaaaggagcaaaggatatatgagcaatgattttagggaccacatagtgaagtgagaggaaagggggttgctacctgtcaggggcggtcagaccaagggccaaggccggtcagaccgccggcctcaagtcggttagactgacgacccatggccggtcagaccgccggcctcaattcggtcagaccgacactttggggccggtcagaccgccactgacaggagcacacccaaatccttccacaatccacacaaatgattctaaaaattgctaggacaatgttgcacaagattggaatatgatcatcaaaggggatggcctatttcatcaagattggaacaatgggggaaactacccttaaaccctagagattgaaatagaccgatttgagagcaatgcacaagagggagagagatttaccggttggaggggatgaatcacaccaagaaactaccatctattggtgcaaatcgaagaacacctcgtgcttcacctagggttccatgccatggatcaaaaactcaacaaaaacacaaacaaatccatggaatagagagaggaagcggaggagaatcacttacggtgtaaccggagagaaatccgcggtcaaaccgaggggatttggtggagagaggtggctagggtttgggagaggagagaggaggagtttttccaatttgggaaaaaaaatgcttgattggaaaaatttggaacggttaggaaaaaaaggaaaagaaaaagggccaaatttcctggccccacttgccggccgggaaaatgtcccttatggggccgtaaaaacccccacacctggccggacaaaccgtccatatagcgccggtcaaaccgccagcccccctgccggttgtgcacagcctttgcacaaccgggcaccccccacacaataaattctaataaaaaaagatttttggagcaatttttgaaatgtgtgagtttcagtattgctaaccacccaaatatttggagattatgatgatttgcaacaaaactcacttaagtgataggaggtgaccttttatggtctataggggtgtcggtgacatggggccgggggtatcgtgactagaggcttgggtagccgcggtcacccacgtggcctgaccccctcggggggggggggggg

SEQ ID NO: 22460 - DNA, 15173 bp, Oryza sativa
tccctagccggagccggcgtgctaactcctggagttggtatgtcagtcccggtcagatccattccaggcttcagcgcaagtatggcaaggaagtcgctggccattaaatgaaggttgaaatgggcgtccaccgggaaagcgggcgagcggggcaggaggcgtgtgctctgcttgtcagaggtcacttctggctgtagactagccctcattgtaaaaagcatgtttcccttcttaggcagctagaggcccatgtggtgacccctgaccagataaaaaggaggcccaggcctaggaggaaaaaaggaaggaggggggttgggactctggggaatgggttctagagcctgaactctctctcgctctccggctctctgtattccttcacgcacagatccaccagaacacaggagtagggtgttacgcttctcagcggcccgaacctgtctacgtcgcccgtgtcttgtgcacttcctctcccgctgacgttcctcagatcgagggcgaagaacctcacttagcgcccccggccgaaccggcaaaggggggcctgcgcggtctcccggtaaggagccccacgctccgtcaaggggtttttgggcgaatttgattttcaaataacttttgaatgatttggtttgtgaaataggtttgaataccaaaaacttttcaaatcttcttctctaccaaatttgttttgaaatttttctcaaattccttctcaatctcattttggccaaaactaagaatctagattcttcaaaaaattgccaaaatggcattttcattcaaaaatcatttttcttgcaatgtgaggcttggaaaacataaagggaacctttttaaacattttccaagagatagttttcaaattatgttggcttggccgttttgaaaatactactagcaccactagttgatttgctcacatataaaacgaagtagagcacatgtaagagtgcaaaactcccccttaatgtgacatgctccattttcgcaatgaagaaccaaatggcaataaatccaaagaataagagcaaataggagcaaatatacaaaatgcaaaaagaagcaaccatggtgcaccatctcaagccacattagagaaatctatgacatttaactcattcctcaatttgcaaaagcgggtttcatcaagaggcttggtaaagatgtcggctagttgatcctcggttcttatgtggctaatgactatgtcactcttggcaacatggtctcttaggaagtggtggcgtatgtcaatatgcttggttctagaatgttggaccgggttattggctatctttatggcactatcattgtcacataggagtggggttttggtgaaggatatgccatagtccaacaatgtttgtttcagccaaagcaattgggcacaacaactacccgccgaaatatattccgcctcggtggtagagagggctacagagttttgtttcttggatgaccatgacacaagggatctaccaagcatttggcaactactggatgtgctctttctatccactttgcaaccggcataatccgaatcggaatagccaacaagcttaaacttagcaccttttgggtaccacaagccaatagtagaggaatgctttaaatatcttagaatccttttcacggccactaagtgacactccttaggagcggcttaaaatcgtgcacacatgcaaacactaaacatgatatccggcctagatgcggtaaggtaaagcaagataccaatcatagaacgataaagctttaaatctaccggtttacctccctcatcaaggtcgagatgcccgttggttgccataggtgtcttgatgggctttgcatcctccaagccaaacctcttgagtagatccttgatgtacttggtttggcttacgaacgtcccatccttgagttgcttgatttgaagtccaagtaagaagctcaattctccgatcatggacatctcaaattccctagacatcatatcaccaaattccttgcaaaatacctcattagtagaaccgaatatgatgtcatcaacataaatttgacacacaaagaaatcatcaccaatgatttttgtgaaaagggtggtgtcaacttttccaattttgaaatcctttgacaaaataaaatctctcaatctttcataccaaaccctaggagcttgttttaaacatggttaggatttttaggatcttcaaaaccggaaggttgttcaacaaagataagttcggcaatttcaccatttaaaaaagcacttttcacatccatttgaaatagttttatatcaaagcatgatgcaaatgcaagaaggatgcgaatagcctcaagtcttgccacgggggcaaaagtttcaacaaaatccaaaccttcaacttgtgtgaaaccttgtgccaccaaccttgccttgtttcttaccaccaacccgttctcatcttgtttgttcctaaagacccactttgtccctatgacattgtggtctctaggtctttcaaccaaagtccacaccttgtttcttgcaaaattgttgagctcttcatgcatagcattcatccaatccggatcacaatgagattcatctacatgttttggctcaagacaagaaacaaacgagtaatgttcacaaatcgaagcgacacgagatcgagtttgaacacccttactaatgtcacccaacacttggtcaattgggtgatccttggaaagagcggtgtgtatccttggtggcataggtggatcttgtgccttctcctcttccacttcaacttgagcttgacttggcatagcggaagtagatggctcatcttgagtggaggtggatggcttgtcttccacttcaataggcttgacatctccaatagacatgttcttcatagctctcatcaagccttcatcacctacatcatccaaattctcgtgcccctcttgggagccattagtctcatcaaattgaacatcggcggtttcttccacaatacctttgttcttgttgtagacccggtataccttgctatttgaggcataacctagaagaaacccttcatcacaccgactttcaaatttggttagtctaacaccatttcggtaaatataacacttgcaaccaaaaactcgaaaataggcaacattaggcttcctcccaacaattagctcataggaagtctttttaaagagacgatgcaaataaaacctattggttgtatggcaagcggtgtttatggcttccgcccaaaaggaatcgaaaacaccatattcatcaagcatagtccttgccatctcaatcaatgtacgatttttcctctccactataccattttgttgaggtgagtaggtagcggaaagtttatgtttaataccaagatcatcacaatagtcctcgatattggtattcttaaagcaaagtgtcccttctcaccacactcaagcacctcaagttggagagagtcttgttgggtcttctatttcttctcctatttgagttagagcccattcatctctctttctccttcccaagagatcattgaaccttctagcaagaagagcaatctcttcctccaagtcctcattgacttcattcactttgcccttgcccttatcttcaacttcggcttggagagcaatgcacttcttggaaggtgaggcttcatccatctccttcttcttcaacttgtacatgtcattggtgttgatcttccccaagaggcttgcgggtttcatccttgacatgtcggagttgatgagcatggtgacaagtgtctcatacttctccggtagagccctaagcatcttttgggcaatctcaagatcggtgtagtttaccccaagccccttgagatcattcacaatgacattgagcctcccatacatgtcattcacactctcatgaggcaacatggagaatgtctcatattggatcttgaggaaatgaagcttggcatccttgtactcgcttgtgccctcatggatctcggccaacttgttccaaatctcatatgcggtctcaaggttgctcactctatcgaactcctcttggctcaaagagttgaacaaagcattcatggcttgggcatagagttggaggttgcggtgatcaatctccgtcaagggcgtgccggtgatagtaaagcctatatccacaatactccaaatatggaagctcatagctttgaggtgagtagacattttaattttccaagtggagtagtttgtgccattgaacatgggagccttccctacatggttcaccttgttcgacatcttctctctaggcggtgaagcccaatcaagagagaccaagctctgataccacttgtaggatcgagatgtcgactagaggggggtgaataggcgatttaaaactaaatgacacctaatcaaaactaacctaagttgctaggcttggtgagggtgaactctaactaagcaactaaattatgttttgcaaacctagggtgatagtggctcaattatatctctaggaaagtaaatcacactcctatgtcaatgtttagcaatcctagggtgatatgatctcaagtatgtctctagaaatgtaaattgcacaaatgtaaatgcgacaatcaaatgagacaagaagataagagatttttcaccgaggttcggaaactcgccggtttcctactccccgttgaggcgagcccaactccaccgctcaaccacgaagccaccgcacgcccccttcgtcaaggggtgggcaaggcgagagccggcccacagagaggactacccaagcctcgatcactagcgtagttcttccttcactccgaaggtggtgaactccaaaccactcacaaaccggcgccgggcctcttccataatcttctcggagaggtcactgggcaactcctccacaagccgtctaggaggcggcaacctccaagagtaacgagcaatgacccggcatggagatgatcaatcaagtgccacactagctctacaaatggaagcaatgcacttgactcttggctaattaaccctctaacacactagatggatgaacacaaagctcaagtgggtgtgagagatgtgcaaggggtgtatgcaattgaattgggtgccaagagagcccccttgctgctggagggggagtatttatactcccaccaaccaaaactagccgttggaggcgaaatcccccaactttgtgctctgccgatctgatcggaggtatgtggccggtcagaccgtgctactctgcaactgctagaaaactagccgttgtagtgctgtcagagggccttatcggcccggccggtcagaacggcgttgagtgggcagtcagaccggcctcggctcggtctgaccgaatatggctccgtcggctctgtatcggccaccccgagcagcaccatcccggcctccagggggccggtctgaccgcgcatgtgccgccggtcagaccggccttatgcgccggtctgaccggccggtctgatcgcccctggtcaggccgaacctagtgaattgcaaggtgatttttgtgtgtgtgatgaaaatgtgagcacaagtgaaaatgcaatgacctaatgtggcaatttaatcatctctttgctaggtcattaccccccttgatagtacggcgaaactaataaataaattagcaaatttgatcaccctacaccttgatcaattctaaattaaagcactagttttaccgtcttctttctctttgctttgcgccgtcaattttaatccatcgataatcatccatgcgcacatatgacttggtcctaacttaaaatatatagctcaaagataatagttagtccacaattagtgcttgtcattaattaccaaaattaacaacgagggcttagatgcttcagttactcgcattacgaaactcggtggcgcgtacgggcgctacgtagcgtcaccgtatatatatatatatacatatatatacatatatatatacatatatacatacatatatatatatacatatatatatacatatatatatatacatatatatataaaagtagtgttgtagtataacaatagtactagtaagtagtattaggctctgtttctttcagcttgggattattataatccagattattagaagtaagctgaaagaaacagacaacttattgaagtagcttattataatctggagcccagcttattataatctgataagctcatttaggtgagctttttccagattattggatgaaaaattacccaccatgccaccccacctcttctttagacttgcaaacctaataatctaggctctaataatctaggaaagaaacaactaaccgcttattctactgtagattataacaatctatagtaatctgactaaataatctagattataataatcccaagctaaaagaaacagagccttagtagtagtaccattagtatatagagtagtactactaccaccacctagcagcagcagcaatactagtagtactagctgcgcacggggcccactagtagcagcagcagcaggccagcagcgctagtagtagtattagcagcgcttgtaataacagtagtagactagtagtactagtactagtagtaggagagacgaactggtcgcacgcccacacccccgtgtgaccagtcgcgcattaggacccctacatgtaggggccgcattcttaatccataattaaaaaaaagattaaaagatctatgctggacaagtacaaactaaacacacccagttagatgatatggcccagctaggtttttggtcgggctgtgaaaagcctaacaagaaaacgctaaatgagcctaggccgaagataagaaaaacattatcactttccttcttttcgtaatcaaatagtattagtataaaggaaaagttgtaaaccctcctaaatgtcaccctaagtttgagagtcctccctataaaaagatttgttgaaaatccccacctcctaattcaccttaatttgatgggaaaattgcaaaaactatcccatgagtcacttgaagcttgatatttcatcccataagtcattttgttgcaaatgcctacctcatactcggttttgatgagacaaccatcctagggcgcacgtgcttaaccgaatcagtctattatcgttgatgtatagccatcacaggataagctagctaagtcaatataatcttgtccaagttcttatattatacttatttttcatgtttcattgaacttttttgtgatatagagaaactcagtacgataatgtttaagctctcattagaaattatcttcaaagaagtgttaaggccattctctatatgtatttaattttgttattttggtaaggaccacactgataccttataatttatgagaacatgttaatatggttaagcatgtgcgcacaagagtgatttgtgcaataaaactaattaggtgggtgggtatttgcaacaaaatgacttatgaggtgaaatgtcaaattttaagtgacttatgggatggttttgcaaatttccctagtataatacattgtatggctatttggagcaatttcattcacagacgcatgttttcagcccgccaaggcccacgacatgtgtcttcctgcgctaatttgggaatcccgccgcgggacgttccatcggcagctcacagattttccttgtggttttttcttcgctagcattggtcctaagtgtcaatcgttttttcttttaaaagtaaactttcagtgggatcacctatatatttgtcactaaattttttaaaaaaaaatatttgtcaataaattttttaaaaaaaaattgacagatgtaattatagtataattgtaatgtaattacgctgtaacttacatgtaacttgtatataactttcaaaaatctctccgtaacatgctatttctgtgaaatgaaggtcatgggaatgaagcatctcacatgtgtccgcgctgtagctgttttcttcttcacttgcacaaaacttgaaacagatctaacgaataaaaattatttaaaagttacatacaaagttacattgtaggcaagttacagcataattacactatgattgtatgtactttagttacatctgccaaatttttagcagaaaatttattgacaaatatataacgagtcaaaatttcataattttgaactaaaaattaaaaaaacaatcaaattctagaacttccaaattaatttcaaaactttcagctcaatttcaaagctgtcaatttaatttttaaaacttttaactcaaatttaaagctttcaaccaaaaattaaaaaaaaatctaaaatttaaaactttcaactcaaaataaaagatgagtaaattgcattcaaagtatcataacttggcatgtggttgcaaattaatacaagaatttgagaattggacgtctaaggataacaatttgataagtgggtacgtcctagtagaataaaccgtcaacctagtattttgatgcagcagcttagcttagtatgtaccgttttggtcaatgagtggcatggtgagaggaaggccaacccaatcttggatagcaacttgtgcccaacttgttcaagcgaatacgcactccaccaagatatggtgatccgcttccagctcctacgcatttacacatagggcacatggtatgactatccatcttgcagatgcgtatttggttagtcgtctaacacaaccgttgaagtgtaagccagaggaaaagtttgcccttcacgggaccaatgctgcgtcaaagtaactcagagcaagaaaagaagatcgagcccttaaagaacgcattgtagttcaaggcggcgctatacctaccacccatccagcgccaaatgaaatcatcttggacaaactcttgtagtgagaaattctatactctatcccagagtgtgaggaatagggagagtacatgcacagtcagtgcaccaatgatgttagatatccaagtactgctagccaggccaacaaccaccgaagtggaatttcggtgacgagttgggacaacaaggaacaactatagggcgattagttgaaccgatcgcccatcgagccagttgtccaactagaacaatgagcggcatccatctccaatgacgaccatggcagacacacgtagcatctccgacatacactactcttacggtagtttgaagccggcctagtaggggtcgctaatgtgttggagctagggccatcgcatccgtagggtccagccaatgatccagaggtctgtgattcctaacacccccccctccccagctctttgggccgacacacgttgggccaagcgacaaggcaactcccgccatggaccgagtctgactccttccaaaggaaggttggccactatttgtcaacgactttcaagacccaatctagcaacccaatggcaagggagatgtgtgccggggtggaggggacggattgcaccaaggttagccttcccgacatagccaagagcctccccttccaggcaggcaactgattatgtactgagtccacaagttgttgtaggctactcttcagaggctgcgtgacagagagggggggatacctaggtatttgcatgggagctccgtgaccacacatagcatgatgtgagagagtactgccatatcatcctctgatcacctgattggagtgatggagcacttgtcgaggttagtaagcagcctcggaactaccccaaagcaggagagaatctccttgatcacctccaaatcctgggccatcggtgaaaggaagagggcgaggtcatcgcatagaacgaagctctgtgtttgacagcactcacgtcaagcggaagatgccgagctcactagtcctaccaatgagggcattgacccttcatgaccaagatgaacaacattgttggttgattttattgtctaatgccggttagttaggacaagaataaaatcccaccgtttttcctatcctaactagaaaccaaagaagagataaaatatattttgtgtgatcggtacaaaatagattcgaattttaattgaagataagcccccgagccccacaagtgtcactatatatgagaaaaaggagaagaggcagatgctatgccgaactctctttctaaccctaaaactctaagaaaatcgctcgatcaatttaggcactggaaggggttcatgaggtatctcacaatagaagaaatggagaagagaagaaggaaaagcgaaaaccaaatatcagctttgatggcttcatctcaggtcagttagatcaattccacattgttgtcgaacgacaactgcgtcacgtcgaaagacatggttctctcaacaatggttggaaacgataacaattgtattgcttagtaaaaaatttcagggatcccatgttacatggccctatggggctatttatagccctattacggactcctttagggtttaggttttacaagagaatttgcatggttacccttataatagggacattattgggggtatattgcgtcctttacttgcatgggcccctaatgggctgggtgactcggcccagttattggtgaagcccccagagggcatgatggcccgttgggcccttttcaagtgaggtccggctcttggcgaaacccgtgtccttcgcggcacggcttccaccctgcagtccttgcccgtatagccctccgacaaggtccatccttggcgaagcccacgtgcttcataccacggctttcgccatacggtttccacccatgttgtctcttcatgggatgtagtcacgccttctcagccttcgagcgtgcctccggcctgagtcctcgcctagattcctggtttcggtaggcacggtcgaaggtcctcgtggtatacctccaacacgcataattaagcagaggtgatcatgtttagactaagattcaaattaattaagtggattaaattccaatacaacatcagattgaggggatcgccttagacaggtcagatgtcaaatcaaccatatccatagcaaatatataaagtttagttttacaaactaaaaattgttacagttgaaagcacaagctagtagcaacttgaagaagatttgatcagcttgaagaggaagtcttgatcagcttgaagaagattacaaaggataatccaacaactactccaacaataatcacatgcatgatacaataatacatcatatttcatcgcaacaatcattgaattgaagctagtttcccatggcgttgccctcaaaccggctgatcctgaagtgccggagctccaccccggcctccgccgccgtcctcgcctccccgtccatggccatctcggccaagatcctccccaccgccggccccatcttgaacccgtggccggagaacccggccccgaccaccacgtcgtcgccgaactcgccgccgaggaagtcgatcacgaagtccttgtccggcgtcatggagtacatgcacggctgccggacgaccggcccgccggcggcctcgacgtggtccggcatgaactcctcgatccaccgggcgacgcgggaggccgcgtcgccgccgccgccggcccagtcccggccgtccgggtcgcacggcgggccgccgtcgtagttgatcttgatcaggcccgggagctccagcgacggcgtgccgtacacgtgcgggtcgccgtggctggagaacgtcgggaagccggcctccgccgcgagctcgcgctcgcggccgggcttgaccttccagtacaggacgagcgcgtgcagcggctggatggggaggtccacgccggcgacggacttgaccagcttgctcgtccaggcgcccaccgtcacgacgcacttggcgccgtggaactcctcgccgccgctcgtcctcacgaagactccggcctcaccgtccttcttgacgacgccgacgacctccgcgttgtccctgacgacggcgccccccttgacggcgagcgcctggaacatggccaccgccttggtcgcgttcagcacgccgccgccgagctcgctgacggcagccacccacccgtccgggacgccgcggaacgcgccgccccacctcccggcgaggtcgtcctcgtccacccggcgcgcgccggagttcccgacggcggcgagcagcgaggcatcgccgggcgggcccacggtgagctgcggcgccggggtgagcacgcggtagccggactcggcctcggcgtcggcccagaggcggcgggcgaggcgcaccatgggcgggtagtgcgccttggcgtaggcgtcgcggatggtgcgcgacgcgccgtgcgaggagccgaggtggtggagcaggtcgaagcgctccaggagcagggcgcgcgcgccgcgggacgccgccgcgtgcgccgcgcagctgcccatgatgcccgcgcccaccacgatgacgtcgaagtcgaaccggccgccggcggcggcggcatcatcggacgctgcggctgcggctgcggccatggcgcggtcgaacactactcgatgtgcaggatggagtgagtagccagccacagtgaacatcacatcacaccagcacagtctattatagaggcgagcttgtgactggcgaactagtagtagtaatttgcaacttgtgctcttataaaattgtttcattggaattcactttaattttattttttaaactcgtgccaagtcatcgcagaaaatcgtaaaaattcgaaaacgcaaaggattgggttggtgtagggatgaaaacggtcggaaacggtcggaaaaaccctctaccatttccattttcattttattttctcgaaaatggaatcggaacgtatactcggaaacggtaaggatatcggttatatcggtatctcggaaacggaaccgtcggaacgagaatataccgatatcggacggaagtcgaaaattcatgtcggaaacagcgaactgtggtatcatcccgcatttaactatgtatgaagataaccttataatttcacctttgcatcattatgctgccacacaacaccgttatatgatgattaataagttgacaataagattgacaaataatataaataaagttcaatgatacttcaacatcaatgtggctaaagcatacaatgtggcttacatgataggattatagcataactaatattgtccgactttttttaggatatagatttgaagtcttcgagaacaccaagcttacaagctggcatggcttcagctgatcagctccttgtcaaatatcattcattatttcatcatcaattgacatagctatatcgtcgtcctacagtgccacattgcataagaacttttatgttgacactgtataactaccgttgtaattaagtttcatgctaaactagactttttggtatttccaggtcgatcacagagaggagtcaagatggtggggcccgccggtggatcccacagcctttcttttcctctctttcttttattttctctctctcttatccttcccttctctcggttccttttcctgctctctcgatttcttctctgttttctctcttgttctcttctctgcctttggctccttcacgcgcgcccgagaggagagaggcgccggagatggcggcctggcgcagggcggcggtgggggaaggagagaggagaaaggggcggcatcggtggggaggaggaggctggggcggtgcggcggcgctcggcgcttggctcggtggcacggaagccggcggtggagcatgggggagggaaaggtggccggctgcgacggaggccgtcggggcgaaggaggttgcggccggcgtcggcgacctggtggcggcgcccaacacggcgcggcggtgccccagcgccgatgaagacgacgatgcggtcaggcctagttggcttctttattcggaatgggctgctccttaatgcctaatgggctcctcctcctgctagccaggcccagccgacttccttcttcggaattttgtcggaaatttgacggaaattaccgataaaaaacggttaccgacaaaacggtcggaaaaaaccccatatcatttccgctaccatttccgaaaaagattaccgtttccatttccgataccgacaattaccgataccgattgaaacggtcggtgcaaaccgaaaacggtagccggaattctcggaaatttccgtaccgttttcacccctaggttggtgtaagcaagcatataggcgaaacttcaagcagctttcatatatatggaaaacaaatgaagccggctatttctttaacccgtcggcggctatcagatcaggccatgcaccggttagcgaatactaatggagaatgaaatcttcttcctcccattctaaaattcttaccgttttatataagattattatttgaacttagactatttactctgaagacactagaacataacacgaggtacagattagtcttgaaaggtaatttaataataataaatatttactcaattatagttttttggagaccttgtaattgtccaaaatgctacttcctccgtttcacaatgtaagactttctaacattgcccacattcatatagatgttaataaatctaggtatatatatgtgtctagattcattaacttctaaatgaatatgagcaatgctaaaaagtattacaatctgaaacggggggaataagaattatggaaccttggagtagtgactagtgagttcaaaaaacaaactcccatactttgcatacctgaccatccacaaattgcaagatgttttctcttgtgccaagaaggaaaaaggaaatcggcaagagcaccatgtcagaaggtagtgcgctaccaaggttgttgttataaaaactagccccgaaatcgacatcggtagctaaacgcggaagaaaacgtcataggagatccaaaacgatgacgacaccgagacacgatatttggtaacggagttcagccgtagcctacatctccggggcactgattacgggcgctcctccccgatccagcatatacagcgtatcagagttacaacgactcacagccggtcgacgccggcagccgctccctctcgctatgctaagtcgccatacggttacaacaagcacgcccctctatttatgagagaacctaggatagagtccaactcatactctagtcctaatacctattataactccaagtcctaaactgtaactgactacatacacatattcgacacaaactctaacaaactccaccttggcgaatatgccacgccaacttgaatctg

SEQ ID NO: 22461 - DNA, 5939 bp, Oryza sativa
agtccaacatccacgcttctccagacttctcgtcagacactgtgagaatctcatgactgctgctatctgaatcatcaccacgagctgctaaacttgcaatgccacctttcctcttcttcagtaacgggcaattcctccttatatgtccaaactcatgacacttatagcaccgtgcccccttctccttgctcttcgacacccctgtttcatgatcatgcttcgctttgaccagcaaactctcaccctgagaagcctctgttgcctcgtttttctttgatcttctcaagtctcgtgcaagcaacgacgaaattatctcctcagttttgacagtatccttgccgtgcgtcagggtagtcaccacatgttcataagacggtggaagcgagcacagaagaattatggccttgtcttcatcatccaatttcacatctaacttacttagatccacaacaaactgattgaagacatccacatgcttcctaagatctgactcctcttgcatctgcaaaccatacagttgttgtttgagatacaacttactcgtcagcgacttggacatatacaggcttgccaacttgtcccaaatttccttcggtgatttttcatccatgacctggtacatgacggaatctgagagactcaagcgtattgttgcagctacctgcgccttcatctcatcccacttatcagcatccatcatttccggcatcgtctcatcaagaaccttggatatcccctgctgagccaacagatccttcagcctcatctgccagagaacgaaattcccggtgccatcgaacttcaccacctcaaatttggaaaccaccgtcgccgccatcgacgataatcaactcaacagcggttgccctgttaaattgatctgccctgattaattgacccaccgactacagtcactagccggacaaaaccaacccgatcggttttcttttctagtcaaaaagccagtcaacagcggtcaaagaccggctcagatcgagccgatcccctttttccttcggcttccttccctcctctctgcacccgcgtcctccagatgcgtcgccgcctctcgccgccgtatcgcgcctgcaccgccgctgccttgcgccgccggcccagcagggaaacgccgccttacgcactgggagccgccgccgccgaagtcaggcgtcggttcctcgccgggaactatcgcatccgccgccgcaagctcctgcgaaccccgacgaatgccgtgccgagctccacgccgccgcacaccgcctacaaggatgcgcctccagccgcccgtgacctcgccacccaaaccacctccgcctctgtgaaaatcaggtacgaatctcgccctctgctaggtgatttgtttcgattgcgttgttgcaatcccgtggtcctctgttgcttttatctgggaaaaattgagtccgattcctgaacgaatcgaagtcctcgtccgattccctttcgtgttgaaacttggtatccactgtttgtcttcgattgtgtccgtgccatgaccgaaccggagacgactccatgtccgtgtcttccacaccacaaaccctcaagaccgaaccctgcacgacatagctaaaccctagccagctccttctcggcatcgccctgatctccgtcaccggctcggcttcgacgcaggacgcgcacaccgtcacgaccctgacctcctgggcttcttcgtatctctgacaacatctagcaccaacgccaagcaccactgacgactccaccaacaactgttgtcattgatctacagcccgtgtggttttcttcttgtctgctagagggaaaaacaggttgaaccaaagcctctccagggttgaaccgctactggatgccggtctattcgccctaggctttgttcagccatatgccacaaaatacgccgcctttgaaacaattccatcgtgcaaatacctcgtcaacacctccaaacagcctatgggatccacccgctccgacttccgattgatcgccatcgatctagtcgcgagccgaagccgacaagtcgcatgccgtcttctcagccgccgaacgacccgagtgctatgtctagccatctccctgtcgaacgcaactcatcgaaaggcccgggccaccccgcccaaagtgttcgaatccaccgatcgagaacgccgatcgcctccaacttcaatcaacccgagcatgcggccgcacgtctccctgtcgagagtagctcaccggaaagtccgggccacctgcccgaagtgtccgacccgccgattggatcgccaatcgcttccgccaccatcaacccgagcaccacgtctagtcatctccctgttgaaagcagccatcgacggtttcggccgccgccagaagtgttcgatccaccgatcaagactccgttgatcgccgccgtgctccaccttgtgccaatgcccctccctgggcattacagcaggctacgcggtgtggagcacctcggtcgcgcctctaccatagaccttctacaggctctgataccacttgttataaaaccagccccgaaatcgacatcagtagctaaacgcggaagaaaacgccataggaaatccaaaacgatgacgacaccgagacacgatatttggtaacggagttcagccgtagcctacatctccggggcactgattacgggcgctcctccccgatctagcatatacagcgtatcagagttacaacgactcacggccggtcgacgccggcagccgctccctctcgctatgctaagtcgccatgtggttacaacaggcacgcccctctatttatgagagaacctaggatagagtccgtctcatactctagtcctaatacctattataactccaagtcctaaactgtaactgactacgtacacatattcgacacaaactctaacaattgttttggtgcttttgtgggtagattatcagccttaacagcattgtcagcagctcatacaaatttgatcctccattcaaaaaagatttctactctatatcactttgcacttcaatagatcattcatattacattatctatattatacaatcctatattttagtaatatcttacagctacctatccatttgtattactttgtaatatttattttttaacatctatatttccatcattggtacttgatgcagatctccatgcttcacatacatccggtgatagtatgttgtgaagagaaaaaaacataatcgaacagataagtcatcactcccaaaggggaacagataactcatcccccccacccctacacgcacaatgcgccatgtgatgcattcgttgctttgtagctttgggcagcagcgcatgggggtgggggagcagtgttcctcgaacatggtcagcactagcagaaaagccgtcggctgaaggtgtagtagaggagcggcatggttgcgagtggaggtggaggagcagcagaggaggggaggggcgtggaggagcagcagaggggtgacgtggctcggggcggtgaagtggcgcgctttggtgatcagcatagcaccagagggacaatgccgcttctactccggtaacctctctagtgatccgttagctctccgcttctactccgagcctccgccgctagatccagtaggcgtgtctctcctctgtacctccattactccacatctacccctggcacaacgacgtgatccaaatggtggcgcgagttcgatccggagatgaccagttgctagatggcgtgaggagagagaaacgccaaatttgacgtttttgtttccggcatagcggatgcgctaaatttgaaggggatgatggtgtatctattggagccctttttctctctccttgtgcaagtggcatgtgttatatagaggagctgctacagatgttctaagtttcactctttcagtttttcctggtttgtttgcattgttatataggctactactactagctaaatgcctaaatcaaatgatattgtagcaatcttatgttaacatgtggagccacaattcatgtagatcaatataagatgagtaacatgtacatgtgtcctagtatgaatcgaataagcatctagcatctgaactagattacaagtgacaatatgtgtatgtactggagggaaaattaataaagatttgtccattagctcgtaagatgtaatagattatgactcgataaataatttagttaagaaatgcactagaatgtgacaaggttctaccagaataccccaagtcataccgaatacatcatcgcatggtgcatatgtatgcagccactcctaactccaagttcacttttgcatgcttagctcactgcttacgcatgtatcaggagcaaaacaaagtttatcatgcggcacaagcaagtacatgccaaaatacaccattatcaattttaagcataacttgtgcccaatcgaacgccctaacgaacgaatcagtagttcagcagtcaaatagcagcaagtgataccaggaaattcaactgctggcacagcatagatcatacatgcacatacagaattctcgaaaacatgctcacacaactactgattgccccggaacaacaaatcaactatacatacattgatacatcagtaattagtttgaccacacatcagcacaagctgcacaaaagaagcaaggaaattgattcctcagaactgcggtggtatatataggtcatgtagatatttcatattttaccaaaaagtttcaagtttttgcctcaaggatccagcatcctcacatcatgcttcttgcgcctacaacggtgatggctcttctgctccccaaaattattgtcaccaacaatccccatcttattcatatctgctatacaatctgcattgtaaaaattcggcagtaattagagcgtttgttaggtggataccaaaaggtactttgcaaattacatcgcctctctgttgcaggaacaaacaattgtaccaaatccaagacaagggcaaaagacaattccaatgtcaaacataacaaaacatttctataaaataaagaaactgtggctagtatttataagttacaacagtcagatctgacagcttcagaaattgacaggcatggctaacaattactaataacataacttcaaaaggacatcataaaaataaaagcttctgccatcagttcttattgtttcactcatcatgatagcagtgtagcacaaatgacaggggtacaggattacagtagaacagacatttggtcagcacacatgtttcaaacaaggtcaagttaaatttatctagaatttaatcgaaatattaccttcctgaacacattgacatagtcaatgctttaagcaatcatttagttttggacgagacaaatataactaaaatgcatggtggctaaaataaaatttcgtcagaatttcgagcacataatcatttattaagcttattatcaattccattaaatcaatactggatagagcactaaatgaatacgtgtgctttccaccagtcattccattactcaaaacatgcagcaggcaagtgcatttccatcatcttcccatcccacagcccaaaaaaaaggagaaactagaaaatgagtacatccctttgatcagaatccacaggtagaatatacattgatcaagcatccgatatcctagaacatagttatgtaaaaaatcaacaaattgttcaatccaaaccaagaactctagccaacaagctaggatcccaacccatggattttacaaactaagcatattatatctacggaatcatatcaaataaatgcacacagtaacgatgaaaacgatgtcaatctctatacatgaaaaggaaagcgtgagctaaatcagagattgtcccaagaattgggctcagggacgccaatcacctccgatttcctcgccccagaagaacagctgctgccttccgtcctcttcctcctcgtcgatctcatccccgtacc

SEQ ID NO: 22462 - DNA, 30725 bp, Oryza sativa
attaaacagtgctaaattcgtcgtgactcctttgcttattctgcatttttcgaaaaggtactcccttcgttttacaatataagtcattctatcattttttatatttatatttacattaatgaatctagaatgagatcaatataaatatggaaaatgctagaatgacttacattgtgaaactatatatctagattcattaatctcagtatgaatgagggaaataatagaatgatttatatatctagattcattaatctcagtatgaataagcgaaataataaaatgatttatattgtgaaacagagggagtatttaagttaaagaaaacttcacgcaagagacgaccgtatgtccttgactcctttcatagttgctttgtttttttttccgttgcgatcttgctttctcaactcatattaaccatcctcacacgtcatccatatttctgtttacaacaggaagatggagtgtatacgtagattcatcatgaaatataatttgataatgtcacaattcttcgagcttacaattaataaatatacaccactagagaaattagtagtcaatttgtatgggaaatattgtgacaatgttgtttatagcaacgaattctcgacataattgggattggtaattaattcttctcgcatttaacatttagttttgctatttttatttcagttgtttgtggctcaacttcagaccgtagatattactggatttagagtttgcaagaacaatgttgtaagatcttatgttttaatctgaacaaaatgatgcatccaaacgttttttaaacctaggaatacgcaactctaaatatcctaaatagatatggatcacgtgtcaatccgagcatttttctcttcattttctaattaacataaaaggttatcttggttttcgttaatatgtatttaaacagttaaatgatgtatttcgtgtgaaaatattttattatataaaagttattttaaaacatcaggtgaatatatattttaagtttgaaataattaaaacacaattactccctccatcacataatataaggtatggtaaaagttacacgatctccaaaactaatatttaacttataatttctcatatatataaggtttgtagcaacaaaattataatcatatgaaagtaaatttaaatgtcaatttaattatataatttttaacaaataaaattaatttcatattacattaaatattagtcaaatgttttcctattaaacgaagttatgtttactatgcagaaagatattgaactttttaggtacaacttagccggtatattactgtgttggaaaacaaatatggcggctgaggcttccaatgttgaacaagtcgaagatacagacaatgaaaatgatgttgtgatagtgggcagtcgtcaaagagaaagatgggacatgaaggaatctaaagtacgctcggcaaccaacgatcacaaatatagttcccttctctcggtggtttctgctatgagtttataggagttgataggcggccttttccagtacatataaataaattgtgccgaaaccttggagtaagccacttctatataatatatctaccccatagttcaaagatgcactaacttattttttttattgattgacaggaatatatgggtgcaaagttcacgtccgcacaccataaaattaagtctcaaaacacttcaaacagtactaaaggatggaccacttgaccgtgattgcttcaacatggccatacgcaagttcatgtatgaaaacatccagtcgcttcacaaaaccagcgaagcaataacgaagcattgcctggacttaccatttttggtaagtttttataatctacccaatattgattcttttgctcatattttaaacaattattgtacatcatatagactgctactggatttggtataagtccgatgttccataaggatatagatcttgcagggtcggttggtagctggtcgaaaatccattatgaagttgcaaaatgcaaatcggtaagctaactatcctttgttcttatttgaatgtgttttttatattatcttgacggttgactttttccagattcttataccagtatgtgctgttggaagctatatcttggtcatactggaccaagaaagcaaaacactttatcttctagaccctaatccactaaatccaatgtatctatgagatatatcaaaaaattgttaaacgttaccaactatttcaacagagccatgcgtgtggcatgtcttggctctaggtggactgaggatatcgacttgtggcgccatatatatgtcacaaatccggtggctaactcgtaagttttcttgtaaaatcttgtttgatccaataaattatttttgtctaacgcatggtacctaactattcaaatttcataggaatttgtcgggttgtctcgtacatctgttcatgcgatcctggaaagatggagcacttcatttgccgtcttttaaggtcattctgactagcattgacatttagaatattatattttattttataatacaattatttattttataaacatatacatttgcaggatgttgacgagctaaggaaacaaatttttgctatatatattgatgtacgagcaaaatgagtgcgcaagcaacgttcctagcggcgcacgagattttcttcactgtatcgcaaatgcaaaacattagaatagtcattctttacctatggggtgtattctatacattacaaatgctttatttaaataatagaataactctatacttctctaacatatttttctgcccgcaacaaataatggaataactctatacttctcttacatatttttatacgtatattgccttttatattgtgtacatagggtatattatatataattaagtctggtaaagttttactgtgcccacgtaatatcatagtactgtacttacatgaaatatatttaatgtactatatgaatttaattaaagtttaaatgcacagatcatataaaaatattttttggtaacatgaaatttttttaaagatacagttaaatagaattgcaccgtagcatttagcacggacatattactagttacattaaatattagtcaaaaagttgaattttgaaacgccttatatcatggatggagggagtaatattattgatttatccgtcgctttcgaaatgggcaccacgcacgcatctcaaagccacacacgcgtctccacaacacgtccctccaggtccaaccccaccacatgtatcggtttctcgtgggcggccagatttttgtcgcaggtcggtttcgtttccgctctccgctccacgcggcgtcgcctccggagcccccagaagcttctcgacccaccaccaccgctctccctctccccgtcaggtgcgttcgtcggaaatcatcgggaaaaaccccgaaatcctctcccagctttcccttttttttttcccttcttctccgcgcgcgtgttctcctcgatctctccgatcatcatcgcgtgtggtggccgattggctgcggttcccttcccggaaattctgcggcgcgcgccgccatttttatccgtctgtctacagggtagggagttctcagattagaaaccaggggttctcccgttttggcgctagttatggtagagatttcgttacctttgcatatgccatggcttcgtcggctctatgcacggagcctatgtatgtatgtatgtatgcttttatttttaagtttgtctcgtctagagtacgcggtggcgatgggaaacagccgctagatttgtttattgtttctttaccctaatcacaggtatgggtatttgagattagttacgaaacatcttagatatatgcggctattcagtttttttttttaatgtgcaagaatccaaaagtctattaattagcatgtaaaaggacttgtgctgataaattctttagtttttagtacaagtgtctgtatctagtttcaatacaagttgcaatccagactacgttaataacactaaaagattgtattgatacaaatccatgattattatggcgcattgaagagaggaaacagaggaaggtaggcttgtcctgcacggcttgaagctctgcttgccttggccaaggtttggacagaggcccttttgagttctatacactggttgattactccctgttacaaatctgagcaatctttatcgacgagggcctagctaataatcaggaaaaatagagataaagtggaaagtagataacaaacgccaaactaggaaatagatgactgcatatctttcagccggatatggtccctcctgctgtaggcgcggacccagaatgcttgtacagctggtatttatacctatttggcaggtagataatgatgattgaacatggtattggtgctttgggtgacagttaaatatttctaaggaaatcactgcacaaatatcattttttttgtttgggaaatatcttgtttttgttttgaaaaatttaaagtttatggtgaaatctcttttgtgcagccttggtattatgtaaatctccaaattctgtagtttagtgttatactgtcgaaatttgccctttccccaatctttgctgttgtttgacaatatgcgcctacacaaaattagtacagtgctacgctcctttgtgcttgaaatgtttccccatattatttattaacagaatcttgaatttacaaggtcattttatcttgcatatttgcatctataattttagttgacctgctttaactcctatatatgcagaaacaatgagcagacgcaacagccgcaccatctatgtaggcaatctccctggggacattcgtgagagggaggttgaggatctcttttacaaggtgagctttactgctttacaatctacctcagttcttctcataagcaactaccatttcaatctggtcgtagctgtataggcataatacattgcttattttcctacctgttaagttgccttagcttattaatgtgagaaatagctagcggttgaaggatttaaatcactattatgctagtggttgaaggatttaaataattattattatagtattataagagttataaaggattattgttctgtaattcgtggatgagtctaagggtaaagcaattgcgggaagaaaggaaccatctggccttgtgtcgccaaagaagcgctatttaggaagttgtcttgtctgtattaaatatctgttggctgtttcaacttgcgatgtcttctcctgctgttttggtagtgaataatcattttcttaatagcacaaccattgatgctcttgagcatccatcagcgtaaacagttgggtgtgatttatcctagatgacaactgataacctgtgtgccattgcgaaaaagtagtcatatattgcagatgggaacgtgttgacaaatgatatatttcatgagtcatattcagattaagggtgttgtatttgtacttattttctaagctaatgtggaggtgcagttgtgaaaagtttcactaataagtccaattaagtttatgtatatatgttattccagtgtttttatcccttacaattgcaataagaaccttaatcttgataacatgcatgcttttttttctcataaatttattctaatgcagtacggtcgcattttggacattgacttgaagattcctccaagacctcctggttatgcttttgtttaggtgagtgtccttttgcaacagccatgtcttctgtaagggtacttgtattgaaaattttattgaaatttataatatagtccctattattaccctgatattaatatcatttcttctttaaaggatggttgttttcaataaaatttacttctagatttttttcaagactaagttttagtttaggtatagctaagttttcttaagatgtaagtgcatcttttaagatgtatagctaagtattggatgctaaatagctaatagaaaatatgtgcttttgtagtttgaggatccccgtgatgctgatgatgcaatttgcggccgtgatgggtataactttgatggctacaggttgcgggtatggatatcaaaatgtttttcttccggtcttctggtctgctttggttttctgtgcctgtggctttatattttctgtacgtaggtggaattagctcatggtggaagaggtcaatcttactcatacgatcgcccaagaagctatagcagtggacgacgtggaggtgtttctaggcgttctgaatatcgcggtttgtaattctttctcttgaatgtgttagtcggtgtatcccaacaaagaatgtgatgtttctatttgttggaccatgcagttatggtcactggcttaccttcatcggcatcatggcaggatcttaaggtattggtgttgtacataacttctatttatagatttttctctaatgacctaattattacctacattcaggaccatatgcggcgggctggtgatgtctgcttctctgatgtataccgtgaggctggaggttagtaataaatgttctcttcttgttatgtcatcgtaccatgggccctgggatgagaatcaattgcttatgtgttgatcttagttttaattcattgtcctccgaaatcaagattcatgctttaatattttttctgagaatacaaaagctgtgtattatttcattaagacagagactggatgacgtctgtcagctggtcatcaggcccgtcaaaccccctcaggtcagggaaaaataattataaaagaagtcctaaaatgctaaaactgaaaatgaaagaaacgacaatgtcctatactcagaagcaacctctgagcctgcagaggcctttctatatagtttgcgggctatgtcagtaatatttgtctttctgtttgtgttgcagcaaccgttggaattgtggattatacaacctatgaagacatgaagtatgcggtatgtttgatatcttctgtataaagtgcattctgaaaatattatactttttggtaattgatgagggaacattttcagatgtgttattcctgttatacactttggtcatatacgttgacatttatggcaagatttggtcaaatttttgaaatgttgactatcaattttatattagaataagtttataaaatctaataaatttatgacattatgatagtacttttcaaggtaaatctagcctaccatctttttttttcaacaaagcatttgaaaaattattaatgattgaagtttcataagtttgacataaaaatcaaatatttatgattagagggagtatttggtatgtatctcttatgatcttttgatgatcttgcagattaggaagcttgatgactcagagttcagaaatgcattttcacgggcatatatcagggtatggatttatttgttttttgaccatgagggtttttcctgtttttgctatgataatagataatatgtcttctagatgcatttgattgtgatctttcgtcaacgtgttcttatttctatgataggtgagggagtatgatgatagatcaagaagcagaagccgctcttactcaagaagtcgtagttacagcaggagcactatggcagcactaattgttgactgcattgttccacagatctgtttctcggtcaccgtcacctgtggatgaaaggtatatccttttataacatcagctttttactggcatgccttttttgtcgttaaagagaaacaggagtatgtgttggaatttgggtttttatatactttggaacttccactgtggttcataaaacatatgattgaaaagcttgtaatgtatttccttttttttgaccgactaatgtatgtctccttttaaattgatatgacttaaatttcctctatggcccaatgactaaaacacagtgctggtggctaacttgcaatgttcaaggtttgcttttgtttttcctagatctggccatgcggcaatctggggactgctttcatagattttggatatgttgagaatcgaaaggatggtttggaactttggatagtagagctggattgtgatgcatgtatggcaaatgggcaacaaccagtcctaggagcgagctaggcctgacagtaaggatatgtggagtggatttgtgttattattgagaatttgttgaccgtaggcacttcaatttcatatactgcatgacatggacctaacttacatgagatctcaaagttttcttttaattattcttgcatcctgataaaacaagattatggtacttggtaagcatttttctggaatatgtacgtgcttttttcacaacaaaagaaattgatcctgcttagtttttatgcggattctgttgaaatagagattttgttttgttcattggcacatattagccatttagcatgaatacaaaaatgcttacttatcagtgtggttcttctgtaatttgttttgatatttctgttagtagtttttggatgaaatcacactgagtgattggttttgcctgtgaaattttgcagatcaatatcaagatcacggactcctgtttcttcagtaagtcttgcagcaagtcatctattattaaaaagtgaattaagtcctattttcaatcattttgtttattgcaatttgcctttttttggcagccttctcgtggaagatctgttagtaaaagcccaagcaggagcttatcccgctctccctctccggtaaataccaaataattcctcccacatttacaatgcccctcccgccctgaacaaaggaaaaaaaaaaatagagagaactcattacactggtgaaacactttatgatcatttgctgcctacgttgttgcaggtgaagtctgattgaacatgaaaaccctccagactgtgacggctacttaaggatccaggaacctggaactcgaggatagcatggattagatcaaatcatcctggttatggcttcactgcgctacaggcttcgccctttgtttagtaggtcgacttctgtttaatattattcatattgcattatatttgcgaaacagagatcatgtgttctgtagtcatagtcccagtacttattttacatctagtaagtggaagaaactatctgcacattgttgtcgactgtattttaaatatctgatgccatatatatgttgatgtaccacctttggttgtcctttgaaccgtggttgatgtgctgacgtactagatgttctgtgttgctgatttatattatgtaaacttagggtgtgtttagttcacgtcaaaattggaagtttggtcgaaatcgaaacgatgtgacggaaaagttgaaagtttatgtgtagaaaaattttgatgtgatagaaaagttggaagtttgaagaataattttggaactaaactcggcattagatctgtactccatttagttgtttcagttcactacgttaactgcaatgacagcaggaatgattggtgtctatgtggctctcaatactttttacccaagcttgacataggtgtatgacgaggtcggcacatatagattaaaatttgaaagtagactgtttattgtttttttctcacaaatgcgtactcgaaatatttgcatggtactgcagcgcggtgatgcgaagtagcaagttcgcacggtgggaagcgagcatgaaatcgtgcattggtaacgcaacgcgaaggcgagatgaatcgtaataacatttgtttaaatagacatttataattataatactccctccctccgattataacccgattgaggttataagatgttttgactttggttaaagtcaaactgcaatagtaatattttcaacctaagataaatttattataaaaaatatgtaattattaatttaatacaactaatttggtaatgtcaaacttatataagcagtataactttaaacaaagttaaaacatcttgtaacctgaaatggagggagtagaacggatctgatttaccttttttgggtgcctcctaagtgggcttcctcttccttgagatccattttcccctttttttttttgacgacaaaattttgaaatcatactgttgaagtttttagaaatatactagatgcgaacaaatttacacaaacataccatcgtcgtggttcggcagtgtgaaatcacgacggaatcacaaatagaccgtcgccacggttcggcagcgcaaaatcgcgactaaatcacaagacgaacacacaatagtgacgaaagcgcgatggcaggggcggtctggcaaggttaaaatgcgagaccagcctcggtgtcactagttggccgagcgagatggccgttgagccttggtctcacttgtgggccgcactggcagctaatgacgcaattaatcatactaattagcgagtaattaattactgatgatcttaattaaagaaataataattaattgctaacgactctaattaattaattaatcgcgtgagtttgtgcggtctcgcggactagccgcgcgagactcgcgcgaggtatcgttcactcacctcccggcctcgcacttccattttgcgataacggtatttctgtcattcccttctaaacgtgtatattccagttaaatcatagaaaaatatatatctatttttcttgttttgaccgtactcctcttcaattaagtaataatataattagtactatgaaaagaaattggaaatataccttttcattggtttttagaaatgtaccttgtcgccaggagggtatgtgtgccatggttacaaataagacatacctcatatcctacgacttatagaatatacggatataacatatctttgcatatacgagatattttcgtgtacaataacaaaatttacgaggtgatatagaaactatcctcacgagaagagaaatgtcagagtcctacttaaaaaggattgggtttatactatattgtggagggtccgttgtcttcgagtcctactcagaaaggattgggtttatactatattgtggagggtcagttgtcttcgagttctacttacagactaaggtgacttacgatataaaaaagacacacccctaagggtctggatcattgaatcatagcaccaatacaaccaccatagcctacaatccggatgacgcgaaacatactcgtcgggagatctcatcgaacccatctcgatagggatctcgccgttaatctcgagatcatcaattctctattgtaatatgtggtctttccatatcaatctcatataaattggattagggctattaccttacaagggacttaaaccagtataatccttgtcttcttgtttgcttgatgtcgtatcgtgtagatcctcgtaccaatgtatccaaataccctatttatccggtctacggatatccaccatcgacaatgtgaactcactgcggtctgcatccatgtagagcgaaccgagcaaacttgttgtggagattatgagtaccatatacctacacgtacggctagtttattcgactgattataggggatatgttatatctctaaaatatgtaacggattatgacttgggtattacgtttccttgagtattaaggaaacggtttaaagtcttaatcgggaatatcgtaaaatatattctctattcggttaggtttgtatctgtaatccgctcccgatctatataaggtgggcaagaggcctcttgagggcataaccacactaaaggtcgtcagatcaatacaatattcggtggagtcaaatccctaaacaagagtcagtattacttttcgtcaagagggcctgaacctgcctaaacccttgtctttccacccatctactttagctctcgtgcactacccccttttcatattgtcgattcctagtatcgacaattggcgcgccaggtaggggttgcgtcgagttttccgtcgacaagtacgatgggttctactccaggagtcaactccttctccttccctccagggcaggcctaccgctttggcagtctcgacttcatcactgacaacttcggcaacatctctcttcttgactcggattcgaactagtcggggaagaggtcgtgaccactcggcaccgtttggcttaccaaattccgccgagatgtactccaacactttatcttctaggctggcttcaaaccactcgggggattcatctacatcagtgcgccctcgcaatctttccaccatcaccagtgcatatcctcaggtcatcatgcaacttccccctctgccacgttcgaatctggatctgtctatccccttaggtcccgatctgagcaagcttcggcttcgcctagattgggcttcagggagatgggcgtcacgctccaaccactcggatcttgttcggacacggagattgccaactttctcagctcttttgacgtctatgacgaccgcaccaccgaaagtctaggaagctcatagttcaacgacgactacacccaattcctttttggtgtgttcatggcagattcgctgaaccaagaggaagttgcccggctagccagagaagctgaagaggaacacgctagacttgaagaggagcgcaagcgcagggaagaggaagaacgcatgaggcgagatctagctcatgctggacgtgcctctcacaatagaatgcttcagactcgagtcgacaacactaatgtcttcgttacacctcaacaaaacaaggtagcggtagtcaccttgcaccattattgacgcggctccggctaacttcaggcctatcctgaacaaagtcaagactatgatcgctgcaatagtgccccccggaagttggaggcagctatcggcctgaggaatctacgattgagacaccgtcccagacccgtctcccactagagatttttttttgaccagatctcccaccagagattgtcgtgcatgctcccgagcgcagcagagggcacaccagatctaatctacaccatcatgaaagacgatgactggatcagtcggtcgactctcgcgaccggcagcacgacagtgaccatcatggtgactcctactacgacggacactgcgcccacactcctagcgatatgaggcacgcgctcaatcaacattattgcgaccgcgaaaatcgcgcctaccgtgacggccaaaggcattcacccgagagaggcgatgaaggtgttccgcttttacactcgacctacgtcgagtggactggccgattggttcacttgggaaataagaggaaggaataagtttacttgactcccttaattagcggccgaatctgattcatatccttaaactacaatactggatatcttgaacctccaactattaaaacgggtacaatttgactccctaggcggttttgaaggatagttttgctgacgtggcgcctatgtagcggttttgatttggtctttattccacgtggtgttgatgtggcgcttatgtgatattagaattaaaaaaagtgtggtacccatttgtcatttacaaaaaaaaattatagggcccactgacaggtgggtcccacatgtcatcctatgtccttcccttcctcctccctttctctctcccttctctctctttctctccccctttctcttcacggcaactcgggcaaggacgcgccgccatgccgtagtcgtgggtggtgaaggcagcggcagactcggcgctggcgctcatgttgagggggtagttgaggtggagccgcgccatcctttcgctcctgatctttccccagccggcggagcgtcgtagatgagcgcgacggaggaggggcaaccggacggtgaggcagattgagggagattgcagcgggcgagcggcgatgggtgaactaaggggattgtggctagattggggctaggattgtggtggcgagcagcaatggtagagggagcgaaggggccagccgatggtcgatggagcgaaccggccgattgcggcaccgggagagggcttcttcttcttttcattgaggtcacgagggccttgatgatgggcgtggggacgaaagccggcggtagcaacggatgagataggaggtcgatgggcgtgggtgggcccctcccgatccagtggcgcgacgacgagcatgcggcagcagtgccctcccgtcgctacgggagggggtggttgtggggggggggcgaggtggtggtggtggtggtgacggcggcggcgtcgccgagagcctcgggaactcctccgagctcatcgtccgccgtgtcgccactctcgccagggacaaggtgtggaacctttccttagacaagctgctaggtgaagatggtgcgcccattcgcgctcgcaaagtccgccacttgccgatgcaatcccctcacccgcctaccaccgccgctccaacgaccgctggtgccactccgccatcgccacggctcaaggggaagagagggagggggaagggggggttaaagaggtaggctaacatgtgggtcccacatggcagtgggtccacaatatttttcgtgaatgataaatgggtctcacatatctatactttctataaagttatagcccactaagtttaaagctcaacacacaaccatgttacatcatcacccactagcaataattacatatttaacctcatgcgagcatacaacatcatctacaaatttatttaattatgcaatcaacatacaagcatatccaattatcacccctcacatcatttgcacaatattttaacaaatctatctattattttttttataatatttaacataaaattatcaatatgtttcacattaaagcgcgtgtatcatttgtttatttcatgataagtactgataaaccctaatgtttcattatttttttcctttttacttctagtttgattgtcaaaaaaatatatattgagaattgattagtaatttacgcagcaaagcgcggggaatcatctattatttttttaattctaatgccatctaaacgccacgaagtacgaaaaccaagtcaacgctgccacgtcagtgaaaccgtcatccaaaaccaccgtgggagtcaaattacaccggttttgacaattgaggggtcatccggtattgcggatcagggatacgaattagattcgatcattagttaggggagccaaagttaacttattcctaagaggaaatatgacttgggcggacggcctccgcgccgtgctgtgctcgccatgccttaccggcccataatgcctaggtggtgctacgacggcccatttgccatcgtgctcgtgccgtggctggcgtctcccgtctactaccgtatttctcctttccccgaccccaagcaaagcacatcgactcctatcggcggtcgcgcgagctccagcgccaaggtgcgttcagttcatccgattccctcctggatccaaaccctaattttcgctggcctcaccgatccttgcctatcctatccaggggatccgttgcgtccggcgggggttaatttcttgcggttgtaggatccccgatggcggatacggcgaaggccgatgcggcggcggaggcggccaagatggacctgctcgaggacgacgacgagttcgaggagtttgagatcgaccaaggcatgcaccgatccgtttccttgtcctctattcttttttgttgatgatgatactgctggtgatgtatgggtctacttcagatctagcgcgtcctactagatttgctcttcttgcaagaggtctcgccgcaacgcaatcgtgtggtctacttgtctgttcagtgatctggtgattagtgtcttgtcatccctgtcaaattactcacctagcttagtagctttaatctgttggtaaataacaagaacaaaactacccgaaaaaaaaaagaataaaactagctcaccataattctgtctgtctatgttcttttaaaattcagtactattaaggatccgttcttgtgtcagtacaattattatagtcgcacttcgccactagtcagagaattcctgtctacgccctccaaaaatcaggattatggatctgttcttgtgtcaatgccgcaacttagggaattccaatgtgctgtccgagcggtatatcacgtcggctcgtttgtagtatgaaccagtgttttttcatgatgtttatgtttattggttcctgtatctataagcgcaaagctcgtacataattatcacttgcccatgcttcaatttttttcctctagcatatgaagaatggtttgtcatagaagttcagcaacaattttctttatttccatcctatgatgatgtgatttgccttcagccccgagttcttgacatacaagtgactctttttgggccgtccgattacgcttcatttagttctgatggtcaaatgatgctcaatatagatgataggtagatgatactctgtagttcagccacaaaaacatttcagggtttatttcaataagtatgcaattttttttatctcaatctgttccttgcaacatcccgaacaatatactggtatatttattgttcaaataatacacatgacatacacttgttactgtatttctaacgacatctcgtatacattttggaacttcagaatgggatgacaaggaagaaggcaacgaggcagttcagcaatgggaggatgactgggatgacgatgatgtcaatgacgacttctctctgcagctcaggaaagagctggagagcatcccatcgaagaactagaacttgtggtcttgtattcagtactttcagataggaagtggtatctgctggatttggcatgtttactgttatatttaccaactcgagcattttgcttgttctgtggtatgcctttccgttatacattttattaccaaatacggttcataaaactatattgcctatgtctagaaagtggtatcggttgtagaaccgtaatccatcaactggctgaacctttttgttccgtgaatgcagaaaggccattgcttagtgttttttttatctaattaatgtgaagataatatgtttgttacttgtgcttcggtagtgtaactctggaatacgatgaaacatgatgaaaatggaagacatggacatgaaaggtgtgattaacggctggtttggtttgtagcctaaattggccttaccaatatttggcaatttcaatagtgtttagtgactttgaagttaaattttggtatgcctaaaaaaataagtcatttcaatagttagcttaggctattttggtttcaacccaacacaattttgtcttgtcaagattagccatgtcgaaatttaacattgataaaaattagtcttgataaaagttggaaagatcaatttagaccacaaaccaaacacgtctaaaagacattgttcggtgagctgatcagcatgtatcgaatagcttggggattgtggggttcacgcagacgttacagttttaactgaaaaagcataccatacagttacttttatatagaaaattttcatgcaattacttttatataaaacgttttcacacgaaaaatattggttaaaaagtatgctgacgaaaatcaaaataaaatctttaacttaataataaaaaagggacatcaagcccaacaaccatccacgtaactgatcatatgtcctcaacctaaatcaaaatcaagggaaaatccttagccacatcctgcaatccaagggaggaggatcctttacttgccccgactttaggtcattgacagataggacagatagattcataacaaagagggtttacatgtcagtaacttaaaaattatgtaagatctcaaactatagtggcggagttacctcccgggtaggtcgagcgaccgtccgggctccgttcctgccatctgcaccgtcgatagtcgtcgacacctataaaatttaatctatcagcgagaaacattattagttgtttgggcttgacgacgccgctggctctctgtcaatctgcaatccaagacgtagtcttgacccttgagtctttcacgaattctgctgatcccctggccaatgcagcacggggtagttgggttgggtccggacgcggcgcgcctccacttcttcggcgtctacgaggacggctctactagtactagtattgcatcgtcgccgtatcggatgaaatttcgaggtttcgacgaggtttgaaagtagaagtcatctgacattttggtgagtttcatccaaatttaaatttgaattgataaaaaaagaaaaataatcaaataaaatcttataaatagtatgatatttacaaaacctgttgggatataaattttcaaaaaaaaatgatgtattccgtgtatttactgaaatttacagtagaaaagaaaagaataacgaattaaaaaaagaaaaaaaaatcagtttacctctttttctgattaccgattgaaatttcgatgatttcgccaaagctgaccggttttcgcgagcttatcggtaagcttagggaatttgtatttaaattttggtttataaaatttattcggaatctatcggctttataccggatttcgtaaaaaaatgttattccgccgtaatccaaaacggaaggtcatctcgacattataaaccctgtacaactacagcaccgccccgaaacaaacaatatccaccacctagttgctgccacctcctgagaaccaagcaaagtttccgacctcaccttgctttttgatcagcgtgacgctgctgcatcttgttgggaacttttcctctcctctcctctcctctctctctctctcctcttcccgaaagaaataaaaccaagcggcgccgaaggaaaggcgagcgccagggccatgccccaaatcgatctcgcctcgagctcgaggccctcgcgcccgcggattccagccgattgaatcccccccacccctaaccccgttctctcggtgctctgctcgttataagcgggtggcctttagccctaggttttttgttcgattgggattttatatatcccgcttggttgggggggggggggatcggatttttcgtttcggtgccgcgaggtttgcgaattctactcgcgtcgtgcgtccgattctgcgctgtttctgttcgtggattctgttgcggtttctctggcgtaatctctgtgttccttttcctctctgcaggtgccgggggggtttcctcgattctggcgcggttttgcttagaggaattccggatttcttagcggaattctgatttccgggctgttgcgaggtgcatctaccagccatggcgccggcgccggccgtggatgcggagggggagtgtggcggggggaagagccacaacaccctcaagcccgacggtgttcgtgtagctgcagcctctaccaccctggactcctcggatagccatggtccagccgctgatgttcagggcgggggtggctccggcgagaggttggactcctccgacggcgagggacgagccacggatgttcagggcaggagcagcgccggggagagcctggtggtgaaatccgagcacgcgtgcgcggcggatgaccccgtgggtgacggtgcccttctcgcccctgccaacaagcctactggcgcggaccctttggcggtagcatcctcctcgcatgacatcgatgcggcgagtgctgatcccgcaaacgacgaggaagacggggacaccacggaatgctcgagttcatttgggaactcttgctgcgagaccgatgatgaggctgaccatggtggttcggaagtggattctccattttcggagaatgctgatggtgttcaagcattgattcggcctaggtgagcttgtttattgattccaatgccttgtatgcactaaatgatagattgattttattgttgttggaggaaattaacaagtataagacggcaactggagactaatttactactcagttaggtttcccgcgcttttggggatcttaaaaaggaaggttgtattaaagtttcaactgccaaaccatatcgtaactaggattcgtatatctaaaagttgtatgactagagcatataaagttcgataatattagatgtcttcgtatatcatgtccaagtgaaacttcagatgttatttatttactaacaaggtgccctgttcacttgtacagttagtctcattctcaatatttgtttcagctgcatatgttttttatttgttggccatatattttatctattgtgtatggatggatataagtgtgtcagatttagtcttgttggtcttacagatgtagtttatgcaaaaatgtggtagtacctatttcctcgaatggcgcttatgtgaaagtataacagtaataatagcagactctgaatacagtgaacattgggaccttttaaattactgtcagacttctctcacactatgttaaagaatataaataattgtgagtaatgaaaattgatggaaattactcaaattggaatatggagcagtcataaccagtgaaccaattaagggctcaattagaacacgagaaattaaagcttaagaatagaagaaaacacaagaataggaaatgaatacaatgcagaacataggattggggaatccatgaatttcattggaacatagatgtttagattggtgacaattaaaaacaggaatatttagaagtgaacttgtgtaattgcatacatacagaaaaaataaagaaagagtgaattgcactttggactatattttattacctaaatttcatgttggactaggctttaacactccttttcacattggactatgttttgttgccaagcttttgtactttgggctgctcttcttcctaagtcttcctgagcaaacatggcacactggctaactcctcgcctctcctcccacatattgttagcttcagcgctagcggcatcggggtgggtaccagatggaggctttggaactagtcttgccgagggataaccataacctttatccatgcccatacccttggtaaacaggtagtgtatgggtaaaatttgctttacccattagaaatgggttgggtctggatatacccatttataatagggtgggggggggggggggtggggtgcccgtatacctgtttgaccaatcttatctttctctccggttgcttcttccccaaatcctgagagaagctgacaccatggcgtatccctcttcctcgatgaacaccttgcgggagtgcaggacgtgtcagctcaccagtctcgtgcagctgccggacctctttggcgacgctgacgaggtgatccctgacgaggagcagcaggagggagaagacacagccccgtgtggcgagcaacgattggttctcctgccggagcgaagtgtccatgcgctcgtccacggccttgcggaacctgtgcagcacggtgcacgccgcagagtgatgtcgtgtacattcccattccgttcttctgctgctgccagctgtgtggctcctcctggatcctcctcaggtttgggtggtgccttggcggcacggtggtgaatggccagatacgttggcttcttggagaacggcctgacaaaaccatggccaaattcatcatctctgcattttccaagatcttggctccattgttgctagttctttgctttgcttcctggttagatcgttctacccaattacccaaatacccactgtatatgggtaatttgattaatggggaaattggggagggtaagattggggattctgttttatgggtatgcggaattggggatgggtatggccgggtaatactcatataccctccccattggcaggtctaatcagaacagggtcggcgctgagcctgggcagctacttgatgtctacagatatcctccgaactgacaactcatggatgcatagagctagcatggccaggaacatgaaccagcagccagtttgttcattgcgtaccttgatggctcgatctcaaagatcatagccatccttcttgctttgtcacattcatatgcataccttcttgctagcatttgtcacatattcatatgccatgcttctgttttgcgcatgtaacataagttcctcgtgcaacctgaagacatatcatgccatgttgatctttgtcatatattcatacatttttcttcaaatttgtgtatgtaacacaatcaaaattcatacattttgctttaaatttgtgtatgtaacataagttactcccacaatctaaatgcattatatgtgttagctttgctataaatacacacgttttcattttttttaaaaaagaacattatacttccaagtcgtgaatgtaacatacatatcagtataccagagttgagtcccactgtaacttcatatgaaaaaaattctattaattttaatatgctttcatattgtgtcagtgtttaacatgtacaaactatctttcagaaagaaaaaggtaactgctgagtggaggagtgctgtccgcccaatgatgtggagatgtcagtggttagagttgcgcatgaaggaccttttatctcaagtgtcgaagtatgaccgagagcttgctctaatcaacaaaggaaaagaattgcagcaggcagtaaacatgacaaatggttctaggtcagaatcagcacagtcttccaaaagccgtgaaaatagttgtatggagaggcgaaagaggagaagacttgaagaaactgtgaatacctcattgtacatcaagaagcacgagatattgtcatacttctttggtagggcattcatttcatttttctaggaataggataacagtttcttgcattgtctaatcttgcaccaggttcctatttgttggtaatgaagttcttgcattctttaacagataaacagaataagggtgctgaaacagatggcatcttaattgatgacgatagcagtggcccaggtatgtatatggtagtgtgtccacttgtatagttgtgctggagtttacacaggaagcattgtagttagcaaaaatttgcattaaaccaatctgcaatttacctaattatgtgtgtcacatttctagtggttaattgataatagagtctttaggagcttaaggactgttaaatctatcattagctaagtgcttgcgtgtcgcaagttctcccctacacttcacaggttcctctcccgattgagctgcttgttttcatctcctctttgttgtattaatggatggtatggccttgaatgtgtaagaacttatcaaccaaatggagatgaaaaatgtaaaacattttgctgcatttttaatttctaaatacttaaaaacacaacattgaaatagaccatagcaacactgtactgatgatcaggtacaatgcactaataactaggtgttgaatgattcatctgcgcagcctatagtaatcagaatggcatgtgtgtcctcgccacgattgccagcacagttgaccaggacccagcctggtgtccaccaatgcgtgttgacgtccttgcctagaaaccgtgcgggcaacccacgccctatcgcccaatcattcattgcctgtccgcatgctatgctttaagtctttcccaggtcccaattgagatcactcccatttcctgactatccattacccaggtaatcaacagaacaatgcaactctagcccaaattaggtggtaaacataaggtagaagtttgatgacccacccaacttctaagcctgaccagttaatctaagaccaaggcagcccagtgtggcatcttattcttcccagtcccagctgccagccatgtctaagaccaagcgtacttgctgccccttgccagttatttgaattagcttgctagtgtctatggactgggtacctggggagttccaatttaggtggggctggaacgcccacaagccccaatggtaagttcacagtcacggagaaaagcttggctataaatgacaccttgctggtatccttggtaaaatgtatgtgtcttgttaatgattaaaagtagtatacatctcattgtcagtgtgttacccacatctttccttaccgcgatgtaaacattttggtatcttcgtacttttatttttagtgttatccattataattttggattgaactaatgaagggcagcatacttgagctattcagacattggttatgttggcattgcaaaatgaaatctatcttcattacctaatgtctgaattttacatgatttctcattgccaacgctaactctttatacgatcgattcctacagttggcaatgatgttaaaggtgggatccatactgttgggttgcttgagcccaaggaatatgatatggttgcggagcaactcacactgcagaaatttcttttgacaattgatggtattcggtcccaagttcttcggctacaagatcgtctcagtaaggttcgttcaaaacaagaaaacatggtttccttggtggaccatgcccatatcaaggtgtctgagaagaggctaaggactcaaaaacggtcattctcatataagaaagatagatatagtaaatcaaagaaaaagaagaatctaaacattttatcgaaggaagaggataaaccagctcatgcagtaatatctactttgtctaagagggcaccagattgccaaacagaagttacaatgtacagtagcgaagaaaaaagtggagagaggtgccagtcacataagaaagccatcactgtggatttactccttccaaatggtcatatgggagatttgtgcaaagtaagtccttgatcctttccttatgatgtttttatttgattacttaacttccatacaaatgttttgactagactgaacgaatgttcaattgacaatattggggatgacaatcctcaattttcccattaacagtagagagaatagcacttctttttttgcatttattaaaatagtgtggatttcttggatcgaattccaataaataatgcgtgtcaaaaagtgttattctccagtggaacaagaattggagttaggtgtgcatgtgggccactcacggatacaattatagttgattattggttctacgttctgcatatggttcttacgttagtggtaaagtagggttattgactttgttgttcccctcacccaacctagtggagtcgctgattgtaagtctaaaaacatgggattgggacccatgtcagatgtgcagcatggtaatgcatgacatgagttgccttggactagtgcagtatttgttactccctccgtcccaaaatctagcaatctgtccagattcgtagtattaggtggtgtctaatcgtgtactaggttgctatattttggaatggagggagtaggattcttgcagaattgaaggaaatcagttcgatgtgctaaaggaattcactctttggttacgctatgcagttctagtatgttgtatttctttggaacaatggaattccagtgcccagatagttttgattatctcatattctttatttcttcatcctacaactgtttgtgatcaagaattatttggttgggctgtcaagtttttcaatgttagcttactcttcacaggacaatgatgacgtcctcatagacaatcaagcagccaatgaaggataccagccatttgagaacgccaagcagccgatggataaatcattagaactaacagagaaggtctgtgaaactgctaatttgagagttggaagtaactcttcccctgttgaagtcacaagcacttcagctccattcagagttgagaacgcttctgtttccctggaagccaggagtacgcctggtcaagtggtgaagcaagaaccggtttttgaaaaaccaccagctttgaagcatgtctactctggaaagaggaggcgaaaacttaaaatgaaggagggtagtggtcctgtatctggattgacccagagtaaagaggcctctaaaacacctgctacaaagaagaaaactgagagcacatccccagctgcaaaaaagctgaaaattgaggagaccacagccccagatgaagggaagaaagctgtgaagactcactcaactggaaagaagcgaaaagctggaaagtcatgctcatctaccaagaatcaggaagctgagaattcatcctgtgctgcaaggaaggatataagcgaaagcaccccctccaaaccgaggattgaaaaggcagtcttggtggcggtgaatagccggagaagtcagagggtccggaagccgaaaatttactgaaacaaagcagtctctccaatttcaggattgtgtatgtatcacagacgcgtctttttatgttttccgtgctgctgaaatttatttctatacgttattatgtgctcgccatgtaagttagtgtatatatcagcttgtctagataaagagggttcgtaatggtttagccatacctttttcttttgggctgccagactaaatagtacagttatcttgtgctgtctaaaggaaatgtcgtgtttgatactgttcatgttgtgcttgtactgcaaagatggctgcagccaagatggcactatttcgatatctggtctttttagtgacagcatttaggtatgaccccctggctggctgctagctatttggatcagagttggccgcagggctcgcaaattcaacgaacaccacatttctttttgcagtttttgatcgatgtgagctggtttgaatcctgaaaaagaagggaactcggtagaattcgcaaaaattcaaattcaagctgaaaaatatggagaagatttgaaaaaaaaacaatcatggtaatgctacatgacatcaaaatctgttaaaaatgtgaattttgatacttcaacaataattaaggaacaacactttgttatattttgttgaaattcaaactattatgttattgatgtcatggtctcatggatactataatattcttcagtcatattatgttgtttgatgacatagtaataatgttggtgctggcactttaaaattttggattactgttataatgtttctaattatgtattggattattgtaatattgtttctagttataatgcttttaactatgtacattccactattatatagttgatgtcatggatattataatattatgttatttcattgacattataacagtgctgatgatgtcatggactttaaatgttttaagtattgatgagctcacggacttaaattaacttttcaatcatagctatgcttttaactgtgaacacccgttactattatgctatttatgtcatggacattataatattttgttttcatataacgttgtgtgattgacattataatagtgttgatcatggcatggatattaaactttctaattgctcttctaatgtttctaattgtatacgtgcataatcacatcaatgtcaactttattgtctataatctggtatgccaaaattataatgccatgccaaatgtttctctcttctccgtcattttttcaaatttgtttacttttatttttttaattttcatttttccatagaaccttttggttgtcaaccaaacagtttaacaaaaatattatgtatggcttttttccgttccccaaaaaatatgtacaatttttgcttcaaatcgatcattttcgttacaaacgatcaaaattcgttatcgattcactcgaaacggatcatcaagatccaaatatcaatatgtgaatttcgttagtccactgtgtttcacaatccaaccttcaaatggttttgtaaactctgattaggagtcaagttaaaatattcaagagaattctactcaattccaatttctagaatgtgtcattgtataggtcattttcttcctcatgtcatccatgttaacttattgtttgctatccaatgtttggcgtggatattttttttacacgtgcccaaataccatccctcaactctcatattgtggccttgctcaaggggtggatgactcaggtggcagaacccctactccaatctccagcagctgctgaactatgcaatttaattagcgaccaatctagatcgcggctgccttaggtggggtgactctagcttatttttgagtattggtcactcccgaacagcacgatccctgcacaagctccaccatagtgtacacattgtccttaagacatctatcgttgtgattctagtatttgaagatgcattttagtgggcaagatatgctttccggaatggcacgaaagagattgtgttggtaaaatatagtagaatttctcgtaactaaatttgatgtaacacagtccgtactaccaccaagtaaccttctcttcatgagcatttgcgtccattgaacccatacaggaactttgaatagttggatgcatgtgaattctgagcttgccaagcatttatctgggccatgggcatttgagaacagcgcttgcagttatgccccacacggatacggggctgcagttgcaagcaagaaatgaatacgcgctgaacttaatggtaaagataactcatgatgtacattcctgggctaagttggctgaaaagaagggcgatgccagatactattactgttgctatcgtaggcgtggaccatgcaaagattgaggtcatctaggccgtgctaatgatacataatcccattaattgcctacatgtctccattcaattcttgtacatagaacagctgagcgagaatggcttctgaaaccatgtggtagctagtaccgagagaaacaactagttcttgcattttagcggaggagaacacttgaatgcaattgcaggagaggactgcaggcagcacgttgcatggtcatctcaatctcgcacacagactgaacattgggcatggtttggaacatgggaattctctgataaattcctataaagatctcgtatgatattctctgataaattcatgcgttttacactaaacctttgccggagatagttcgagcaggactatccgaagagtcattttctgtttacacgtttctcaagttattaaattgtctattttttttaaaaaaaattccaatatataagtttctttaaaaagttaaataaatttatttttaaaatttttatagctaatacttaattaattactccctccgtactcgtaaaagaagtcgtttaggacagcgacacggtctccaaaatacaactttgacttcttgtttctataaaaatatttatttaaaaatgatatatgtatactattatgaaagtatttttcaatattcatataatttttaccttttcaaactcaataacttaagaattatttataatttatattttcaaggtttgacttaaatattatcctaaatgactttctttataaatatgaagagagtatgtgttaatgggtcacccgttttacgtgccgctatcatctcagttatagctgacaggttgtgaaaatacgaaaccagagatactactgtttagtgaaagtggctaaaacttagtcctgtgggtgtgtgctgtgtgtataaatggtcaaatacggtgggtgtacactaacacttagccaaacatggtggcatcgctgcagttaagagtgttgctcgatggaaggaaaaacaagcattctactggtccattgccgttgataagacgcataacggccttccattgccgttgataagacgcataacggcctgctatctctgtacaaaagaaaaagaatttaatcttacatatgaatctgtagaagtgattatccagatttatttttattttagacgaagggaatacgtgactcaactgtgtggttttcttctgataggagaggagagaaatgaaattggacaaaagggtgaaacacatttataacatcaacacagagaaggacaaagtgcatcttgtgtgaaatacactcgtctaacactaaaacgggatcggttatctctgatgggcttaaagccttatctctttcgggtagagccccgtcactaagcaaaggtcactgatatgagaaaatatcttaatcggacatccgcccgtctcggatgacacacatctcaaccgggccaacacaaaaacccgtcacggatgactctcagctcaatcggacctaaattttagggcatgccaaattatagcccatcacagagagtataataatttttttttttgctttttggctagactcagaccttgcacactttgtccttactcgtgtccactccccggtcggtcacccatcccgaaattgctccaagccaagtacgctaaaccttaaaattctatggagatcggcttccggaaaagaaattgtaagttgttggtattagtattctattaatcctattaagccctgggctaggatatcacaccccaacatcccccattcatatacattcattcacatacacaaccattaatatatttaacacaaccacattcacataacatccattttgatcacatattttacatatttcaccgcaaaaccgagttaaatggatcaaatatatatttagcaagtattaacaagaagaggaagcaaatcagatttctaggcaaaaatagatttcgaattaaattttatgatactaaatgaactcatatgaaaaaactgtcaaaaacaatcttctagaactcattgagatctaccaattttattttggtcatttttccatccatgtttgatcgaactatataaaatttgaattttaaaatataagaaattcaaataatttttcgggtagtaaatgatttcaaatggaaaaattgtcaacaacaaagttgtataactcatcaagatctataacttttatttttgtcatttttctatataatattttttgaatagtttgaatttgaattttgaaaatatgacaacttcaaacaatattttcaaataatagatgatttcaactaaaaaagtcatcaacaacaaagttgtataacttatcaagatctataacttttattttggatattttttctatataacat

SEQ ID NO: 22463 - DNA, 13117 bp, Oryza sativa
ttaatatttgaattcaaattcaaatttgaaacgggtatataaacttttgacttataaactttgggtctataaactttaggtgtataaactttagatgtatagaaatactatatacagaaaatatttgaattcaaattcaaatttgaatcagatataattcaaattcaaatttgaaacgggtatataaacttttgacttataaactttatgtctataaactttaggtgtatataaatactatatgtaaaaaaatatttgaattcaaattcaaatttgaatcggatatataaacttttgacttaggtctctaaactttagatgtgtaaacttgaggtgtataaactttaggtgcataaatttactaaaataagaaagtaatgcggtgtcaaaaaaggaaaccaggtggagggaaagagggggagggggggcgaattgatcgctacccccatcaccaggcgagcgatcgcccattagcatttccgcttgacaagcaccgtactggccttcgcgagctcgcactactgcagcaccctacctcctcacaattgtggaaccaactgctgctgcttggaggaggaagagaggggaggagggaagaaagaagaaatggctgacatgtgagccacattattttttcccttttttttaaaaaaaaaaaagattgtaatagtaatgccacgaagattgcgtgctgcgggaaagtcgtcatgggaggtcgattcggccgccgcgacggctgaacgagaaggccagtgaagatgcaccattttcgctagcggtggcaaaccatgagcgaagatacattttcactggcggataacataatggagccgccaacaaagatagttatcgttggcggttgccttataacagtcaccagtgaaaatgatcttcgctggcgcacttaagctacatggcccgccagcaaaaatgcactttaccagttgcttgctgacacgtgacccgcttatgaagatatttaattattttttaggaaaaaattgaaactatttttagtttgttcacgtacttaagaatcacacatagaggatatattcaatcgagcaatcgatgataaatgttttcttattgttgcttgcaacatctattgataattaatagggttaattggaaccatgtcattataaatttcattgtttggaaaaatgtcattaatgttcatctatttggtattatactatcgcaatttcacaggtataagagcatgctactacgtacccctcactgtatttctaacattttaggaccaaattacccctttatttttcttcttccttccctctcttctctctttcagccgacgaactgtaatgacctcatgctcgaggagatggattctaatcatttgggcaaatatccacccgtttattacatgccaattaaatggttattaaaaaaaaagacaagatggatcaatatgtaatatacatcatgtaaagccttatcttatgtcatacacttgtcatacataggtaatgacactaaaaaaatgagttcaataggagcacccaacaaaatataccattgaacaaaacttcagcacgacaaaaacaagaaggttaagatcacggtctgacagtgtatcagcactattaacgtatccacaatttatactcattatcatgcctcaaaactgaacggcaactatccaacactgatccttgggttctttcgttgttacagtatgaaaattgaacccatcatattcacccaacaaaaagaagcattcagcttcagtgcacaaatccaaggataaaagcttaagacaaaaaacgtacagcagctgccaacttctgttcacatctgttggaacagtctcaagcatcaccatgaacaaaaacacggtccttatcatcaagaactaggaagaaacagcttttctttcttcatcatcagtgatcggtagtttcgtaggcacgtcaaagcttgcctttagcgtgcgaagtctttactctgtgctgattaatgcctggagcaggggatgccctgattctgcaattgaggtgcccgcaccattagatcctggatgccctgatctacaacagcaatgcctgcagctgcaagaccaaccaactgttagcagccaattacacatggaaaatatgacgggatggatgatgtcaatgaccaaccaactgtcaatgatttctaaggcaattctgaaaatattataactagtttggtgtgtttacagtcctgggagccaatactggagctgctactagcatgagttcaggaacaaggtaacttgtgcaggctagaactatagtaattgacatcagcagcatggctccaatgtgcaccaattcggcgtcacattggtcaacccattttctgggggtgcctaacagggcgaaactaactagaatcaggctctaattcagtagtaatcccatagattggataaactactaagtaaaaactggcttgacctatgtatcttttggtctagtcttggtaaaattgaattggtttctgttgttgttgagtccatttggacccctggtacctgtgcacctatttcaggctggctggctggccatgtgtcacacaggtctttttggttaattcatttgaagattttgcctaagacttgctgcatactaagatacctgccgggcatttgaaatttggtaacccacttcattgtcctgtacatatacaaaggcttctgttcgctgctagtactaccttagctgaccagaagttaggaatcaacgatgcatttatatgtgtgtttagttcacgtcaaaattgtaagtttggtttaaattggaacgatgtgacgaaaaagttggaagtttatatgtgtaggaaagttttgatgtgatggaaaagttggaagtttgaaaaaaaaagtttggaagtaaactcggcctaacctgcatttgctgttttggttgaaataagattcagagaagattcgttggtaccattaaagagaggaccaattttccagttgctcactaggtgatttcaaccagaagctccggtcgaagccccatgttcataagaccatgctagcaaaaagataaaattagtaaaacaaagcagatgttcaaatatcgctgggataatataccactctcaaacgccaaatagaccgttcttagcaccagcagaggtggggaagcgcgcataataccaatgcctcactcaagatgtgacaggcaagccccactgctatatgaagagctaaggggctgtgtggttttcgagacttattttaaggtcctgtcacatcgaatgtttgaacactaatttagagtattaaatatacactaattataaaatccatttcataatattggactaattcgcgagacgaatcttttgagtctaattacgccataattttgacagtgtgatgctacagtaaacttttgataattatggattaattaggcttaaaaaattcgtctcgcggattagctctcatttatgaaattagttttcttattaatctatgtctaatactctaaattaacgttcaaacatccgatgtgacatgggctaaaaaatttttagcaccatctaaacacccccacacaagcataaacaggagaggggttccatgttccatcaacagtgaaggtaaagaatactggcttgccaatggtatacagaagggaacatctttgggatctggagaggtgggcatcactgccaatatttagaatcacaaatgtaagttacttctagattagacaaaaagaatgaaaaacttaacgtaagaatcagtaacagtatactatatgtaggtgcagcacgtgctcttattagggaacttgctgcctatggagtcccgaaagccagaacaacaacaacgaacacgaggaagagctcctcaagggggatcccatgggatcattttgtaacctagtttgtaaaaactctgggttttttttctctcttctcctaatatgaaataggcagagctcctgattttacccctaaaaaaacacgaggaagagcatcagatagaacgccttacggacaaaaacaacacaagggtcattcttgtgctgtcgacatacatagcatcctcttgcttattgtaatgaatcccatgtctttctagccaatccttctccatacctcagatgctatctgcatttaagtgatcaaattttcaatatggcaacatatttcaaagatatttggaacaacttaatagcacagatcgtatgcttcaatatgggtaaatggattggcataatataacttctttttaaactgaaactggcataatatgaccataatgatggaaaaaccatgtcaccgcctcaccggtcttgacttcctaggaagttgggacgcttgtgtcgggaggggtttgcatcgatacctcaaatcaaacgcatcactaggcggtcatgtcagcctgcaggggattccctggtcggattgaggcgtggcgaggacggcgctagaggtggctgccggcgaagcgctcctaattgaacctagagcagcactgctagctactaagcttcgtagcaagttggattataggcttaaacaaacaatcggcagcaaaaaaactccgatcgggtcaatcggcgccactgttaaaccctacctattgactattcccgccgaaggcaccggggtgggggggaggagcatgcgaaggccatgacgagatagatacttacaaagggacggtgcaccaggtcaccaaccaattctgtcgacggagtcgggggcgatcgccgcggcggcggcgagttggggaggagaggcggccatggagcttcgcgtggtgagttgggtgactggtggtaccaagaaaaaacgtgcaataaaaaccaccaattaattgaaaacccatgaaaactatatctaaatttctctaagttcatgaaaaaaaaatgcagagatggttatagttttgaaattattttacacaaaatcttaaatccgatctccaagaggaaaaaaagggacaaattccatgtgaatattaccctgatactattcatccttttttttacactcaaacgaagttaaatttagacttgatatttagacataatgtattttatgactatacctatatctaatatttttttaaaaaacttttatgtttgattttcataggttttatttgatggtttttacttaatatgactcaagtatgaattatttaccagtagaactacgtagattggggtaatatgttgtttttcaaggggcgaaaacgactcagaaatggatggaaaccacctttaccgctttcgttttcaaatctttttaagaatcacaataaaaaaaatcctgaattcaaaaatggaatcgaatattatcggatacggaaacagagctaatacaaaatgacgcggatatgggaacggaaatatatcggaatataaaaatccctctaagtgagcttccaagtgtttttttttctaaaacaatagataaaatccaaaattttagcaactaacatcccagatcacttcgtcacaaaaccgagtaaagtttgtacttactgccacaaagtgaggtgcatatcttgatctctcattgtggcaatcacaataggaagtgcagaataatgcatcacataacacaatcactcacagagtgaaagtcacatttaaattgtagtatgtcttctgctcaggtccaaatcccccaaaaccacgaattccgcgtggaccgcgtcgaggaaaaaaccgaactttcctagtgtcccctccacactctcatcgcgtgcttcctgcgctcactctcttctggaagagcttattcccggcgcgaccatggcgatggcggcgctgcgtgaggcctcccgccgtctggtctccaggagggagtccccggcggcctacgcgcgccccttcctcctcacgcactcccggggcatcacctacaggctcttcatcggaggtaaacctcaccccccgtctccgtctcctcccgtttcctgactcgcgcatgccgcttgtgtaacatctccaccatggcgtcatcacagcgctgcagatctttgctcgctcgccgtctctcgtgcgtgcagatctgtgtgattggcggctcggcaagtcggcaagcctgtgcatgcatagtgttcgacgaaatgcccgagagacgcattcaccctgagtttctatccttttacagggctgtcccaattcgcgaccgaggatagcctggcagaagctttctctcagtatggccaggtactagaaggtacatttacttgtaacttaccagagccgagcctagagcacactttggtttatacttcttgtcattactagtaagttggaaactgttcttgttcaaatgcagcaacaattgtcaccgataagatgaccaacagaccaaaaggattcggctttgtgaaatttgcctccgaagaagccgccaataaagcaaaggaagagatgaacggcaaggcaagctttttgaaacagtgtatttttagttcagcctaggccttgtttggaatgttggattaccacatgaacttcacaggaaaccccaaaatccagtttaagggttggttgtttctttcctagcaagttcatgtagaatatcagtcttgcaaacaaggccttagaagttagaagcacactctgtttttcctacttgatttgattaacgcaaacttgcaacaggtattgaacggccgagttatctatgtcgacattgcgaaggccaaaatgaatcgtactacagattccagtccaagagcgacaggtcctcctaagccacctgaccgctgttgatagcatgcgtgtcatcttcatactttcctttttatctgctgcacgagtagtctattgttagattgggagtacctaaaaccatagagagtaatatgaacgatattacaaagcttagaatgttgaatgtccagttttaaagttcaggtgctaatggattttcatccaaagtttatggggaggttattgggacttcttcctattattattgagaagttcatgcgtaataatactggatttccagttttgcaataaaagaagatgtgcccgatcaacagctcagattatgatataacatcacatgctcttgccgatcaaatactgtgccctttccttctttgtcatggacagtatctataatgctgtcgccatgaaatgatctgaaaagtgctgttcatatagttgcatatgctcttgatgaagctgtggtagaacagtgtccttcctccatgtctgtccagtgttctgtatggaactaataatgaattggtgttttcaagtactcctaacttaaacttcatttgatttccctaaaactgtggaacagtaccttgattatacggaaaacatgaattgtaatgcgatggacagacggcacatttttttctgcattcttgtattatttgaagggaaaacattactctttctttttcaaattgaaacgtaaaaaagcactactacatgagattggaacatgcgaacaatgtcaattctactaggcttaatgtcacatcctaggatcagctcaggtgttttatctcctattttaaatggatgataagcacctggccaatttttatagtttaagaataatgtaactacggtggaagaaaaatacacgcgagttctctgctcgatttgtacactgatgaagagaaggccacattttgtcctctctttttcctaaccgcagccgccgatcaccggagcaccacggcggcgacgaagctcagcacggccatggcgctggcggcggagcagcacaggtcgatgagcgcctcgcgtcgcgccttgctctccttcctccccttcctgctcttcacgaactcgtcatacctcctcttcgcctcgtcccgttctctccccccgcctatcctctgttcctccattgccgcagcgaggaggcggaggcttcgctcgccgctcgccgcggcgccgtcggcgtcctgcacggcgaggctgacctcgctgatgttgccggccccctcggagcaggtcacggtggtctcgaacttgcacccgcccagcaccaccgcgaacctcaccagcgtctcgccggtgtaccagtgccggtccaccgccacggcgcgccggctggacacgttcaccgctcggccgcgggcagggtcgacgaccacccagctcagctccagctccgccggagacagcgccgcctccgccgccggcttcttgcactccacggcctccacccggaacggcgagccgaggaaccacggcgacgacgcgggcgtctccacgacacgggagagcaggggcgcccccctgtagtagacgtccaccgccgagacgagctccgacgggaggggacctccgccgccgccgccgagctccccggcgtccgggcgcgggaacgggaacgcgtcggcgaagagccggcgcggcgggaccacggacagcagccgcgggtgccccgccatggacggccactccgcgaggcagagcgcgcgccacgtctccgggtccgcggcgagcgcccggagccccgccgtggcgcagctcgccgccgccagcgaccgcccgtccagccgccgcagcgcgcgcgccagcacgtcggcgtgcaggtcctctatcgtagtagtcgccaccattttctcttcttctctccctggcgccatcaccctctctctcctcttttgtacgatgaaccggtgataactactgcgcctccgccgtggtccggcttttatatagcactcctccttgtgtgccctactagtagtaagcgcggtgaactctggtcaaaaccacagccgtcctggctgcgacgtggtccagtacctgtacagtgcgttggtgtgtttcacaattttctttcgttttaacccgcatgccggtgtggccgtgtgggcgcggcttgcagtgcagggcgccggcgtggcagccgacgagaaggggtcggtggcgcgtgccagggccgcgctggcgcccgtggtacggcgcgacgcggctcgcctcggcgtatcatctcaggccgcgaacgcgtggcgcgccgtgtctcctccgtgccacgccgcggcgcgtctacctgactcttgagtcggtacgcgtcgtgcgatcggctggttggtcgggcgcaaccgcaaacgcaagcgagacgtgccgttcgttgcacttgacgtgacagagaaccaaaagaaaaacaggttttgtttccctgtgcctttcacggcgaccggtttttctggcttgatggcaaagcaaatctgttgtgcaccggtgtaccgtgtgtccgtgtatctgattcttaattgcgtttagaaggatatcgttttcctcgcgggggggagaaggccgtcgaacgatcggcacggcatctgcataccgctgagatgctgacgatgggggcggctcaccggcattaatgtcctgggagagtgagatcgagggctactggacgtgttacgtgtacgacggcttggcctgcgtacgtacagctaccgtgtgctgctgcgctgttgctcttgcagatttctcgtcaagaaaggcgcattgatacagggatatgtacgtccgtgtgtgtcgttcctatcctctcgcggtgacacgataagcctctcctaataattctttttagcacacgagctttctcctgatcttgcgattttctgcatgatctctcgttcggtgttcggtgaagcaatcaaaatgagaaacaaatgtggtaactttctgcttactactctatccatctcataatataagaaattttagagttatgcacagttattaagatggaggtagatggaaaaagtgaatgatggaggtttgtgattggttggaaagagaatgctggtgaagaagttgttatattttagaacaaattcaaagagaagttattgtattttgagacggaatgagtagtttagatgcacagcaatgctacgctgttgttctgtgattgtgcttcagctggggaaagcagagcaatagtattcagagtttagaactgtttatatgcataatgcaattttctcgcgctccatttttgaagttcctcagctttcaaagcctgggcgatcagtctgagcatgtcggtagagtcgcggtcatgattgccagagcaattaaactgaagattaaataaagtcatattggagtagattcagattggccccgcaataagataatcatatatatcctttgatttcttttctcataatggtttctgaagccttggctcggccggccgtcatgggttgcctgaactagcatcagggtttcggggcccaaatcctcatatggtcatatataactgcatgacgttgcaatatgtatggcaaggatctattttacatgggtaaatttgtttattaccgctgtaaaaatcacgagctaaaaaatacatgctactccctttatcccataatataagacgcggtcaaaattgacacggtctccaaaactaatctttaacctataattttccatgtactataaggttcctagccacaaaactataaccatatgaaagtaaatttaaatatcaatctgatataatttttaacaaataaaatttattttatactccattcgtccctaaatatttgatgtcgttgacttttttaaacatgtttgactgttcgtcttattcaaaaacttttctgaaatatgtaaaactatatgtatacataaaagtatatttaacaatgaatcaaatgataggaaaagaattaataattacttaaaatttttaaataagacgaatgaccaaccatgtttaaaaaaaccaatgacgtcaaacatttagagatgaagggagtattatactaagtgttagtgaaatattttaaatgctaaatctttaaatacgtgtgcgtcttatattataggatggagggagtacgtcattagtatgtagatccagagatccagcctttatatgtcattatcatgttacgatgttatgttacaactcgagtatctttaagatggtactaagttatccgattttacattagtataatgttttgagttaccatgtttttaagagaaaagatagttttaccaaagatttggatgctactatggtattacttccttcatctcagaataagtttgttttccatctatttgtcttacagagacgccatctttttcagcgatcattgcattagagtattgggagacaaacgtattgagatttgctaaagtggagaataattatattggagtttgctaaagtaagaacattctttttttttcctttgtattggcatgggtagaaatgggctaaaaatgaagtcttagtgatggagatagtacacgggaactgtctaaagatttcagattgcagatttcaggcttcaggcttcttttgtttgagaccaaaattaaccaatcaaaaaataaatgttgatattgccaaattatttggcttagggcttgttcactttatagtcacttttaaccttaccaaaatttggttatactaaattttaacacatttttacattaccaaatttttagtgctagatatgttttgtttgaagccttatcaagttttgatggaatttttacgagtggaaacttataaaactacgggcctgttaactttgggcctgttcactttggcattgccaaaattttggtaggatttcttatatagttaccaaaatttgacagtaaactaaatgtagccactttttttggcaactttaccaaaatttggtaaggttgaaaatggcatcaaagtgaatagaccctttgatgccgaaaaaaaaccttaccaaattttggcaatgttgtcaaaattttgacaacttgccaaaattttggtaggatttcttatatagttactaaaatttagcagcaaactaaatgtagccacttttttgttaactttaccaaaatttggtaaagttgaaaatagcatcaaagtgaacaggccctaccaaaggttggtagggtaacattaataagaatatgtataatttgttgccttacaaaaatttgataataccaaaattagtagggttaaaagtgacacaaaagtaaacaagcccttaccaatcaaaagcctagtcaattttccccaaaaaattagtaattaccattgtaaaaaagaaaaatggtaagatcacaaatggtaaagaaccatataagccctaattagagctaaagaatgcagctcaggaacatgtggcagtgatctcggcacaaggcatgtttcggagtaaaaacagattcttcaaaaaaataacttcatacagacagaaattcaacattttcagtctaaaaaataagaagatatttggagggagaaatgtcccttcaaacatttttttaagaaaaaattatgagcatgttaggatcaaacacaaaatcttggagttgaaattacataccccttaccgctccactgcactgtcaagtgcatctcagcattttagtctcacagagaaccttctgttgtgttctagactgagataattattttggttaatccaattaatcattatctcgagttacaacattttttctctctagagaaacatctccattttctcatcgtctcccggtttaactgcattattatatacttcctccgtttcttaatgtaaatcattctaccatttcacatttatattgatgttaatgaatctagacatatatatctatctagatttattaacatcaatataaatatgaaaaatgttaaaatgacttaccctataaaatggagggtgtaaaacggagagagaagctgttttctgcgcagcttgtttatgactcgcgcatattccttgtggacaattagtcattgaactaggacaagtctagaagtggaatcgtggaaagcttcgattaggtaaagaaaatgaatgtaggaacttcatctggaccaaatgccacatttgacatccaagttaagattccccatgttgtctcatgcgcgctcgcaagcctctcctttgcatgtcgccgtgtcttcagcggtcaagccgccttcatcgatcctctatttgcacgttgtgcagtactgaattatactataattctgattcagtacaggtgaagagtttttttaaaaaaaaactgaaaacagcactagagtgtcttttcattgaatagggcgtacaggtgaagagttagaagagtgctttggcagcacctccagc

SEQ ID NO: 22464 - DNA, 20006 bp, Oryza sativa
  unsure (1)..(20006): unsure at all n locations
attcctgcagcccaataataattctaaaaaattttgaataagacgaatgatcaaatattgacaaacataaactcgttttatttgaaaaattagtgcaaatataaaaaaaaataagtcatatgtaaagtaattttgataataaagcaaatgacaaacaaaataaataataattccaaaaaaaattgaataagacgaatgattaaacattgacaaacaaaaactcattttatttgaaaaattagtgtaaatataaaaaaagataagtcatatgtaaagtacttttgataataaagcaaatgacaaacaaaataaataataattccaaaaaaatttgaataagacgaatgatcaaacattgacaaacaaaaacttaaaaaactcaaaaaagcaagtaatataggacggaggtagtacaatgttttagggttttccgtgtagacatctgtggacaagtgccgacagccatgaaaacgccaggccacatatggaagaagtgaattttattttgttatcactccatacagtggaaagtatattgacatttcagctcatttaatccacgagtcttgccatccctctcctgtggcttatgcataactatttttatttcgattcgtcatagccggtgaaaggtacacagatcactcagcagcttttcctttcctgcgattgctaccacctgcagaggctccggtgcctcccatctccacaaggtagtagatcattgagtcgacgtcctcgccaaatatgctataggcttccatgacctggatgtagttgaagcccattgccaggaggagctgcatgctgcgggttagcacggtgtccgggagaacgaagcactcctcgccaactctatcggcagtcccagctgaccgagaagacccactaactgcagaataggaaatcatgatggtttcagcaaacctatcaaagtttctgtatgtggtctaccaggtagtccaatgccaagaatggtgggcttactcgcagcagaagaagatggctctgcccctgatgttgatgactctctgaagttaagttgttgttgctgctgctttagatactctgctcgtgaggcctccatcaccatccgctctatttccttctctgtcaactccaaatcagagtatagtcgtccttcagccagaagtgcctgatgttgccggcaagaaaagaattaagtatatttcggtttatactctaacaattcaaggtaaacctgattaatttgtgcagatgttgagatggcaagtaccccttgaaaacaattaccagtacttacattctcaatctgctgatcttgctgtgcttttattgcaaccttcacctgatccctgtcaacgttatttgtctgtacagaaaggaaatgaagttcatttattaacaaagaataccagttggcaaacactcaactgtagaataggctataagggcaatgataaccatggaccaagacatacccctctaagggaactaaatcccaggcctgcccctactgtcagcccacgaggatcaaccaccgaattgtaatgattaccatgatggtaacttagcctaattggagggacatctgtattgtagcttccttgaaaaatgttaatgggctctgcagtaagagcaaacaatatgagactatgaaagagtttatgcaactacagagaagggttaaaatcctatagcaacatatgtgttacagttacctgtactataggaatatatgtgaatcggacgattgtacatctcagcaaatgcctggatctccatattgttcccatataccttgagaatcaagcatgtcaacataaattatttgcagtggaagaaggtaaggttctaaatttttccttgtcctaagtcctaattttattttgaagttgaaaaacaagcgctcagtatctacatgatagcattatttttaataaaaaaaagaaattctgaaagtcagggaaaatgcacagctgttgtgtggaagcataaatggttaaaaaaattaaatgcagacgttcattaagatctgcaaaacaagattcaaacagctgaaaaacatgctttccaggggcgcacatgctctatagtagattaaaataaaagacaagtcagctgactgaaaaacattagtttcataacattttcaaaaaaaaaatacgaggatgttcacaagcacagcacaacggttcgaagacactcagtgtaaggaaaagcagcaagcagttggaatatatcctaaacagccaggatctattgaatagcataccttatctcttctttttctcctacaatatgatgtaaaaccttccgtcatgaactgcgagaaatgatcacgttccctttcctggaagaattgataacaataatgagcatatcagccacttggtcaaaggggaagtcactgttacctcatagtctaaaatagatcaggtattcaggtttcaggaaactggggattacttcgggctttcgaggcaatatattccagaatacagaatgcccctttcaggaacagtgatttattgtggatgagatgtgtatacaatcaaaatcacatcagaaatttgaattatactccttgttctatgcacatggtgctaatgtgtcaagtaactcagacgacagggagtaattacgatttcaatgcatgcctaataccatgctgcaaactcaaattggtatgttcttccaaatgctttcaacttcttaaagaaaactcccaaatgcgtgaaatatacagaaaaagacactagaaaagcaatgtcctggtgattgcatagtagacaggagatgcattaaaaaaaatacagaaaccaaaacagaacactaggaaagaaaaaggtcctgctggcataaagacaggagcatccctcaaaacttctctctttttttccatgtgaaactgtgaaagtagatgactgggcaaaagacggtgaagaaaatcatgctgcaaacaaatagatccttgccaagaagtttatcagttcaacgataaacgatacagttgagtctggacttgaacttgaatcaaatgcttcattaacaatgaactaggcatggcttcacatttgttgcacacgatataattgtttaatatgtcatttcacaaaatatgtaagtcaaaaggtagaacagacagcacttttcccttggtaagttcattattaaattttaattcctgtataactagctgagtgctacctctaaggaaacagaacagcagaaaccaatatctaccctgaccagcaaaggagaagcaagttgcaactatgtttcaaccctaactaacagtagacgaaactgcaggctgtctcaaactagtaatgttccaccatctacccatattgcttccccaaacttatccaagatcttacagagccaataacttagtataaaatagtgagataaattatgcgacagggtagagaatgagaaatattaaccaaatattaatgttggcttatgaattgaacctagggacggaatacatataatatacggtgttactactcagatgcaacgacacaacataccatataatcaacacgcatctgcctagccctgccaatagtgaacaaataaggggcaaggttgaatgcaacagattaacatgttagaacactgcctccaagcttgtgaatctagtttatggattaatggcaaaggatatagatgtaacaataaacataccatgtaatcaacacacatctgcctagccatgtcataagcttctggatcaccataaacttgatctgcaactgctctaaacagacaattcccatcttcagccatcttattgatttcaaatcctctcactcgtcttaggtcatgttcaaacatgcgctccctttcctgaggaaatataaactacattagttgttgtcaaaaacaaaaaggtgcctgtttgcgaatgtgacaaacctaccattaacgataaaaggaataatgttattgtatcatgcaactacaaaggatccaaacttccaaaggatctatgacattatctccacatcctagacatcatcttcatgccatgcaatcattgacaaatggcaaagctgatataggaaatacgatattaaagttttcatataaaatagaagcagacaagagatcataccgaatcataataattagaggcgtaacaggggccctgctcatctgcactattatacccttcactatcagcaagtgatctaggtgaagaaggtcgggaacccgaagcagatgaccgaactgccactggtggccaagcaactggccttcttgaagatccaatccgtgcattgtttgagcttccagaccccattctccttaacccattattaccagacgatggtttcggtggtggggctggtggagctggtggaggtggtgggtgtgatgctgcaccagcaatctgtgatggaccaatacctgactgcactagattttcctgctcaaactgatcagaaaactggaggcctgttaattcctccaccaagaaagcaggatcgatcacactggagtcgtctttgggaggtttctccataacagccctctcctctgcagagcttgaactctctgatgtgggatcatctagccccaatggcttattactattactgctgttatcagcatcctccactagatggtcagttatattgtctgaagccgtgagctccgatggatgctgatgaggctgcggcggcagctcctcctcccgggcaaccgctgatgtcgcctgcagttgctgctgctgctgcagtgtctgtgaccccgagcggctggagctggacgaggagccggcagccccgcgctgcacgaagatcctcgtcatctcccactctcctcagagaaggctccacgtctacgcaccagcaaccctcctcgaatcagagggccacgagcgcgcccttatcgcgcgtgcggaccttgggggcggtgaatctggcgcctcctccgccgccgctgccaagggagctgctcctctcgtcgtcgccggcagccaatctgagcattccactgccaattctcatcagaaccagggcgacaccagtccctcctcgcactcggatcacaaaaccctagctccccgcgagatcgagacgcgcaggctagtccccttcggagagggcggcgagccacccttcccaaaaccctaaatcgcccgccaacccgatcgattcagcagaaaacaacaccgatttctctcccaggctctctctctctcgagggggtcgagcggattacctcgtcttgggggaatcgactggtaggcgcccttcgattcagcgagcgatgggggggcgcacgggttcggggccgacgcggcgatggggagattggagctagggtttatgtccaaatcgaaatcaacaaaaaattttggcttcgccgcgtgaattttttttctctcgctgttgttttggggattctgcttcgggtggatggagagagagagagaaagcagctgtatggtgaggtgaggtatcggaagaggacgaagacgatggagatggaagaaggggcgaagagaggttgggtgtgcaaaactttttatacgtggagggggagcgctaccaggcgatgacaagtggggcccacatggcagcgtccgttgggatggacggtacgtcgcgatgctgttggttttgcgtcgatggaaatccagtggcccgcgtttgtggcatttgcacgggatggttcgtcagctattgtctcgcagtttcatggcagtgattaattccagagaataatcggcgaagcttctttaatatttcttataaacacgaaacaaatgcagacgttcataatatgcgtacactcatagttataaaaacacaaacacatcttacccctatagaaacctctagaatattagactatcatatcttgattaattggcatgtgggataattgatttttttttgcaccggtcagaccggggggaccagggcatgtataccagtcagataggagtgatgatgaataatgttatcaagtgatgaacatggacatgtctgatggttgcggttagaccggctagggtaggccgatcagaccggagtatggcgagcggttgtaggataaggaggctgactagaggggggtgaataggcggtttttcaaacttttggctaaaaccgagtttcgtatgtggaagcgtaaatcaaaatggttttgcacaattcaaaacctaaatcaactagtctcaagtaaatgcacaaagaaactagcctatgttgaggtttgcaagcttagggtgataatagcacaaataaactctagtatgtaaacttgctcaaagtaaatttgcacaaaataaaggagacaagagacaaggaattttcaccgaggttcggaaacttgccggtttcctaatccccgttgaggcgagcccaactccaccgctcaaccacgaagccatcgcacgcccccttcgtcaaagggggcaaggcgggagccggcccacggagaggactaccaaagcctcgatcactagggtagttcttccttcactccgaaggtggtgaactccaaaccactcacaactggcgccaggcctcctccacaatctcctcggagaggtcaccgggcaacacctccacaagccgtctaggaggcggcaacctccaagagtaacaagtctaggatgcttgccgcggatgatcaagtaccacactagctataacaatgaaacaatgcacttggattggcttaactcactctctaacacctcactagataaactaagtgcccaagggtgtgagagctcttgcaagggttcaagataatgtaatggagtgccaaaacctcgcccttgctgctggggagtgggtatatatacccccaaccaccaaaactagccgttggaaccgaaatccccaactctgtgctccgccgatcagaccgctgttgtgaggccggtcagaccggactactttgtaacggctagaaaactagccgttacagggcaatcattgagcccactcaacttggtcggtctgaccgcagtgtagaggccggtcagaccgtccacggctcggtcagaccgtcatcggctcggactgaccggttgcggctctggtggctctgtatcgccaccataaaccagaccagtgcaacagaccattgaagccggtcagaccggccttatcacgccggtcagaccggctaacaggcctggtcaaaccgtcctaaggcccacggtcagaccgcaggtcacttttcagcacaaccaaccgttagtaaaacggcgatatttcttgacacgggtctcggaatttggcgttcttggactctatggaaagcttattcaaagggctatccaacccatgaacaatccatccaagaaacacaacttttctcagggaaaaagggctcacactccaaaggatactccaccggacataaccacatgaggctacccaaacctataggatttgcccacatctctctttgtttaggacttgagaatactcaccacacttggctagacaagcccaccaaatgcacctacatgcatatgaactaatatggcgcaagatcatccacattctcgcttcatagacccctcttgatagtacggcgtctatctagcaaatccggtctacaccaaacaccaagaccgggaaaagactaagaaaacattcttagctccattatacctttgccttgcgccatccaacttggggttaatgcttgagccaagatcaacacttgtgaccatccagttgaaccatatttatgccgaggtctttaccatcctttgtcaagactttattctcatcacaagtttgacttcattcttgccaacatgacgatgtccttggcttggtgaccattaacccatggtgtcattcattagcctcattgtagtgggacctattccttttcacatctcaaaggagaacattagtctcaacaaatcggttgtcatccttcacttgatgaccaaccggttgcatatgaaagatatagatatgttcgttgagttttcattaacatcacaagtgtcatatactcgtatgcaagctcaagtgcaaagatccgatataaataataggtgaacaacatggatctagaacatgcacaataaatgtataggatttgctccccctaaatatatgcatacaaataaatacaagagatgcaagtgtatgcataattagagaatgaccaattggggtttatcctatacacataaagagaaggcatatgtagtaataatgtagaccaacataaaacatataccttcatgatctccatgttctcaatgtaaatgagactaaataagataagactcaagtaaacattagtctcacacttatatatcaataacatggaaatcatatatatgaacctatcaaaaagtaggagataagaagtggtacatatcattttatctccatgcatttcatccttgtcatgattaaggtccatcacaaaagaatgcatgtcttccacatctcattatcgggaaatgacctagtagacaacttatgcaaaagagaggttaatcccataaacatcggtttatcatctatcaccaacgtaacaattatacgaattgtttaatccaagatcattcaatcttttctctctttggtgatggataataacccgatataaacaaatagagagatgagatgaaagatgttttcaaatcaagatagaaatcttataataaacaaaatatagaataagctccccctcaagtgtacatacatatggatataaaggaacacatacgcacataatcaatcaggatcaatgagagagctcacactatattttggatccacaagagagaccaagttagaatatgtgaagtttaatacatacctcccatcatttttactttcatatccaaataagactagtcaaagaaaggctcataaaaacgttagtctcatataattagatttgtcattaatcaccgaaaccaaattaaggcacttgaacttacagcggtcagaccggccagtctgcggtggcgcggtctgaccggccgacgttttgtcggtttcagtttcgggttatttatttgggtatttgtggataattattgtttatgaattctagatggatattatgtgtgtgctaccatgagtcaagttggtgagaacttgtgatcgaatatggtttcttagttgatgcatgtgtaggtgaatcttgatgcctcgggagggtagtgtcgatgatggatccaaagtcaactcaggagaagatgacgtcaggaagatcaggatatcatgcgggatgcttagactaaagatcaatgcacgtggttggtgaagattttatatggtatatgatagagatattgtgtgcgtaatggatgcagggtcgaaattggagggagtctatatttggtacagttggagtttgtaaggttcgtttttttgtatgggaaggttttctaggggattaggacttcttgtacaacgttgattcgtggttttaggttgcttacctcggatataaatagagagggtaggtgtagccttccgatatcgattttgagagagttgagtttagagaaaagttagggtttcgagtttagtcgagattttcgtaagaagtgttgttattgttgtactttgtaaacacagagaagtaataaagcttcaatctacattgagagatcttcgatttatgtttggtcgggttcgacagtccaaccgacgagtcatcggcggatagactgatggcatcagcgcggtcagaatggcaaatacgcgacggtcagaccggcggcggcgacaggctacagcggcgcatagggcggtcagaccgaagcgactacacctgccatactggaggtcatcgagcggtcagaccagcgcatctactccgatcagacagatcaccatcaaatttgagcataacttttaattccactaaaagttcacccttttaattggcttagttcttgttgttcgatcctacgctgataaacaagagaaatagatcaatatattgagtgaaaacaaataaaatagtttattggaacaaataaaattaaagaggataaaggatcaaaatacctcttattaatagcacattagtattggtggattggtaggtaaggggcattaaagaaataaaaattttcgatttgttaaccaagggtggataagaagataaaaattaatttatttagagtaaattacactttggactaccttttctaaccaatgtttcagtttggactagggataagatgatattttcactttaggctagataagtttgcaaaaggtttcaccttcaacccccttcttacctctccaaactccaggctctagctcgctctcttgtcgaccttatgtgactgtgagcatggacatgttgaggtcaagcttgaactttccgaagggcggtatcaatacggcaacccgaaagctcgttatcaaagtggtctcttccgctgtcagatcaaaacgggtagggatcggcccagcctagaacaactcgcttctcataaaaacgaatccctttgtgcctggaagaatgttgaagtctagagagcggaagatatttaagtaaggatgttatgccaggtagcattcggtacaagagtgagacggaggtagctcgagcctagcggattctccccgttacctggacctgcctcccccgcggtcaaaactctcctctccagcccctctggctgggccagaagcctcgtctcctttaactgaggactgactgcgcggagacgattgagcgtgggtccctaacgattttattttaggagtgaagccttggcaagccccaacgcttgaactttaagcaattcagcaagccccaatgcccgtggagatcatcaaccttgagcttggccgtggcccctgtacagtcgtcgtgatgatggtcaagctcaccaagctagagcttgggacaaaacgggacgaatcaaagctctcgaatggcagataaaggatgaaaacaatgagcagcgctcaagggccacgggccacggcagcgaagcagctcctggcccccatgttggaactgctcgaggactgtggcagccagtggcactccattgccatagcagcgagagttgcacgatgatggttgcgcaggagctgctcgaggatagtggctgcattccaaggcaacggtaggcggcacttcagaaggctatgcttgagtttggctagttcatcaacttgagaagaaagaggagagaagatagaaaagaagatccaaattgaaataatttgcaaagttatctagtccaatgtgaaaatgatgtcttgtccctagcccaaattgcatctttggtaaaaagaggtggcccaaagtacagtttactcatttatttaagaacaaagtttaaatttcaaaaattaatttattttaggagggatgggagtacccgcgttggcttcacaaatagccataccccgacgattctgggcatgtcgctttgcttcgtccgcagcgggggcagaacggtcacttccgcctggacaccctttcccaagggaatctgcacacgattgcacgaggcccctgcagccggtctgcgcatggaatgaccacccaacacaaaagtcgtccgattgcacgttctctcgctcttgtcctgttgcacaactgttgagatttttcacagtttcactttcacaggtcacaccgtcacagctactgtaactgcttacgcatcgctcggaccagcagcacaaaaaagttaaaacaatggagcgagcgagagaggtgatttcaaaatggggtaccgtccaggagggaagtaaaagctttttgataaagcaagaattcacatatgctgcaacctaacgtggcgtccacagtgtgcagtgctacaaaattgagcgaatatgcatgtctccgtaggctttatggaagaaaaaagaccaatagcagtgccagttggtgataacacagtcacagcccacaatgtctgatgtcagacgactccgtccaatgatctccgctttgcaaaaatgcaaatttcaactcgctgttttcaacacaacaacaagggtgtgctcggcaccctttttcccaactcatctctctcgtttttcatgcacacgctttttaaactattaaacggtgtatttttttaaaaaaaattctatatacaagttgcttaaaaatcatattaatccattttttaaaaaaataataaatatttaattaatcgtgtgctaatgaactgctctgtttttcgtgttactgttccggatttggaacaagcatatgcgaacacaccctaagtgcaccaatgagcttgtcaagactaaaacaacctgttccagtaaaaaaaacagactaaaacacctgttgattttctttttgaaagggtaaaacctcttcctgcagtctgtggctgctcaaaaattcctgtggtacgacacaaaaaggttgtatttcatagatataatgcaaataagcggtgacgtactgacgtcctaccacgaaaacaatatgcaactggacaaaactgtatggtcttgggcaaaactgtaccgaaatggcattcttcttcctctacgttggttgccattaccccactgtccatccacgctctgcaagcacttcacgaacccgtgccgccacatcaatggcatcgttcaggggagggtagctccagttgtctgacatctatggagaaaaaagaagggtgataattcgtccctaagataattatatcttcatattgagtattttcaaaactttcatcacggtgaaacagatggataattatcttaattacattgaatgacctcctttggtcattccggcgaaaaaagaaacagatggataacagaaacgattgcatcagaaaagactcaacatcgcctactcgggaaaatgaagcacgtgtgggagggggcaattgaaataaccaggactgtataaaacctcaattgatccactatacgtgaatatttagcgaacttacatcttctagtccagtgaaagggcggacagcacctctttcatgcagcctgttgtgaaaatccgagaatttccacctgcagtgctcagttccaacaacataaacaggtttcctgtaaatagaaatgttaggaaggtcggttatacaaataaaaaaaatagtgaaaagatacagatgaataatataagctcacccagtgctacatgcctcacttagcatactaattgagtctgctgttatgacaaaagcatcagcccatgcaagatgcccaaggtgtgggttgggtcctgcatcaagaaaactggctgagaaaactttcgtagagcacataaagatgagtacatcagacatgtctcattttaggcttttgacaactaccttcaccattccaaatataaaccttagggtgtgtactgaactctttcaatataagatcagacacctgccaacaaatgatttagaaatttaagtactggcacctactaagaaaaaatggacaattcaaggtcctaccttatgtggtgttcttctggaaaatgaaaccctgacacttccacaggtcttcagaacattgtgtagtgagcttatcaacttcttggcaaggcctacatcgtaattacagtttcctggccattgaaaatatcacatgtgttaaatctatataaccatgaaagcagaaaaggctcagcatatgagttcaaagttcaaaaaaagtctcaaaaaactaaaatatgtgaaggaataacctttttttctgaacatcaagttgaaaattctgaacaagacaaaaaaaacttgaataaacaaaaaagcatatgaaatgcaagggtttgcatggatgagaacacagaaggtgtgagactgatttctttcttctgctcccaagcattcaatcaatatatgcaagctaaaatgtatataacagcaatatctcatgctacgtcaaaattttgaaagagggattagaagaaaggtttgtgagaaaactgcagcttctccattttagtttggaagctttagctccataacacaaactaaaagaaaataaacattttttagcttgacatgttcatgtaaatgtttgtatttgacaccttttgcattagcaatgctacaagtcaatagagaaagagatatcaaaattccttgttacaactaacagacacaagcagatccatttgacgctgccattgttctcatgtccaatgaacagtaagaactaacttatgtaaaattgcatatatcaggaagctcatatcacataggtaggctgcaggcaagcagacaggaagggagggagagaggatggatttacttgttggtcctccaatgttcactacaaccaatggctttggtgagttagcaagttcatcatgccaatcagaagcagcagtgcgtaatgcagcagaatctgcttggtgaagtgcgccaacagtaaggacctggctttccaattttcagggttcagaattgagacagttgctacgctatgaacacatacaagagattgttgcttgcagaaaagaaaacacatatcacatttggcccaggtggttctcgtgcagtaatccatctccagagaaggtgagggaattcccgttgtcctcttgtagtcaaagcatagtaatcatgacgaggagttaccaccaaatcaaacctatcaaggcgatacctgggatgttgtatctgaaatgcaacaaatacgatgtaaagctaatatccacatgacaaagtggataatgattcataacccaagttgaataacaagtaaccaaacaagtaagtgatgcattccttacagaattctacctgtatgacaaagacattatctggagccaaacaccttattgaacttgcatatgatatggtatctcgtccacaagcgacaactagtgccaggccttctctgaagaaacacaaaatttgaggaagcagtgcagggtaaatagtatgtcaagaaatttcgataacttagaaatcatagacaatgtttaggctgctctacaattgcatagcaatattcattggatagaagtccagagctatgttctaagaagatgcctatttcacatccaagaaaaacacttatttcccatgttcttactagaattatgtcatcaacattcaaggataccacatctacaatccatggtaatgatatcaacagaacatattcttaaaatctttcaggggcaacatgtgctcagaatgaaaatgttcagttctgttttattccagagctgccaagctaccaagcatataacagggattatggcgactaaactatgggcaagctatataaaagagatcatcatcacagaagttgtggaatggacttcaagcttaatatgaaatagtgcacaaacagcacagcaccaatataagcgatgggatcttacttctcaaaggtatcattgaccatggtaactatccttttggtatctgcttctaggacagaagataatccaagggactggccattacagacagtatattgagccatttttgccccttgaaatagtgttgcaaatttgttactagaaaacatctgtctgagtacttggtccactaacttatgcaaggagatcgggaggaagtgcagccacttgttgattcctcctgttggccttatagcacgctgcaagaccagaaacaagttcacaaagtaaagctaaggttccgtaagaactaaaaaactgccttacgaacagaggttagcggcatagttatctgaatttataaataaataatgtctaccctccatttgaacaggttatgaataaaaggatttatatggtttctaccacaacaatgtactacttgctagttgctgcaacctccacaaatgcagtgaatgcaaataacaaattacaggacaacaattaattggtagtctggtactgcatctagcaatcataaaagttgataagccatttcagagtaaacttgagattggagtttaaattgcacacgcccctcatctgcagcacatggcaaagcaaaaccactttagcatattgaattattgaagcaattcataaagataacaccaatacataccgaataggcgaatacatgccaacagaaattataggattgatttcccattctctgccactatcaaatgcagagttgtagacttgacccatggtaattaggcacagatcatggtaagtggtactaacaattaacaaacagccccaaatcctagaggcacatctcttactttacttactgggtaaaaagcaaatccaatgttgcatcagaaatataaaggacaatcactagttaatcattaagtcctacgcaaactgccacctgacatcagtaacacaggatccactaatgcagttgcggactaaacacaaacaatcaaattcgcagctccagtgaccaacgattttatgaccctgtcaccaaaagttggcgggaaaaatgatcaggggaggcagggtttacgtaaagcgtgaggcggtcggctaggccgagggcacggagaaggccgaggcactggttctcggcgcccgcgcagccgttcccgatgacgacggcgcgccgcacggagccgcgggcccctgtgccgcccgcgaagatntcnggngcgncngccggnccgcccccgcccccgcccagcggctccatcggccgcgtcgcccaaaatgggaggaggtggaggagaggaggcagctatggcgccgcgcttgcttgggttttgggaactctgcaggcgggaggcggacggatcagcgaggaggagcggggcgcgcagccatgtgaatcggcgcgagccagtcttgcgaaacaagtttgcttttgcattactttttttttctctctctctttttcccacctcctcgatcttctcactccactcgacgactctcgagcgttgcccggcgggagggcggagcggaggagacggggagtcgggggagcggaggcggccgccgccgccgtggggagtgaggtgggctcggtggtgggccgatcttgtgttagatttcctaaccaggccggcccattatgaggtgcaaagccactgatttgagccttggattcagttagctctgaatcgagagcttttggtgatgttaatttcacgcttcaattgcgcttgtggctaaatgagatgtgatcaaatgtcgaccgatgtttagacttgaagcactaggaaaatgattagttgaagaggagaggtcgatgcatcgccttctgacgtgactagcaggagccgagatggaaatcgagtcacatcgataggtagccatgcatctggcagttcttcagtactagtaggcattagctctgggcaaggttgcattatttatcctagaaagcagcttagcaacaaagaggtgtaatatgaaactatgaactgccattgcttcaggtagatatcgatagaattcttgtggtgagcggcgaaagaaaatgtgtgatgcagtgcagttagttctcattgaatggagcaaccagacagtaaattcatgcccagcagcagcccggcacagccccacagacagaatggcacgcagcaaggcgttgcaaattcaattggttcaattgggttttatccatttgatccttgaattggcacgctgaatagagtccagctattgactaaagcaccgcacccacaaatcagcaattgacaaggggaaaagaagggcgcaaaggaataaagcaaaatctagccagaaaagagcaacagaaccaactttccccaacggaggagcactgaaagtggatgaagtgattcacagtcgaaacctaaccaaattgcctgaaaactatatctgataaagacataaagcatcaggcctagcacccatatcctttcttttgctttactgttgaacgtcaacaagcaaaaacaaggattgctcaacagaattcatgactgtcgggtacaagataatcactgcacaacatattatttcagtataacgatcagtcagattcacatttgctcaaatatcattgtctgtcaataaactattatggattttgcaaaacaatagaaaatctgagatgcaatgcatgtactccatgatccgaggaacagaaaatctgaaattcaatgtactccatgtagtccatggtcggagggacttcgtagtagcttcattctactgtagcattatcaacagcagccataggccttaatctgccactaaaagagactagagtagaggacactaaaaacgctaaggtaagtaggactataactaatacacattaggcgttgaagaagacacaaggaaaacaacattaaatgatccaatcgagttgttagtatttatcccttttgttcaataagacaaagtggttgccatcatagcaccaaaattactaaaaactaaatataactaccactaccagtcaatgcttcattaaagaaatctaccagtcatggtgaacacccaaattctagtatgcctaccgaggatgttacaacattcaagcatagaggagtactaagataagttcagaaaacagattcaagcaccaacaaacaacagaaattcttacatggaacaacagaaacaataatgctttggaatgaaggatgaagttgaatggccggatgaacatgctgcactgctattcagatggcatcatcgaaagccacatataattatattggacatatgaatcgtattggtggggtatcatacattgaccaagagaaatatgcaactatccaggaaacagtggtaaaaaataatgaatgagtgaatcatgcatatcataatgcacatcagacgcaagccaaaaataaaatacacttgtgcatcagaaattgtataattgggatatgaagtcatgaagacatcaataaaaaagaacaaaattttctaagagataacaaccataggtctcagacaattatcaagatagatacacctaacaggttaacaaccttaaacaaaattgctcctcctgaattacagagagctcccaaacgcaggacaccagttctcattactgttgaaactcacagtaatatcacactcacatacacacgcacgcacacacctccaagggcaccaaaattgcaagcagttgcattaaaaaaaaaccaactcaatttgttgccttaccatctggttttacttctcgatctacaccaataacccactagaattataccctaaaatgtaaccgatctacgacactgagcatgcggacctgaacaaaaagccagagccacatcacctttgcggaattcagtcgaggaaaccggtttgccggagcacggcgtcgcgcacccgccgcaggtcacggcctttgagcgtgcgaccggcgccctcgagcatggagaacggggcggccgggccggccccgccggcggacgcgcgcgcgaccatctcgtgcgggggcagcatggcggcgtcgccgttccggaggaagtcgtcgtcgtcgagctcgtcccacttgaacatctcctgcctccggggcgggcggacgggcaccttcaccggagccgactggtggtacggcgccgctggcccggcgctcttcggcctcggggtcatcgggatggcccgggcggcagaggtcggggactgggttggcgacaacgagccgccgccgccggacgccgaggcggcggcggccgcgatggtcgccttgcgacggagcagcgtccccgcggaagccgcggcggcagcggccgcgccccctcctcccccaccgccacggcggagcaggagcctcttgtccccctcgtgcaacgcggcgaggagcccgacctgcccctgcggcacccggctcgggctcccgggcccctcccccggccgcgcgctcgagggcggcgcggcgggggaggacgagaacaggaagtcgtcctcatggagctcatcccctgccacgaacgacggctccgtcggggacgacgacggcgacgcgaacatcccgatgaaccgctcgctcgccggcgaccgtcgcggcctgtactcgtccatggtcagtcacaacggcggcgcatgcagccaggggccaggcgtagcctctcctccctcgtccgcgcagcaggagcgcgcgacgtggtgtgggggggaaggaggcgagatgaaagagaaggaggggc

SEQ ID NO: 22465 - DNA, 8081 bp, Oryza sativa
gggggggcggttgaatcggtcaggtggacgccccactggatactgttcattctgggtggggttggatcaggttttccgctgcgtgtgtgtatcgtgtaattcgaattcggcgtgctcgtgctggacctggacgtgaggggtcgggtcagttcggatgggtttgagcggcgaaggcgcggcagcgccggtgcgtacgagttgagccgagttcaactctggtggttgtttatagcatgttatccgtcccacaaaaaaccaatttagataaatataagatactaagagagtactccagactctagtacactagtacgagcggaggtataggataagtgattgctaaatttagagatatggataatgcatgtacaccagagccgatggatggaagatgcaagggaccgggttaattgccacagtgttaagataaggattatccagttagaatgtatctctgtgaatgccatgacttataattttaagtctagatcaagcataccatcacggtcatatttcaagtgtatatcatctagcccacacacataacaactactactcctacatgatatccgatttgatctaatacatgggggatgattggaagacaagatccgttgctttgatattggtagttttatttttcttttttatttttataaacttattctaaaatttagaaagtgtgatgttactgttggaccatattatcgcactatagcaagaatgacgtgataggagtgaccatgcagttggatagagttggtggagcggccctctagcctaatgataacccaatgatagaattaaagatatagataacaacatgagtcatgcaaccgaagactagccgttttggagtttatagatagatgagaacaatccaatgcaacttgctataaagttaggagtaatgtcataatggtatacgtccactcacaataattttttcgcataaaaataaaaggagaacaatgagataatcaacttaaaatggctttagagtaagggttccaaaatgctaaaataatcgctaggttatcagcctttatccaaacgaacatgtttagaaaacatactggccaagttctaaaacacaaactaaattttaatttttggtataatttaatcatttttacccctttttttggtaaccactcgattattgtagttttctagtgttgattgtattttgaaactgaacactgctatacgtattaaaattttcttacaaaactcttactaacaaatttttcaactgtttgatttaactagatgaaagtttaaaaaaaatctagatttacttatagcttgccacattagactttgtaaacattttgtaagaaaatttagtacgtatagacttttcctttgaaacctgctcctgtgtatcaactatcaaaccccaaattacaacctagagaattctaagatgctccatttgaagtggttaatcgtattgtgcatttcgtggtagcgtactagcatttgatttcaaaataggaatccaccctcaaacacattacagatctttgctcccttcgtcattcacattttggaatccaagcgtgttgtcaagcttcgttgttagtggctcatgacggctcttcgccggaatgcagcctcaaatcaagcaagagagcgggttgagcagggctagaccttattcgttagatctccaagtccatttggtgcctgcctcttgtttttttagtgcgatggcgttgttgtgagcgatcctggcgccagtgctcgatgatcatcaggagattaaagcaagggcatgttaatgtgatgaagtgatatttctgactttctgtggtggttaataattccccccattctgactccaagcgaagacacgtacccgaacagaaactgatcagactcggcttggatcaaagttccagtttttaacatactccaattaattttagaaagtgtgatatcgatgttgctgttggaccatattatctcactatagcaagaatgacgtgataggagtgatagaagtagccggttaccatgcagttggatagagttggtggagcggccctcaagcctaatgataacccagtgatagaatgagagatatagataacaacatgagtcatgcaactgaagactagccgttttggagtttatagatagatgatatgagaacaatccaatgcaacttgctataaagttagaagtagcatcataatggtatacgtccactcacattaattttttgcgtaaaaataaaatgagaacaacaagataatcaacttaaaatggttttagagtaagggttccaaaatgctaaataatcgctaggttatcaacctttatccaaacgaacatgtttagaaaccataccggcccatactggctaagttctaaaacacggtctgaaatttaaattttggtataatttattttttttacccgttttgttggtaaccactcgattattatagttttctagtgttgattaattgtattttgaaaccgagcactgttatatgtattaaaattttcttacaaaactcttactaacaaatttctctaccgtttgatttaactagatggaagttaaaaaaaaatctagatttacttatatcttgccacattagagtttgtaaatattttgtaagaaaatttagtatgtatagacttttcctttgaaacctactcttctgtatcaactatcaaaaaccccaaattacaacctagagaattataatatgctccatttggagtggttaattgtattgggaatttcgtggtagcgtactagcatttgacttcaaaataggaatccaccctcaaacacattacagatctttgctcccttcgtcaatcacatcttggaatccaagcgtgttgtcaagcttcgtcgtcgttagtggctcatgacagctcttcgtcggaatgcaacctcaaatcaagcaagagagtgggttgagcagggtgcgctagaccttattcgttagatctccaggtccatttggtgcctgcctcttgttttttttagtgcgatggcgttgttgtgagtgatcctggcgccggtgctcgatgatcatcaggagattaaagcaagggcatgttaatgtgacgaagtgagaggcctgttcagattgtaagcaaaataaaccttatgaagttttgacaagatagaaatattattaaaattttgataggattttttttatgtatttaccaaatttggcaacaaactaaatgtagacaatttttttagcaacttagcttaagaaaaaggtatggttaaaaatggtattaaaatgaacagacccgatacttctgactttgtgtggtgcttaataatttccccttttctgactccaagcgaagaaacgtacccgaacagaaactgatcaaactcagagtggcttggatcaaagttccagtttttaacatacactccaattaaacggatcaaactcaaaccaaacgtacgatcagcctagagataaaccggttgtgggacaatcatttcgactgggtggacatggcagattggcagtatggcactagctccgaggataacacattcatcagattcagaggaagcagaatctaatcctctcctccaagcctcgttcccttgtccggttgtcccccgcactcactccaccccccaccgccgcgcgctacgtcacgcttcgctgtctcgcgcggtccacccttttcccgacggcgacgtctcggtctctcagggccccggccggccgtcctctcctccgccgttggatcgggctccgacggcccccggcccccgcaccggcgccagcgccgcaagatgacggcgttttgcaggccgcatatgcaggcatgcagccgctgctgcgcagccacacgtggggtgttgttgttttagctgcggctgcggctgggcgcgacgaggttaatttgctgggtgtgcgtcctttttttgtactgacgtcttacctgacagcctccacgccctccattcgttgcgtaccgtagcgtagagacgtagtactagagtagcacagcagaaaaaaaaaaaacaaaacagcaacactcgctagtactacgtaggagtagtataacgtgcgctaaaaatgacacagtgaccttagtcgtaggcgtaaattaaacagcaccagtatagttacctattactacctccctacctcccttttatgttataaaactttctaacattgtctatattcatatagatgttaatgaatttagacacatacatatatctacattgattaattaacatatatatatatatatatatatgtatatatatgtatgtatacatatatgtgtgtgaatgtgagcaatactaaaaagttttataatatgaaacggaggaagtaccattcattacgtaggcttaaatttattttcttcagtggaagaaagaaaacgtgtattttccttagggaaatgtcaagaaatgttgctctgcctgtatatggtgagtgtacactatatgcattatttattctttatgattattcttgcacgtgatttttgtatgctcgaacgtactcaattcgtttcattaaaaaaactaatctagtatgggatgtgacacatcctactataaatctagatatatcattgtactaggatgtatcacattcaatactaattttgtttttttttaacagagcgagtatgtatttcaaatcaaatgtcagacgtgtgttattttgcaaggtactcctacgtgattggcaacagcgacatacgattattctgtccaagcatgatttgtcaggtactagtattaattatacaagctaagccatgcctttgttgagttgcatcatgacaggtttgccaggtgtgggatcagaaagctggatgacaaaaaggcctttctcggctctcgcattcgcgttgtattcatgggccggtagataagccgtgaaagaaattgcgctgaaagatgcagagatacgcctcgcaccatttcctagctacaaaaatacgttctcagtacactgtttgttgctttttcttaacacataatctttctttaggattcgtctatctggtcgttagcagacatcggatgaattaggggataagtttatggatttatattttgcttgtgttgacagactgtatttagcatatttatatatgcgccaaaaatcctaggaggaactaggtatttttgtctggtcggaaaggtactcgagctaaattagatattggtttagggtttaattctgttatgtgctggaaatgtacacaggaggtgtgtccgtgtgtgtgataaagttatggttgcaagtcaccgtgtccaaacataagatacggagtatatagtgatacacaattttattgttgtgtttacgttgtgttctttgtgcgtgtggtaaaagcactactcgttgatgcgtgagtgtggtgtgtgtacgcgtcttttaattaagctagaaaagagattagtgcctcctgcgtttctagagtatataagttaacccctacaaaaatcatacgaggtcctataaaattcgtgtcctttttcagtaagctggaccgaatctgcccaaataaacatctgcatacatatacaggataacaatgtcgctgcagacgtagcaactcaaattgatatcttgagcttgatacgtccgtgaacgacaatcaccgaacacagaatctcaatgattgcaagtaggtaatcgaagctagctaatgcaccatacacggtctggattaaattgtgtaagctttccccgctaatctctgtttattttaacctgtcccaatcgtgtggagtatgtgctccatgtgctacctagactaaagaacgttggttttggattgattggagggaccattttaatttttgagccccagattaatgcggagaccagttgcaaagctgcggctgagtgcaaccgactgtagagacatcggtatcaaatggtaataacacaatgtcagttgttcagttggcatccataccccgctgcccattttattgcaaaaggggtagcttttcaccaagctaagaaataacgtaaagtactccgcatgagtgcatcgaatgaaaataccatttggtgtcacctgtggcaaattatgagtggtgcattagagtattatacacgaaaagtgaaaagataatgcagctgcgacagtttggccgagtggtctaaggcgccagatttaggctctggtccgtaagggcgtgggttcaaatcccacagctgtcaaattttttgttttactttctcttgtttttaaaggtgttgatttttttattctcactttatctcccattattttattttatactttctcttattgtttgtcaacgagtgttttttttcgcacttttttttatctcccgttgtgatcacacatttacacaattttgagccttaatattgctacgaaaggaaccttttgttttgtatatactgccttgttgatacactagttacttataggattaagatgcaccccttgtaatagtagtattgtctatatcataaataaattataccgacagaccttaaacttgtaagtaagtttcacctatatccacgaatttgcaaattacgtattgagatccctaaacttgatttattcttatatcatcctagtttaaatcctcttctgacctagtcttgctcacgtgagtgacatgccacttggaagataacatggcaaaatttttcccttttccttcccctttttcccccttcccttcttcttttctcttcttcccctccaccgctggatgcactagtggcaacggcagacgagagaaagatggtgccgaccaccggaaaaagagccgccgacgacagagttggctcgacgatggagcagaggttcaaggtcagaggtgacaacggtcaccgtgagctccccactctctcccttctctccacctcgagctccacttgatggcgattaagagctcctcctctgtcatgctcatggtgttgtccgtgattgatggaaggaagggggaagaggggaggaaggaaaatgtgctgacgagtggacctttagcaacttcttttttttactataatgcccgtaagcaccatatcgaataaatcccatgttaacgtgccacaaaaagtgtcatgtataattcaaaaaaaggcaatccaaaccatcaatgatgataacctggttggttttatatattagttgtggtagcctccattttgaattttgtgattttgtggttgacagatgcgaacaagacttggccatagggaggcaaattagactactatttgctttcttagttttagttaaaagccccttcctcccaatatgcggcccgcatgggaaatcctcacactcggcccaatagaacggccattatggccagtgcagcccacccgagggtttatatgcgtgcacgcactcggccattcacacctcctgccggtctcctccgaaccctagcctgcttctcctcctcctccccgccgccgccgccgcgagcacagacgacgcagccatggtaatgcatcccatttctgatctacgcttctccggcgtattgcctattcgaaggtctcgtttgctcaccgggaatgcgtgccgccgccgccgctgtttgtgcttggtgcagtccgggaggaagaagacgcgagagcccaaggaggagaacgtgacgctcggccccacggtccgcgagggcgagtacgtcttcggcgtcgcgcacatcttcgcgtcgttcaacgacaccttcatcgtgagatcccgagacctttgtttctgtttttgcgcctaatttatgttaaggcgtggtgtgttgtgctcgttgctatggcggtctcatacttgggtttcgtccttgcagcacgtgacggatctgtccggcagggagacgctcgtccgcatcaccggtaatttccctacttgagaacaatgcttattattgttaaagtttagtgtatttttgggccaatcgcattgtgaagtttattaatctactactatcgaatgagtgaattggaatggtgctgttgttgcatctaacagcggtaatataatacattgtagtagtcaatagaaatgtgtggctgttatgtatcgcggctgctggg

SEQ ID NO: 22466 - DNA, 14854 bp, Oryza sativa
tgttggagtaagcctcaggaagccttatttatactaagtcctaattgcccaattcaatttcgcatggattgggggggtcagcatcccagctgacatcgggttcaccaaggatcttcagtgctctcacagttttcagcaaagttggctgcaacctccatgtagactgtctagccacatctgttctttaatctgtttggttgttgactttattattttatttgttagcatggcccttaagatcgcctcccttttgttctgtgggagcgtgtcgagtcatagccatgcaagattaacaatgatggacctgagagtttttctctggaacttcttctcttcccgcttgttcgtcaggtgtttccattgtggcattgggtttcctgtggtgtttggttagtatggagcctctgctttctgcattgctcctgctgagtccttcattcttgcaactctttgccacttaaaaatggaggtttctacatgttggaagggaacatgtcatattattttacaactgcttctctttttgtttgaagattttttgtgtattagctgtgcaattttccataccttttagttgctatgaatttataattatggagttatgaatttataattatggagttatctgaagtttctcactggatgcagctcactgcccatttgttttagggtgttaatattttttaatcttcgttgggttttggcatgagaattcattggtcacaagtttttttttatcttagaaccacttgttatatcttgctaggattcataatgtaattagtttctttcagtaattgaggacggtgcatcaatattgaaccagttgtatatataacgtaatcgcgtttatgtttatagatgcctataaaattgtgattttatgcatttttatgatccatggttgtcttgccattttgtatgctctgagatcagtaagatgttgatgttctatataattcatggttcatcagaccatttgaaatcttattcaaactacgtgcaaatgctttgatccagttttttttaaaaggaatatcttgtagatctctgctgttatagttacaaaattgtattttgcaggtggcatgaaggtgaaagctgaccgtgatgagtcatccccttatgctgccatgcttgcatcccaggatgttgcacagagatgcaaggtacaaaaatacctactgaaacattaattgtctgctgtcagttgatacttactgttttgttgccctgtacaggagcttggaattactgctctgcacattaagctccgtgctactggtggaaacaagacaaaaactcctggtcctggtgctcaatctgcgcttagagctcttgcacgttctggcatgaagattggacgcattggtaatcttatagtccccattaatttccttgcaccattggcaccttggtggttatctagcatttgttattattaattgtgtttgactatttttgtggaaatttatcctagagttgctaacggactgcgcattgtaatgcatgggtttttttggttatactactgtttataattcaatttcttatactattgtttgacatacatagtatctagaatagaatggctgtacatttaatttagccttgtaactagtatggttgatgctgaacctgtgctagctttttgttgttgaaaagatggctttgtttaccttttatctactcgttatgctcagtgcttagctactcagtgttaatcagcctcctaagttatttttacaattattgtcaggttgaacttacaaccatttccctcacgatttctgtgaagaattaatcttatttctgttcttaatttgtgaaacagaggatgttactccagtcccaactgacagtacccgcagaaagggtggcagaagaggaaggaggctgtaattccgtgtagtgcctgttatggggggaaagcaaagctatctatccttgtccttgcaacttgttctgtactctattatgatcttagcatcggatgtggatttataaattttgagctatgttatgttctttagaagatgaatgacctccccctataaagccgattatctaaattttggttgctgttatcacaactaatgtttatcagattgtgttttgtgttgctgttgccgtgatatgacctgctgtccgtgttcccgtcgttaagtctatttttgtatatcttgaatccgttcttagctcaatttggttcaatcactaatcactaagttgctttgcagtcaccttcagaatattatcttctaatctgttttcgtagtcgacctgcatattttgatcaggagaatcggctgaatggttttgtatcgcctcaatttgtacgccatgttggctgaggcacagggttgaacagcagaatctgaagaactgtactacctccattttacaatttaagttattctagtatttcccacatttatacttgatgatgttaacatcaatatgaatatgggaaatgcaagattcattaacatcaatatgaatgtgataaatgcaagaatgacttacattgtgaaacggaggaagtatcttttttggaagcttcttttttttttctttttgttgctacgcgtccaatacgggtgtgtgtttggttgcttgcatccttctaacctggcccatctttctcatccaggatgtgtttgtccagctcaagaggatacacgtgtggggcccatctctcatccaggatgtgtttgtccatctcaagaggatacacatgtgggtgtttggttgttcgtattggatcagcctggttagcaggagattttggatgtgtttgtccatctcaagaggatacacatgtgggtgtttggttgttcgtattggatcagcctggttagcaggagattttgtttggttggttgcacaggagatacagtatgatagagattttatttggttggatgcatgaaggctaagtttggttacctcctattttttgggtgagattaccctaatgcaatttatgaaataaatatctaaccgtttaatatataagaaaatttgttctatttgtatctgttgaatacgcaaataaggaaaagaatcggtgaatatgcaaataaggaaaatgaattggtgaattgatcctcacactattgctgaccaattaagtgaaggagaaaaatatcccctattgctgaccaattaagtgagaaaagaaacaaggaaaggagaaaagtatcccgtagatctcatcgccagccaactactcagtgtggtccgctctgtaattcccctccaccgccgcaccgctcagtgctcgcgtccctagccacgccaagatctgatcatccgatgctacgcaggttgctgcccctctcctcgaatcgacactcaccctaccagatccagtcatccggtgctccggcaagccggattaggaaggacagacgcaaggaagatggcgaggataggagaaatatgaagccggcgatgacaacaacgctgctcgagcgtccagatccggctaacacaaccaactactggatctggcggcggagtttggggccgacatgatgacgccaagcagtggtgagaggctccaccaggcaagcagctccctgaggtggtgatggcgatgacgatggagatgatggtgaacccagtggcctcgaggactaaatgtgagtaggaggtgagtgaatgcttcaacccccctgcctcggatcaggatcctctgcagtcaaagtcacgtgactttgacattgacatgtgggtccaataatctctaagtccacatgtaagtgacaaaggcattatgcattcaactgtaaagaatctcaatacccctacctcatgcatccgcgcggaccgcgcatccccgcctgcacccgcgcgtgcccgcatctgcacgcattcagccaggatggcgagcgaagcttaaatcgagcgtttcccttgggcctagctgggaagggagatttgcacgagtggaaccaggcctaggaggccgtgcgggataccaaacacgtgctccttgcaccagcgggtgcgagcaaacccatgtgcaggcaaccaaacacgtcctacgtgtatatgacaatacatactctcatgacagaccaccggatattgtcaaactctgaaattatagttgtatattacacgacgaaaggaagaaggaatggagggagatagccgttgcccatggcatcaccacgagcatgcggttccagcgaggcattgcacgcatcgtgccaaccctttgcggatttgcctccctttgaaccaggcagttgcaaagcagaagggcagcaccacgcacccacagcaccgatgaccaatcaccatcgccggccactacctcgccgtgctgaaagcctgaaacggctaccgaatcattcgaatcatcgcctccacatttgtttcaccaccacctacctatctacagtgtcacctttgagctggaagccacacgatctctttgcaaaccggcaagccgtccctcctttcacttccctgcgattctgcgaatgcccgctacttgaaacgatgcaaaggtggaaaaaattacgtagtacaaaccatacaatagtatgtgaaaatctaaaaactatgaaaaatgaatttctgactaaagttatatttgtgaacgtggataaatctcaagcgtccatttttacattctacggtagtttctagttacagcaagataaaaaataaacgcctgataaaattttactcgtgatgaggtgaacaaatatcatgtattcatttttatattttagggtagtttctagatttgcattgtaatacatgatttttctattgcataatttctcctaaatttgcgatgcatcgtcgcaccaatcgcactaggcgtctgcatatttcctcggccgacgactcatcattgcacttgcgcgatctccgtcgcccgccggagcctgctgcctgcagcgacgcaagtggccgtctgctcctgctgctgccgctgcgtagaccatgactcatcaacgaatcagctaccgagtggtacatttgcttgatccggtgtgtgtcccctcggcctgcaaccctccactgcccggggttcccacctctcccggccggcaatctgatcgaccaaaaatggtcaatggatagtgtgcactcaggctctcagcttgcatcaccgcgtgctagtggcctgtactgtggccacacacaggaccagactatggtgaacttgtctcactctcttgcatatacgctgaacacgagcagatcgatcgcatcagcctaccgaattatttctgcgggtgtgtatgtgcatgcactctagtgggcctcggatgtgatatggctctgtcagatgctatgatcgatctgtgccggtcatgagatgagatcggtcgagcatgcatgtgcagtttccgtcaattatacctcaagttgttgtatattgtactacagtggatggagaaaggaagttcagtgatgtccagctacgtactaacacacagattgtgtgttcatgcatgttgcttccaacattgtatacttgcttaatttttgcccagtatgcatgtatgtgccgaacaatgacaacaatactgcagctcctcccaagtctcggtatagtgatacagattagttgtgtaaaaactagcactgcatgtacacttaattaaaatcttgcacataaggcaaatgtaatgaatgaactgcacgtaaccggacacttgcacgacgatgtgtgtacttctttttttttgacagagtggtcagttagggacagccatatataacaggtgatgaaactagagtatatgcatggaccgagcttgtggaattaatatagatcgagcaagaccgtaaaggcctctatttttagataaataatatatcttggtcgtactcagtgttcatggaagacagatccacaacccaccattggactgtttattgcgatgttctctttttaaagttttgtggcctcgctagtaatccacttcgagagaagctgacttgtaggcaatactgattactccctccataaaaagaatgcatataagttttcttacatggtcttcaagacttcaacatggagctttgatcattaattaatttcacagtatattatgaataacatgtccattataaataactatataagccatatgaatgggactaaatgtatcagttaaaagttagaagaccttttcaaatatatttgtgcctatatttttggatggaaagaatatatagtatgatggctggttaccagttagtgttgattataaactactccatccatttcatattataaataagacgcttttgactttttctaagcttataaaaaatagtaccattcttaacacgaaacaaacactataaaaatgtattcaatatttatttagttaattgaactaatttggtgttatagggatcagttgctacatgacttttaaaacttgattagaccaatagaaaaaaaatcaaagcaacttataatattaaacagagaaaatactgaattaatatgtgcgtcccaatgtacttttttcaaaagaaaagtaatccactccgagattagttcagccctcacaaccacgaactgtatgttgccatttgtattgcacttcacgcgctggccattttttttaaaaaaaaccgttggctttcacaagatagatgtctgatcaaatgacatctttttttccttattgaaagaacgttatctaatctcatatcttaccttgccctgatcttttggtatggttgttaactttcagtcgcacaatagcccatatacctaactatgttgcagtcaggtgatctcatgttcaccttttgagaaaaagaactagagtcctttgatggaacttgccagtgatcgatgataaatttatctctgtgtgtattttcaaacagtctatatacccccttaatctttgaatgaaagtccttttaacaccacaaattttaaaaccgaacatcttaccctttaaaatttgaaatactgattatattacccctacattgatgtacacagtgatggtgcgtatttggatgtttaaatgaatggttttaaataactaacataacacatttacacattgtcaatccttggtccttaatttatgctctacagtaagatcatacgagtattatattagtatttatttgtaggtgagaaagaacaagtgggaaaataataagtagagattttgacacacacatgtccaatgtgtatgtcacatagtcaagcttgtccaatctatatgcaaattaaataaaaaaacacattgcaaaactattttagcagtgaatgaacgatcttgtaaagttgggggatttatatgttcggttcacagtgtttcctggtacataaactttttccatttccccccgcactaaccgtaatttcgttcgtcaactcaactggttccgctcatatgggggggggagcctatcaggatgattgtacacacatttgacaattatttttctttcgtaattgcaaatttctagaaactattaagtcgttatccagaaagaaattttgaaaatgcaattaggtttttgggacaaatccagtgattacacttacacataaaaaaaattcagatattctggtatatcagtggtctggtctatgcattgaaagatgatatcttaagacaaataaagcaaccggagtgcatctaacaccagtgcgcactcatgggttatactagcatcaatctttattagtcctaatggcatccatgcattcaaactgtccccttggtacatatgcatacgacacgtgtgactgaaaccattttacacaagggggcatgatttagcacataattaagggcaatcagttttttcttttccgctgaaactcaaaaatctagctagctactgaaggtagttctcatcatgcattgcatctatctctctcaatttcaaatattgtttaggctccattcatcatgaccggcttcttcatctcccacgcggtgagctgcgacaccttgatctccgccttcccgttattgaaaacgtaaaggcgcgcgttcttgccgatggccagcgacgggtacaccctcgacaggatgcacgcctttcctccagccccgaagctctcaacaaccgacctgtcgatctgcacaagagagacacaagatatcaaaacatattctacaatttatgaaccttttccagatgaatgttataaaacagtaacccgttcggacgaggtgatacctatgaggtacctatcagataggtatcagacgatacctcaaagatatcatcccattcaaatagtttattagccaattaatatttattaggtatcggacaatatttaagaggtataattttatccgaacgggataccgtcatgcaacattttccttttttcccgataatttggtcctattacgtaccaggctcctcagagatatcttcccgttggtgatgtccgtgtcaacgaaccctgcaaacgtcggctggtacatgttcgggttgcgcgatgacctgcacgcatacgcaccataccaaaaaatcagtaaacggagtcaaggcaatattttgtttattgtgtagtgcgatcaatcaccgataaagtgcaaaagccgcacgtacttggtggggtcggtgcacatgagcacgacgggcttgccggcgccgccgccgcgcgccgccggcctgaacaccctgaagaacacggcggtcttctcctccagccccgcggacgcgagcacccacaggccgaacggccccacgccgcccctcgcgtcggcgccccgcgcgctgcacagccgctgcgcgtcgtacgccatcgccgggtccagccgctccgccgcctccaggctccccacctcgaagctcacctccacgtcagcctgcaccccaccaaacagaatgcatgatcacttcatcagaccagggacaatagcacactataagccagctataaacacatttcgatcgaggagataaaagaggagagagaaaaacaacaagctatagatttacagcaaattatagtacggactttaagatgcatatgtgtatgacatgtggaaccatgtattaattatttagtatatgtttataggtaactattatatgaatttattattagattgactatagataatttagagccagtagttagctatactattaaacttgctatcagagatcacagctcctactcacgtacgtcaccaacaaagcacattaattgagctccttaactatctctctaattatgttgtttagtgtcttagtgatatgtgcactaatcacgctgcaacctggaagttgtacgtgacatgcgcggatgacgagagaatcagtgagatcagttaagtacgagcaaagtgtgcaggagatggtaaaaggggacgagaagaaagcgacacggcacacgtagtaggtggtgttcagtgggcactgcacactggacacaacttcaggcgtgccagataagataaagatcggtccaggacacagcaaaacaaacaggataacttattaataattactactgtcatgcacagaaccatggatgtgtgagcagttttattcgaatgcccttttggggtaaaaaaaatagttttacagaattacagatgcaaaaaggaatacctgtgcagtttgtagcccggtcacctcgacgtgttcccctggcttgaccaccctgtccttgagaatgaccggccacttccctctcagcctctcgacctcctcgattggccactgcaacagttgcttcccacttgggtccagccacactttcctcggaatcgcctaaaacatcacatcacaaacacacgattcaatcaaagattaccagcaaaattgagctgctagtgttgttccatttgacttttaagatatactctcttttttcaaaatacttgacaccattcgtcttattcaaaaaatttaagtaattatttgttcttttcatatcatttgattcattgttaaatatacttttatgtatacatatagttttatatatttcatatttttttaataagacgaacggtcaaacatgtgctaaaaagtcaatggtgttaaacattttagaacggagggagtatatggtgatattgactatctgaagatggcagcatgcatggtggacacgtaaatggcatgcacgtatgcagtcaggacgtgcggttaattacctggattccggcccagcccttggccacgtcgtcggcggcggtgtcggactcgttggcccatccccagaggatgcggcggcgcttcgccgggtcgtagaacgtcttggaggcgtagaagttgccgtagtcgtagcggatgtggtgctcgtcgccggcggggtcgtccggcacgtaccgctcggccttccggtcgtacgttccgacggtgtagtagtcgtaccggcgcaggtcgaggctgttcttgagcacgtacttgacgcgcgccgaggcggcggcgtcgacgacggcggacgaggtgtcgacgccctcgcggcggccgtccgcggtgaccgggtagaagtccgggcactcccacatccccgtgggcgccgagtgcagcggctgcgccgcgcgcgtccaccgccggaagtccctgctccggtacacgtacgccacgccgcgggactgccccgcgaggctgccgacgagcagccgccagtggccgtcggccccgcgccacgcggtggtcgggtcgcggaactgcgtcgcgttgatgccgccctcgggcacgatcaccgggttgtggccgggcttcacccactcgcgcagcagcgggtccgacccgttcctcggcagcgccacgttctgcacctggtagttgacgtcggggcggttgacgccggtgtacatgatcaccggcgtcccgtcggccatcatcgtcgccgaccccgaccagcagccgtacttgtcggccctgatgctgggctcgatggccggcttgagcgccacccagttgatgaggtcacgtgacactgagtgcgcccacacgatgttcccccacacggcgcccttggggttgtactggtagaacagatggtaccaccccttgtagtacatcggcgctgcatgcacccgttcagtttcaccaaatcaagaaatgatcttcagtcttagtagtacattgaaatcaattaccatttcagtttaatcgcgcgtgtacattgcatttttctctacactgctcacgattaattatagaactatagatgcttcatttcgtacgagaaaaaggtgaacttttggctaattccctttctgagaggaagttaagattttctgaactttgtggtcatcagccgtggtaggggctaggtaccccacggtcgacaagcaagcctgcatgtggagtcccagtgcgcctaccattttcgtgctaaaatgtgctttgaacctttaatcctaccatgaaaggcgtcactaactacagtcctctcccgtacaacgaaattgcaagttgcaaggcataaaagttctagtactactactactactactagtagacagagattcgtgacaggatatattataaagggtgggaaaacgacgtaccgttcggatctgcgggtttccaatgttgatgacgcagcagcaatcacagtgtagagcagagcacacccccaccaaataattgcacaagaaaattgccggttaggactaagccttgtcacaagaatcattagcaagaaaagtagaacaaggtagtacatctgttaacagttcgaagggactaagtgtgagcttcatgaaaaagagatggcaaactctcagtagtttactgtgagatgcttctgaagctacttctttcagcgtgaccgcgtgggtgctaacgttgactctactagctgacccgacaaaatggacataaaaactgatgccttagtgtactgtccgtaatttatgttgtgtgccaaacatttgatatgactatgatgtcaatattttcaactctgactataaattactcaagttgagccatttagttcaggtgatgttctacacaacaacgtcgtcaaaactgtactagttactctgcacgattctgcgtctcaattctcaagaacagagcactctgttccctttgctcatctatccagtatccacaaccacaagtggtgccctatgacctgcaaatcatacggcctgaccggcgttctggcatgaacaatggcaagttggcaacatttcagttagttcacattaccattgatccagttcttgggtggctggaagtgatacccagtccggagctcagagtcgacgatggacggcggcacgccgtccgctgtggtagcagccgcctgcagctcgaggtcgtcgtagacgacgtgcgacgctccggcgagctgctggagcagcagcagctggaccagccatgcccaagcgaccctactaccaagaactcccattgctctcacacttgggcacaagaagtgagagcgagaagaggagaggaggatgagcaggagcagaggagagggggtcctatttatactgcgaaggtgaagagatgcattatggaaaagacgctgttttttttcccctaagcgttgagatttcaaagattgctgagtcggacaaaagggcagaagaatggcaggcccgggcgggccgcattactgtgtggacgacctaacattatttgtgccctgggacgtccgtgacctgcatgtttctctcatgtttttgatatatatatatatatatatatatatatatatatatattgggatttgtcttcatattggctctgatttataagctggagctcaaacaagcctaaatccatatacttttttttcctaacatggtcaccgcatggagcacaaagccatctataacgtattgggaaacaaaaagcaaaagttgaatggagatcgttatcaatccgaaccaacccaaagatatcaattcgatttttcatgtataaaaacactgaagttagcttgtaaagaagagagcagcactgctccttctcgtggcttatatctctatctacaggccattacgaaaatgtcaatccgttctattgatctttcatgtctagaaaattacggcatcatcttttcgtttatacttatacttatcagctaaacttaaatttttaactttaaatttgaagctgattttgggtttttttcatcgaagtttatttttcactctttgattttagattgctaagaacacgtatataaaaattttattcacaaattacttttcgtttgcaaatatgccgtttagcttattccacgaataagccaaacgatgtggttgttaatctgtttgtttttaaatcagtgttcacaattcactatgaactattatattttctctcatataatagcatatatgttttctcaatatattgttcaaatatattaaattgacaatataattttaaattttgcaataactttacgaaactactaatgggtaatattcatattgtattttatatacgtgttagttattaattattttaatatcaatttttaattatttgtaaattatatatattcctatatgcactctagactcgtcttttaatatatattttttaattccgaattttctgtaaattgtatttctatatagactctatgctcttcttccaatattatttatttttatttctgaatttttattatttttaattgtatttctatgtggactctaaacttatctttcaatattctttaatttttaatttcgaatttcagttacttctaaattgcatttctatattgactttaaactcttcttcccatatttttcttaatctcgaattttagttatttgtaaattgtatttttatacggactctaaactctactttaattttattatgtttattccaaattttagttagttttaaattcctatatggactctatactctaattctaatattccatttttttaattccgaatttctatttttttttcttaattgtatttctatatagactctatactctatttctaatattccttattttttaattccgaatttcttttttttcttaattgtatttctatatagactctatactctatttctaatattccttatttttaattccgaatttctattatttcctaattgtatttctatatggactctatactctacttctaatattctttattttaaattctgaatatcagttatttcctaattgtatttttatatggactctagtctcctcttctaatattccttattttttaattccgaatttcaactatttctaaattgtatttctatatggactctagtctcctcttctaatattcatttttttaattccgaaattcagctttttctaaattgtatttctatatgaactctattttttctttttttctgattaatgtgagaatttctagaccataagagcgaacgtggaggctcctttttctattcctttaataatataatagatagatttgtctatagtgtacctctttttttaaaaaaaaattaagggacctatatactacctccgtcctataaaaaaccaacataataccagatgtgacacatcctagtactacgaatctggacatacatttttcaagattcatcgtactagaatatatcatatccggttatagattcgttttttatgagacggagagagtatcttacaagcgtatgttaaagattgtgtgtgttcaggggttgagtgttcatatatgtggtcgtgtcctatcgtacactaggaggctcacccagaggaggcttcggagtatggccgatcaagcataagcatcatataccctgtacaacataggctattaaatagccctctggaatcttgctatttatgattattaaacgtagattaccgataaaaccgattccataacccctaggctatttt

SEQ ID NO: 22467 - DNA, 10937 bp, Oryza sativa
caaaatagcctaggggttatggaatgggttttgtcagtaatctacgtttaatactcttaaatatcaagatttcggaggactatttaatagccctccgaatcttaaacagggccatagtctaggggacttgcctcagcaccggcacaaaaccctcatccagcctgatggtcgatcgcggctttcgacttgttacaacggacgtggactctagcaaccctagttccaccactacaagggaagtgtgtaagggtagcagaaattgtgggaacaagcggagttaaccacacgatggcagtggcaatcgaagctcatcaacttaggaccagcgtggtgatgatgagctcaagggagaacgccaaatccaataggaggaagaaggctatattggtacaactgtgtattttttaatgatgttttaacctttacaacctggtgttacatgtgcgagaagcagaatatttgaactgaaatttgtcttagttttatacctaagttcttttgttttagaaatctttttcgatgtttcggtcagtggaaccggtccaatgttttacgttgcatggaacaaagttgtttatttcttcttcttttttcccttcctaatgttgcactcacttcttcagatgtttcgtccaacgtccatctatatataaatataatgttggtttgttgcacgcttgtttctcatagtaactattttcaaatgtttcaaatattggtttttttgtttcacaatttacagtttgttctttcacgtataactgaaacattcaagcgcctgatgcctagtcttgtaatcaaaataagtaagtactatgcagggatgcagccacctgcagatcccaaatcggctccgagctgccgctgcggcggattcgcaccgcgcgagccaagttgcgcagcggcaacaccagttcaattgccaacacgcactagctagtggtcgatctgccgcacccctagccagatacggatcgtgcgcttgcatgcgtgcaggaacggcttgtcccttactgctgaccagctgccttgctactaacctccccgtaagggcacccgcaatggttatctataggctctctacaagagatccatgtcaacatattttcctacttggaacagattaaatgaagaaagagagtaaagctatctactaatctggagatagtctatagagaaaaacgaggcaatagatgagagagctatagatacctatgtagacatactattgaggtggtttactattaatctagtctattgctgagatgtatatattttatagagagcaacttactttaccattgtgggtgatctaatagtaatgacgttctatgtatcgggcgcagcttagatcgacaggtggtcttgtgtagcgtatatcctgaaaacaataaaattgacaatgtataagcagagcattagggcattgccgctttaattggtgatcctaaacggccaaaccgctccttttcaactctgtagagggagtgcttgcgatggtccagatgatcaagttcttggaagccagaagtatatgcatattctagctagcactaaacaactgcagcgccgttgcaccacacgttcgtcgcaaagttggattccaatacgccatgctatgccaagattctcttattacactatgggtaacgtagttccataaaaattgctagctaaaatattttatgtggtttaacgctagtcaataataaatggaagttggggatttgtcccatcaccttatttctcattttgatttatttttaccttacatttttattactattaaacttatggctgtatgtcttatgacagaagccggatatgtaatctatttccattatctaccaaaatacgccatgctatgccaatgaagcagtagtagtccgcgcgaggttactggttgtagccgaaatgattaggcgggcgtctaaagtgcgctgccagaagcactgccaatgagcgtgatggaactttcagcgtcaacttggcatggcttttacgtctgcacgccctcatttcgcacaagtcttgctccgcctttattcgatcctggctcgatgatggatcgacctcccaataatgcgcacgttctcaccacattctctctcgagagcagattgtggacaattaagtccactttgactcccttaaaagtgatccgaatttaatccatgaccctaaatcgtaaaaccgggtatgtcgactcccgaactattgaaaccggtgtaatttgactcccttggtggttttggagggcagttttggtgacgtggtggtgttgacctggtctatagggttgacgtggcgtttaggtggcatttgaattaaaaacacatatgtgggaccacatgtcatcatctctctctttattcttcctcccctcttcctcgcttctctctttctttctctttctctcccctttggccagccgcggggactggagcacggctggagcggcgggggctagagtggtggcggtcggcggaagctgaagcagcaacggcaggctggagctgacggcgggttctagagcggctacgggcagcttgatgaccggcaaggaggcgggagaggatagcagcgccgacgccgacgccgatgacatcgagcggggggacggcggtcgacggcacggcacctaagcgccctaaccccagtcctcacctccaccggcacggcgccctcaccggggaacgagctccctgctccctccgctgcctcctgccgtccgtaataacaagatccggcactctggcctctcagccgattgcaacaacatgatccgggcatccagcatatgcgacaagctgacgacacggccgacatcgagcctgtcaaactggttaggggcgagggccgccatcgagctacgccattcagcattgcaacgacgacgtcgtcaagtcattgctcgagctcgctgcgtggccgtcaactcccgcgccagccccatcatcgccaccaactcatcccccgttgcgtctccttcaactagtgctgctaaggccacaagcatcacaaaaatccagaaataaaattgattcatttagcaactaaccagagataaaattgattgttagcaggtcgttcaccatccactgaagaataggatgagtaggcagaggggagcaattaattttgtctcgcttgaacacgcccaagatggccaccctcccggggatacttgtgcttgcgtgttgcgtcaagcggcaccgacccggacatcatgtcggcgatgagctagcttaggtcgctggtgaagcagtcggcctgcagggcgagcgccatctgccgccgctcccaccgccaccgccgcttcagcttccgccgctctggcccccacccgccgccgctccagcccgtgctcccttggcggcccggccggccaaaggggagagagagaaacaaagagagaagggaggaagaagaacgggtcccacatgtcagtaggccccacattttttaatatatgaatgacaaacgggtcccacatatccatttttaattcaaatggcacttaagcgccacgtcaaccccatagactaggtcaacaccgccacgtcagcgccacgtcaccgaaaccaccctccaaaaccgccaagggagtcaaattgcaccggtttcgatagttcgggggtcaagatatccggttttgtggtttagggtcatggattagattcgggtcacttttaagggagccaaagtggacttattccctttgcaggctgagtggacatcaggacatgagatcgtctcgcaaacttgccatatgtatgtatagcatcaactgtgccgtcgagagataggaaattcaggggtggtggtgttacgagcacagatgaaagttcttggaaagccttaccttgtacggttgtacctacgaggaccgtgatgcctccatcgccgtgtacaaagagtactgctacacgtactaaaattttcttataaaacttttactaacaaatttctcaaccgtttgatttaactagatagaagttacaagaaatctagatttactcacagcttgacatatcagagtttgtaaatattttgtaagaaaaatttagtacgtatagatttttccgtgtacaaatacggacgttttttggccacttagcttgggccgatggcgactacatctccggagaagaacactgagttgggctgaatctaatccagaaatctagcccaaaagtatacatataggacaaggcccaagaaaaggctttttcggcgatagggatgattggagcaaaatgggactcgaggaactacaaacttgtcatcagtaagtcacaactgtttagccgtttaggccacgagaaaaatcagatgaaaaaaaaaaacagccacggaaccttttattcactcatgaccagcaatactttcttcacgcattgagtgcaacaattatgatacaaaacagaccatttctttccctaacaatgcatcaaaacactacactgcagcctccaaatttatcccaaaatctcagctaaagaagctagtatctactacctccgtcccaaaataagtgcagccatagatatgcgtactcagcgttttgaccatccgtctgtttgaaaaatttataaaaaatatttaaaaattagtcacacataaagtactattcatgttttatcatctaataacaataaaaatactaatcataatcttttttcaaataagacgaacggtcaaatgttggacatgaacagtgttaaaactggacttattttgggacggagagagtagctagctaaacgcccggctaggcggctactctaccagtactgctacaaccaccatgtctaggctgatgtgctgcttgctactgctgctactcctccgcgttcatcttcggggtcttcatctcccaggcgtccaggttggtgaccttgacgtccgactcgccgttgttgaagacgaagaggtgcgcgtcgtcgccgacggctttcctcgggtacaccctcgtcaggatgcacgtcttgccgcgcgccccgaagctctccaccacggagtgatcgatctgatgcacaaatatatatatagttcatcaaaagcagagtcgatcgatcagtgtttatgccaagagattaaatccactgttgctgaacacaaagatcgaggtcgatcgacgatcgtgcatgcgcaccaatgtccggagggcgatttgtttgttcttggcgatgtcgacgtcgacgaagccggcgaaggtcggcctgtagatcttcgactcgtacgatgacctgtttatttacgtgatcaatccattgggcgaacgatccatcagttatgttcagtgacgtcagcaaattaaggattgagatctgaacacgggaagcacggaacgcacctggtagggtcgttgcacatgaggacgacgtgcgaggagtcgttggccttgaacaccctgaagaagacggccgtcctctccttgaggtcgccggaggccagcgcccacagcccgaacggccccacgccgccgtcgacgtccgagccgagcttcttgcacagcgcctccgcgtccgtccgccacgccgggtcgaactcctccgccttgctcaggtccttgatcgcgaacgccatatccacatccgactgcacttgcagagatgatcgatgcgcgcacgcaacatccatgtcagtgtaccgggtagattgcaggtgtggctagtgtatgttgctatgtgcaccactgacctgcacggacttgaagccggtgacctcgaagtagttgcccttcttgatgaccttgtcagtgacattgacgtgcttggctcgcagcgccttgagctcctccaccggccactgcaccagctgcttcccgtccgccgacagccagagcttcctcggtatcgcctgagagagagccagcaaaagcatcgtcagtcatgaaaacggaggcaacgtacgtgtgcaggcaggcccacgcgatgctgacctggatgccggcccagccctttcggcggtcgtcgggtacggtgtcggactcgttggcccagccccagacgatgcggcggcgcttggccgggtcgtagaacgacttggatgcgtagaagtcgccgtagtcgtagcggaggccgtagtcgttgtcggggaaggcggcgtcggggacgtaccggtcggtggcgtggtcgtaccagccgacggtgtagtactcgtaccgcgtcaggtcgaggctcaccttgagcacgtacttgacctcctccgccacggcggcgtcgtgcagctcggcggtgtcgacgccgcggcggtagtggcggctcccgcccgccacagcgacggggaagaagtccgggcactcccacatcccggtgtgcgccgagtgcagcgggtggtgcgccttgacccacttcttgaagtcccggctccggtacagcacggcgagccccttcatgttcaccttgctgccgacgaggagccgccagtggccgtcgggcccgtaccaggcggtggtcgggtcgcggaacgcgctggcgttgatgccgccgtccgggttgatgatggggttgtagtcgggcttgtaccactcgcggaggtacgggtcggagaggttcaccgggtaggcgacgttctggacctgccgctcgtcggggtcgatgccggtgtacatgatcaccggcacgccgctggggagcacggtggcggagcccgaccagcagcccttctcgtcgaacgtcttggacgggtagatccccggctccagcgccgtccagtcgatcaggtccgtcgaaaccgagtgcgcccactcgatgttcccccacacggcgcccttggggttgtactggtagaacagatggtacaagcccttatagtacatcggacctgcaccgtgacacgtataccatgtcatccaatgcacattagtgtacgtaggagtacttcgtgccatacgcgaacaaattttcagctagtttttacggccgtgtgattagccgtttacgtaccgttcggatctggtcatcgtgtacggaggaggaaacagataggagagaataacacgaagttagtattatatcgatcaaagaggacaacgcaaatcgatcatcgtacgtaccgttgatccagtgcttgggtggttggaagtggtacccggtccggagcttcccgtcgacgtgcttcgcctccagcgactggagctccgggtagacgacgtgcgacgcgcgcaccaccaccactgccgccatctgcagcagagccacaaacaccagcgcggccctcgccctcgccgtcgccatttccactaacacactacttacctcgcttagtgagacccagttaggactcggatgatcaatgatatagtgaggtgaatggtactattttataggggcttctagcttgcctagcttcttctcatctcggcgcggcggctgcgtccgcgcgcgacgttctttccgttttccgtttgccacgaattcaggacagttttggcgtgccacgtagtcttatctctagtgcaagagcggcacgcgcgcgcgcgagagagatcggtcgatcagatcgcgcacgcttcgttctcccctatccgcccccgctgactcgctctcgatcgatcggcgccgcgcgatctcgccgtctcgtctctcgccatcgcagatatatatagctcgcgcccacccgcgtgcgggcgctctgctagccgccacgtgaaccgccgcgcgcgcgacgcccgtccgtccgtttgtccatggcgccaccaccaccgccaccaccgctgcactgctacaaagcccccgaggagcagcggctcgggccgcgccccgccacacaatcaaggcccccgccgcacctcctcccgtactccggcggcctcgacctcctcacggaggcacttggggccgagagcttcgatccggacgacgacgacgacgccaccgccgcctcccccgccatggaggacgtcggcgccgccgtcgccgcggtcgactttctggccccgccgtgcaagaggccgcaccacgtcctcctcagcagcagcagcgaaggcgtaggccacgacgacgacgacaaccagcacgccgtgatggtgctgaggaggacgaggagcgggagggcgttcccgccgccgatatcggtgatcggcaagggcgggcggccgtggctgagcctccgggcgcaccgggaggccggccggctcgtgctgcgggagatgcggctgccgtcgcaggagttgctgcagccgtgcaaggaggacggcaggttcaagctgctcatccacccggaggccggccgccgtagtggcggcgccggcgcggggccacgcgtaggatcaggaagggaaggacacggcgccctcgagtcttgatcagtagatcagacagaattttccttttctttggtctttagagcaccgtaaattcttcctctccttcctgcgataatgtgcatgatcttgccgttaatcaatacatgcattggcttgcagcttaatctccgatctgttcaaatgcgtctcgtgcctgcatgcttgttccgatctagtattccattgcatgagaattccagacacggctgcgcggagaactgttcagttttggtttctgcaagataacgcgcggaatcacaaggaagaaacagaacaaagcgaattttttttaacgaagttttattaatagagcagaaaaaaattacaatcctagaggatcgtaactagaaaaaaaattacaagattacaataccagaggatttaaaagattacaataccggaggatcgtaacctgaaaaaaaaatataagattacaaagcgaaaattttggttgaacacggaatcaactaacttgatcccctcacgggtgatctctctaacaaacagtataaatcacacgcacgtgagcttaagttgggcttttgaggtttgacaaaataaaactcacatggtgacatggacatgaagaaaggaactggtcacatatgttctaatatctggatccatttcagttgacaattcttcacaatttacaaatatctagacctcacactcttttaacacacagtgggaaacagaaaatgtgcattagctcacatgtgccaaagcttattgtttaaaactttatagtatagttttgtttcgaaaatgaaaattatatatagcatccaaacagccccttaatctgtaccattagacattcacttcttttttctcaccgtttcaacattaattaggagtatttcgaaaactgaaatcatttgagccgaaggctaacatggaggtagttagcagtaaccttgaagataacttctgggacccacctggcattgactgtgacagcaccgagccgttttactcggtagcctcttgttcccgcacaactcgcatcgcatgccacgcctctctgctcccgcacggcgccgcgctgcgagctctcgccacggccatggcgacaccgacaccgatgcctcacactcccatctcctcgcaaaccctaacgttagccccacacgtctcgcggcggagatgcggaggcagtgtccgcgcccggaccctagctctgcccgcaacgccggcgtcggcgtgctccttccgcctccgcgccacggcggcgcgcgactccccgctgccatcgctgttcgacgaggcgttccccttcgtcgccgtggagtggaagaccatagtgaaggggtgggcgtgcgcggccgcggccgtgtactgcctctcgcgcgcggtgcccgccgcggggcggctgccgcgagcgctcgcggcctgcgggggcggggcgcggaggcgttcaagggcgggttcgcgctcgcgggactcgccgctgcgcgctcggccgcggcgtacgtgcagcaggcgttgctctgggaggcggcgctccgggcggcggggcggctgcgggagcgcgcgttcgagggggtgcttgcgcgtgacctcgcgttcttcgagggcagtggaggactgtccgcgggagacatcgcgcaccggatcaccgacgaggcggacgacgtcgcggacgccgtgtactctgtcctcaatgtgaggttccttgagactaacattttcctttgctgcgagtgactcgtctgagttgagcgataaccgtttgtggaaatgcctgcatgaggttctagtatgttgacatgtttctagatctagatgagcatcaatctgatcaaatgtggattagctgtctgtgggaatgccttctcattagtcagcataattgttgattttgtcactgttcctttctacctccttaaaatgcctatacccatggagtaatggatcttgtttactagcttcagggtttaggtgtaattcaaggcatcctgcagaattgctgatgaagtgattacattgacaattggtaggcctccaaaaatggattctaattactcttttccttttgacacagactattgtgccaacaagcttgcagttgatagctatgggacatcaaatggtgacaatcaatcccctgctctcagtggttgccgcaacggtaacatctgaacagatctcacaccttatacagttatagtgccatccttttgtagttgcttcaatgtatactgtttaattctctctacattacatatgcaggtaattccatgtatgtggcttgtcattgcaagtcttggcagaagactccgccaaatatccaaagaggctcacattagtcttgccatgcttacagtctatctcaatgatgtatggtatttcattttctattattcagtgatgtctgtagtcctacagagtttgttttttaaatgaatttccttttaggtacttccatcgatgctcactgtgaaggcaaacaatggtgagggcaaggagatatcgagatttcaaaatttagttattgttgatctaaagaataatctaagtaagaagaagatgaaggctttcatacctcaggttgttcgaacaacttacatcggaggcctgttagtgctctgtgctgggtcaatagcagtttcaggcacct

SEQ ID NO: 22468 - DNA, 1659 bp, Oryza sativa
tctgtattccatgtcagtacaagttcaacattttccctggacctaatttctcacatccagaggaataatcgaagtgtcattgcaattaaatatgtaaaaacagatttttaagttatttctttccctgcgaatttgaagcatatttcaatgtattaatttagaaagaataaatactaaacttacatttttgttaagtaatgctgtatgttcttttaatcatgtgccaattctgttgggtttcgtgcaccatttttttatatggtaaaccatcttgatttagttcctattagaatttattctgtgcataggattttgggaaggcatacaatgaatataagcaaggagaaccagcattggatcgcatatttgatctaacaaggttcatccctgaggtacttattcttttgggtaggtcaatcacaaaatttctagttatctgagaaaaatattgcatttttcaaacactgctatcaaggaaatgattaaggcactgctattggttctgtatgccctaattcaaagtcactaattgcttcttgtgtgctgtaggtgagggataaagcaaccgctgttcatttaaaatatgtcaagggggacattaacttccatgatgttacgtttcaatatattgatggcatgccgccaatactagatggcgtgaatcttcatatcagatcaggagaaactattgcttttgttggaccttcaggtggagggaaaactactcttgccaaattactccttcgactttatcaaccacaaagcggtatcacactgaacaccggaatagaattttctaaattgtcctgctacatgttgctgccttttaccacaaattcaagtgttcaacagacagcactcctgttctcttggctatttaaattgtgtcattatcttctaagctgctgttggtttgcttgcatcttaggatatatacttctggacaactgtgatatccgggacattcaattacaatgcttgagaacacatattgcatttgtttcacaggatgcattaagtacttatgtgctattttccctctttgttgttgtatcctcaaatgatgttattctccaaacaggaaccatattttttacattttaatttgtcttacatttgctaaacagtagcatcctggtcagctacaactgagggtgaaaacgtaatatgttctatttcctttggttggtttctcttgatgcagtgcctaatcataagtttgaatttcaaccatggagctcttgaacttttctcctcttttgttacttccgtttacatatctcatccatggtgtttaaaagaacatctttgttaccattcacatatgcaactattgcacatatttcagatatatttatgttatgcatgctggagcaacaacagtttgcaatattaatgtattactgacttcattgtgtttttatagatgctgctctctggaacaattgctgaaaatattgcttatggagaccccatgggagctattgatatgagcaaggttgaaagcgctgctaagattgccaatgctgaggagttcattaagatgttgccaggaggatataattcatatgtagggcaaaaaggttctagccttagtggtgggcagaaacaaaggtatattgtatcacggattgtaacaaatgaaacattttactcagt

SEQ ID NO: 22469 - DNA, 18882 bp, Oryza sativa
cacaagaacatctaaaaaagacctcaaataactgaataaggggttgcacatccctcataatacttacagaatcagcaatcttgaactctgaagatgttctcaaacgcagcacacatccgaaagcataaggacggcttagcattttgtatctgcaaaatgaaggataaaactcaattgctgctttgtaatatataataatctacgcatataaacagtacattgtacttaggccattctgcgcatacatacaaatagttatagtatgtgacattcagggtactgcaaaaccatcatttaaatattcattaggctattaaggattagacaagtcagatatgatccagaacttgaacagagaggaatattaggatcaactgtcaggatacactgaacatcagaattctatcaatttaactgttctgcaaacagagagagaagaagagtacaagcatacataaatcaaaaccttgggctgtggaaaatttgaaggacctatgatcttgaagcaataaagttgaactgatgattacattgagatacacaactcagatgatgagcaaacttacatatcttgcggaagtgttgattcatctgtacttgaatacatgtacaatgagccaccgctctcaacactaagaactttcaaggaagaaagatctgtgtattcatttgtaattgcaaaaaggtccacacatacacctgcttgaacagcactagcagcctgtgatatgccaattaggatatattctagaatattcttgtaatttattgagcaaaaattacagagacttaccagatttgtgtagaaatttgtctgctcggaaatgaatgtatggtcggatcccagcattttagcagcattatggtccacgtcacttcttgtttctatttggccaggcccgtaattcggtggaccagacaaaaatgtgaatatccttgctgtttaaaatcaggacagaacattatagtagaaggcaaggtcaatcgccaccaaacatagtacagccttcaaaaagaagataagccacaaatgaaacaatagaatgatagcgtaatcaagatatcacataccaagttcaaacaaacttccgtactctgtacataggtagttgacaacagcatccattgctaacccaaaaccgcgggcatgatgcaacgcgtgatcctggacttctgaggcagttgctgttatttcccaggaagatgttggtttaattgtttcaagtgcttcagcaatgcgatctttgcacccgtcgacctgttaagacataactgacataagcatacgacagatatgaatattctaggaaggggcagaaagcacagtaaaagacaaaatcatagattaaaggaattgcgaataagggcaaaactacaatcaacagcatggtatacatacaggagccaaaaaggaacgaagcggcatgacatcttcaaggtcgacaagtaaggtaccatcagaatcaggagggatgaaagcattcttcacaatcggtatcggaccttgaacatcatataaacctatcttgctgctaaatgtcaaaagcccaaacaatgatcctggagggatagctgcatgggatcacaaggatcagtgcacacatagttgcacaggaagctcatgaactttatgatgtccacaatagattagtactagctcctaaaaacttgtggctggatctcaccttcaagagctgctaggagagcacttttgactagctccaagaactcctccgaagctaaaatacaatatgattaaacaaataagatctacagaaaatgagtcgggaagtctagaaagattgcagctgaaagaaatcaatgttattttcatgtaaatctcaatactctttcaatagatacagtgagtccaatttaacttatcacagcaataggattaagatggaatgatcaaatgaatttggatgccatccatcaaggtataatgcatatgcaaaaaccaactcgatcaactaaatggatccagaacttgacagaactgttcacagtaatcaacaaaatgttgcaacgctaatttccttttttttctacaattcaagcatgcttgcaaacacacatccacacgtgttacaaacaggaaccattgctcatgttgatcaattactagactaaatccatggcatgagcatagcaagttattatgttcagttcaaattcacgttcctatggcaccccaaaaaaaaaggggctcacatgctgactagtgagtagtgactattaagcaagcttcatgcattttatagccaaccacctctaaaacgtttcgagacgaaggaattttgagatcttacaggacaagtcgattgccgccacgtacactggcgtcgtcgtcgccgcctctccctcttcccctgccgagaggaaaaaaaacatcagctcctcatcatcacacggcaaccacattgcattacatgagaacatcgacaactatgatccataccagggaggaggaggtccacgaaggcggagcgcatctcgggcgggtcctggccgccgtcgcgggcgtaccgcgcggaggcgtcgggggtgaggtcgttgtcggcggagcagatggcgcaggaccacgaccagcggtggagcgggcagagggtgctaaagtaggcgtagcaggagtcgcagcgcgggaggaggtggccctcggcgccggtggcgggcgccgcgccgcgctcgtcggcggcggagaagggcgtcacggcgacgccccacgggatgcccgaggactcctggagtgccgcgtcggaggggaagcaggcgaggctcgcgcgcaccgccattgctgctgctgcggctgctgcggccccccgcgctgcagctttgggatgtggatctgtggttgttggccgcgaccgcgagagggatctgaggagaagaagaggagggaggaagaggaagccgtgcagcgcagcgtggagtaacagtttacggtgtgtaccgtgaggccattcacaatgcatctacatggcatttggcctcaactgtccagctaagcagattgtatacgtggagaagaaaagaatgtggggcccatatattcaccagctccgcgcgtcctcatttggcgcttttttaatcgcatttgcacatgagaaagcaggacacagagagagaagggggagaagctgacccaaaaaagtaaatttttgtggtggggcccacatgagaaacagtttggtggggtccacctaaagacacgcgcccacgccgcattgtggagagaggagcttcacgctgtttcttcgtacgtggctgtttaggctcctcagaaaaacacaacgcagtgctaatgccctgatggtccgtgtgactcgctcgtgtcgtgtcgggctgctctgctgctgcagcaaaacgatcaggagcatccaatgttaatcgtacggcggcgatgtggtacaagttgcaaggattagcacactgttgttgctgatatcattttgctactgggagtatttctgtatttttgtctatttacaaggttgtccaagcgtgttgtttgttgatgacttaggtgctgtttggtttccaggaacttattccaagtccatgtcacatcggatgtttggatactaatttggagtattaaacatacactaactacaaaacacattccatatccttggactaattcacgagacgaatcttttgagtctaattatgtcatgattttgacaatgtgatgctacaataaactttttataattatagattaattaggcttaaaaaattcgtctcgcggattagctctcatttatgaaattaattttttattagtctatgtttaatactccaaattagcgtccaaacatccgatgtgacatgggctaaaaagttttagccccatctaaacaccccctagtgtcaattttttgttgggaacattggacacacacaaaaacacattataaattacttcatctgtcacagaaaaaaccaatttttgaaaaatccggatatgtatttatccaaattcattcttacatgttgttttttaaaaacagatgaagtagttaaaactatataattgaagtgtttgtaaaatctagtttgtgagataagactcgggcttgacaagcctaactcggcaaaacgaaaacccgtgtgacttttcactcctagcgtcttggatggcttaggggctgtttggtttccagggacttattccaagtctctgtcacatcggatatttggacactaatttggagtattaaacatacactaattacaaaacctattccataagcttggactaattcgcgagacgaatcttttgagtctaattatgtcatgattttgacaatgtgatgctacagtaaacttttgataattatggattaattaggcttaaaaaatcgtctcgcggattagctctcatttatgaaattagtttttttattagtctatgtttaatactctaaattagcgttcaaacatctgatgtgacttgggctaaaaagttttagccccatctaaacacccccttaactgaaccaggagtttggcttgatttggacactacaatgttcagaagcatgaagatggacctgccactctaccggaagagcaaggaaagaagagaggatagtagaacattggccctgtttggaagattagctcagagctaattttaagagctaatgtttagtcatgaattggtaggctaaacattagcctaaggtagcatgtttggatccatgggctaattcaaggctaaaaggtagagagagagtagaaagagaggagagagaaggagagagagctgctttttgatggtccctacacaaaattagccccattagcatctcttgaaggggctaatgttttgagaggagctaattcacattagctcaaaattagcccacttgttttgatttctgagggctaatttgaggctaaaagttgagggctaaacattagcccatggaactaaacgcggccatagtagaagacagggtagacaaggaggtagttttctcttacacgtgaatctacaaacattttgcacactagagcaacttaaaccaaattaaactcacatgtcacatgtactctgaccactactctcctagatttgtacatacataacattatactccaccgatctagatctaattacttgttccttaatttcatttaagagatctgagaaaataattaggtttctacggagctgaaacatctccattaccaccgtagtggatttatactaggaaatggcgaaatgtttgcttcaaaattcactgaacaatgcgccattttgatttgaaatcaaaatataccctaccaaattgttagccattcgaataacactttggctaatgtttggtacgctaccaaaatataccaaataacatatatagcgtgcttagatttggaactaccaaaatatgcttagatcttagcattgctaacattttgacatgatatcaaagcaaacatgtcctatataacgaaatcttggcttatttagggggacatggcaaataaatagttcaaagatgggttgaatgggcaacaattggaaatagatgtatcaactataaaatcaattcttttccataaatgaccgtcagttatttcacttcaggtctcgtgattgccggattcgaagaatgcacacaatctgagcttttgttcgaatgcaaacaggcaatggaagggtgcaagcaatgcagttactgtcaaattctcggctaacaagcaaagccttaagcatcagcattctcaaattctcagctcctcaatgcgaaagaatgaaaagcgattaaattatcacaaagtggtaaagaaagaatagtaatcggtacagattacaattgttagccgttgccgagcacaacaagcagcacaaaccagaatccaacatcagccgggggtagacacgcgaatcgacccaacacgacacgaattgctccacaactttggacatcacacacgattcacagctatccatcgccggatccatcatgagcagatggggcagcggacgaggccgttctcgttgcactcgccgcactggaccgtctccttccgctcgccgtccacgcgcaccttgcggctgccgttgcagtcccggcacatgacgaaccgcacgccggcgcagccggcgcaccagacgcgcgcgcgcgggaggccctgcagcagcgccttcagcttgccctcctcctccagcttggtcacctccgccgcgccgccgacgtgccggccccggacgaacaccgccggcacgcgcacctcccgcccgcccagcagcagccgcagctcctcgcggtagcccgagtccatggacacgtcccgctcgatcaacttcacgtcgtgggcctcgatcgccgcgcgcaccgcgttgcactcctcgaacgtcctgcggatgccgcggagggtggtggtgtacaggacgaccgcgtcggcgccgccgggcgggcatttcccctcggccaccatcgccggtggcgccgccttcgggtgcttgggcttctccgacccgaccatccgcttgatgtgggcgccttcctccgacagctcgcgctcgatggacgccaggagctccgggtcgaacagcgggctcaggctccgccgcgacgacgacattccgccgccggtctccggcggcccgggcttccggacgatccgagcgctcaccggagagaatctcttggacatcctggacaatttcgagttgtcgattgaattgtacggccggaggaccctgtcgacgttgacgtcgccggtcttgttgatgttgctgctgttgttgttcccggagcagcgctgcagcgggctgttctccttcccgggcgtgttcctccgcttcgtcgccgacttcttgggcgacggcagggccattgcgatgacccttgccggcgaccaacgactcggctgcttggccggcttcttcgccggcgacgcatccgcggcgtcggcgtcctccagcccggccataatctcccaggcgttgataacctccaatccggagtccagcttacccgccggcgccggcttcttggcgctcgggaccacgagcggcggcggcctcgcgcgcttccactccctgcttatcggcttatcctcctgcggcggctgagcctgagtctcctgcaccttttcctggcacgccaccgccgccgccgctgctgccgccgctgccgcggcagccgcagccccgtgcttggggtggaggtcgagcaccccgtaggtggtggaggtgagggacaccacatggtcgacgcggccacgcacggtggcgcgcgcgccgcttccccctctcgcgtcgcccggcccgggcgggagcagcttcgaggagatgcaccccatctcgtcacggcgacggcgacagcgacggcgagcaaccaaccacctctctctcgaaacggcggcgcttttcactctctcgctttctcgagccttgaccagagtgggcaacgtctatggcttgaccggctcggggagtagtggggcgttttgtggtgcgttttgaacgccgtgtgagtgactgtgcgcgcaacggtcaccaaggagaggccgagaccgagagggcggtgcgtgactgcgtgccgtggtgacgctggagatttgggcttttgtttttaattttctcgtgcgctgcgcggcgatgttggtagcaattccaacggtcgaatccggcagatggttggtgcccgtggcagcgcagaagccaggaggaggaggaaggcccgcaagtcgaaaaaaggtggcgcggcccgtgtcagagttgccccgctggatcgtacggaggcaaagtgttgggccagtttctttttctcagttatgggcttttttagtctcgcgtgcgagcccataaagtttgcaactttttagtttttcagatgtttatatgcctttttgatctttcagattagtgctttagtttttttaattggatttgctttagttggatacctgattggaaatttggaagagaccatctcaagagaatttggttgatgcattgcaatggttctacagtgtagaaagtccagtgagtgattaatctagtctaacatcgacgacaacacaaggtacaaggagcagcttgctcaataaagaaaagtgtcacacatgcacaagcagaagaagataaagatgacttttttcagagttaacaactggatattagcacgggagatgctgttccaagtactaagaacggatggttgtttgcctcggggaccgtgatccgtcgatataccagattcaggccgccgagactggtccctgcccagccactgccatggtctccggccaccgccgtgaagcaaggcgcttcatctctcccagcccaaccgccaccggccgcggcggcgaaagagcggcgaccgtcggtgacgaagtcgccgttgcgttccactcgttcgtctccagctcaccttcgagcggattgctggaagaacgacataggtgacgcagcgtggcagccacgctcgcccagcacccgccgttcctctcctcgtcctccacgggaggcgcaggcgccgccgccgccgtcgccggcgacctctccgaccgcacggccccaaagcacgaaaccttcggggacccgggatccgtctccaccgcctcgctcgcgaagaccctggcccccgccgccgcgggtgcccggcgccatccgcggccaaggcatggggacagccgcttcttctgcgcgaccatctttcccgccggcagaccgcagatcacgacggccgccttgccggtcaccggcagcctcctcgactcagccgacgacggccgtggcccgcccttcttccccttcccggacgcagcggccgccttgggattagagctgcccttggtggagccatccctctccagcaccgcgccgccggccaactccgcccagatggcgccgtcccctatccgcacgcagcgcgactccgctggggcgtcggagcagccggggagcgcgatggtctcgcacgccaccctcgaccccgcctcgccgccgccgcagaagagggactccagattgatttgcggcatccttgccagctactagcactgactgactggtgggtgagcgattgatagtttctggagagtcagagcaagtggatttaaggggagcgccaaacaaaagacgtggagattttgaaaagggggaggcccgtgcggtgtggaacggcagcgagtaccgttggtgggttgagtggttgggtgaggcgcggcttgccggggagttttggaggtgctttctcgttgtttttagtttgcacgcagccatcggtaacatcggcagaccggctactagcagtgtgtcgaatgcccaaacgcgcggcagtatctagttcatactaagtttggttgaaattggtatgatgtgatagaaaaaaattatgtgtgtatgaaaggtttgatgcgatggaaagttgaaagtttgaaaaaaaaaaactttggaactaaacaggccatatgaagtagaagaattttgaacgaggaagtgcatatgggggctaaaagattgtcttgcttattttttatgcttactaaaaaatacccgtgcgttgcaacggtttaatgctattttaatcttattatatacggtttaactaggatgaaattcactgtaggaattcgcttggatttttttttagaaaatcatgagctgcaattaggagtccgatttttatctcaagttagcatgcaagcttttttaaataaatttcttatacgactttttttgtatttccaaagcaatcgaatttaaaatccaactcatacacggatatttatttccaagagcgaacggacttaaaaatcgactcaaatacggatgacttactaaaatatcggtaaaaacatcttcaatttataatagtagagaatagatataagtcaaagattaaaatttaaaactcaattttaaatttaattattttcatcatagtttaatttgcaacatttgattttaagtcgttcaggacacgtacataaaatttttactcgtaaatatttttttatttacttcataagcatatgaataaataaaataattgtgatgtttgagtttgaattggtacttagtactaataatataaatatttaaattttaataatatattggatacgtcacctatacttcaaactaaataggattagataaaaaacgattatgactttttaatattaattttttaaattcgaaagtaaaattagtaaaaaaataaagacataatggaacatcttactatatcttccgttgttttcatgttatattaacattttacaaattttgaattaataagtatatctaattgtatttatgtcggagttttaatttagcatgtttcataattcaataaatatagagttgcgaactgtttagactttggttctaaaattccgaatcaataaactattagtttgtggtagtatttgacatggactcctatttcatccaaacttcttaagtcaaatgtgaagttacacggtgttttccaaggacatgttttatttaatacaaattcacaacatgatctacaattacaataatatattttagttaattagtataatatttgttgttttttaagtagatttagaaaattttttgtgagttgggtccatagctcagtggtagagcatttgactgcagatcaagaggtctccggttcgaacccggatgggcccttattaactaagttttctaatttttctatttttaaaacatatttccgttccaatctggccaaatccatctcttatttttccaatcatcccatttctttcctctcgttaatgtaacaatcgcaatcccaatctggacgtcgttaatcttcctcatcccaactggccaaatttgctcgccatctcgttccggcccaactgatgggcctctcgtctggcccggacgaagtctccgcggccgcgagcccccgtccggccgaggttgcacacaggacgggggcctgtaggcgagtcggcgtgtgctgaagctccccatcaatcgcgcggttcgtgcgcgcactactacgctagcgccccgcaccaacggcaagagcacacgtttgttgagaactcagtagttcttcattagtaggtaattaaagagggtgacaaaagaccggtctcttagtacagaaatcaaagccagttcaagactgctagcaaaaccggggcaaactatggccggtaaccaaaataagaaagcaaacctagacgctataaacacacgacttcagaaacaaactactactgctggacagaacacaacacaagggaccccaaaacacgcagcgatctccatcggccggaatggatcgatggcgctgccagcgcgtcgtcgtacgtcgtcgtcgtcagcctacggggagctcctcctcttcttcttcccccagaacctgtggtagagctgcacggtgcggccgttcatctgctgcgtcggcctgctgttccggcggtagccttcgtccaggggagccatcagatcggcggcctgctgcggtgtcatctctctcggctgcaacattttagtaagcattcgtgctcacaaagttcagacttggcagaatgcgatgcgagccatgttgctgtcatgatgcagctgagatggaaaattttaggagatgaagctagtgcgtgtgtagtatacgtaccatggcagggatgttccagatcacgttctcggcgcacggtggcgtggtcagtgacccaacgtatctgtagtatatgtgcacgtgctgcctcatcgtcagcaagctcacagatccggcagggaccgggctgcctttctctgccttgcagccctccgcgttgagcgcagccagcttatcctgaatctatcatccatgaagggcaaaacaccacatatcaggaacagaggaagacatgctgctataaattattgcctttgaacggtagaatcgtagtgtgcaccgtgcagccacgtcatatgaatcgggtgatctacctgttcgaagaacgggtctggcctgccaaatcggtagagaaaggccagaacggtgatgttgccattttcgttggtgtgaaccatgtggagctccagtgggaacctgccagagaaaaaagttacaacgaattgtgatcactgatcagcacagaaaaggatgatccattccatatttccagccgtcgtctgcatttcgtctctgttatgtgcaggcaggcgcaaacctgaagccgttgatggtgtgctcggaaggagagtgccagtgcatctgcttcagcgtgtacttcaccccgttaatgctcagaacccctgctgcctcttcgtaccgcagctgaaggaaacaaaaacgactaactatcagaagactgcacaatcagaggagggacagagtagtgttcagtgcaagaggtttggttcagaacaaaccgcgacgttgaagatgttgtcgacaagagtagcatttgcagcggtataatttctatggagtggctccatattcagttcatgaaccaggttgttggtgtcgatgtcaattggggactgctgctttccgttcgagcaacgcgtgaagtcggcactcaaattcccccagaagtcagggccgatagaaccagtgtacccaaacttcacgccacctgcttccaatcaagaattcacatatctcacatcaacgataacgttagaaaatgataatattgcgaaacttgattgtgaaattgtccaaattgacagcagaaacggaagcaaggaattctgaatgctctcatgaaggcatggaaacgactgtaacagtagataaatacacaagcagagtagacagggttcagacaaatactcaatgcagggtagaagaatgtaccgctgtcacatgcaagggacgggagaaagagagtgcacagcagcagaacaaagatcgcatttccatgagaagctgccatcttttcctgcaatgcaataaagcctgcaaacggagaagaaaccacagggcaagaacagagagtagtttggagtcaagccacttgtagaatgagcaaatatataggcattgagcttaatcgcattgtcgcaaactggcaatgtcatggaccaaccacaatccatcttacctctactttgctatatgcagatcagcttcaaccctttggagtttggtccctggaaccaaagtggccgtgctccgactagtagatgttcctgcgaaaaggacaggcaaaagatgtcgattctctgcagccatcacaagatcgatcatatataaagtgtgcaatcatgctggggcaatagtgatctgacctctttgctcgacggctgcaggaatcttcgaaggccagaagatttccaagagcaagaacgctgctgctggtgaaggtgctaacttgggcggtttatccaccagagttcagaagacaccacgtatatatagacacagttttgcccctcttttgcagccgttctttcccacttctccctcttttttctgcagtgacatgacatgcaatttttgcgaggaaatggaggtagtgcttgtcgtggcaacaggagcacgtacgcccattaaccacacgtcctgcaagctcgaatgttgcatgcaatgcacgggagaggaggagatggacaaagcgaacggaaaaaaagattaaaatcctggccacgtctaggcgcacgactacacgagcgagcacacgacgacgcacaaagctcggggtgaggtgttcgtgttgcccttgcatttcgagaagtggtggagaggagagaggctgagtggcttcaccgaacagtcgtccaactgtccaaccgaaagcgtcaaagcggtcatggcctttcaactatacagatatcggatcaagcaacaaaaaccatcatcttgcgttgcttaattgagagtggaagaagacggttgagaagacatgttcagctttgtcaactcgtgcaacgccctaaatcttctatctatcttctattatatactaaaagtccattaaacttcctagaaaccctcctaagccgccacataggacccctagaaacgctcctacgccgccatgtggcgatctaataaattatagaaattctaagaaaatattagccatcgattttcatttaatatatggtaggcccattattttcaaccattagatctattgtaaaacataccaattaaaattatctccaaaacccaatattgccaatctttatgtgcatgtgcacataagtacggacgtttagtaggtattccaaaaaaaaaaggtacgtacatatattccaaggtaaaaaagtacgtacatatgtacataagcaggccgggctaacgacatctttttattttcttttttttcactcggataaaaaaccaaactgcccatattaactatgctctacttacgttgtaaaaatataggcacatatatgtcatcgaaacaccaatgagaagaaaaaattaattaaagtatatattatgtaatagttaaattagacttgcattttttaaaataaaaacaattctaattgtgactagcaattctcaaaagttacctactccttataaaaaataatgatatgtcaaactgatatcattaaatttatcatgaatgtgttttctctattcgtataatatttaaatatcaaagattgtatatattcttttcacaccatactgatctactttatcttctacttatgcttcatttgatctagctggatggctgagcttattcaggatacatgaaacgacacatatcattagtgcaagattaattaaatattgaatataataaatccaaaatagatttatttaatttttaaacttttatataaaatatattttaattatacacaagttgcttttaaatatatacgatgtaggttatggttgtcaatttaattatagtgcataaaatggttcagatggatttagatattattatcaaaagatatgtcttttgtaataattcctatatcaatgggtagataactgggaaaacaaggagcaaccaatctgataagtactctagaacttattgcttatttactaaaatgtttaatgtgtagtatataatatactttatgaataaaaaaatatcctaatatataatcatatgccaccacttatccataagtatataaattttatcaactaatcgtcaagtcatattgcttacgaggtattcattcatagtgcacctaataattagctaccatccaacgagcacttatgtcatgaagcaccatatataacggactatgctaagtggagaactatcaacaaatgataggtaaagtaaagcatgccaccaagccacagcaaataataatcgattacaagtatattgtcagtataagcaatagaattctacacttctacaagaacccttaatatatcacgtaatagatctcataaattagaaaaaaagtataaggaaaaatataaaaaagaaaatatctggtcatcaatttacacttcaactggtagatccattatttttaaccattatattggatatattcgagctaaaaaccaactaatctctccctatgtacgtacctatacaagagatgtcaaaaaggaaaaaaaaagaagaatgtatatatgatctgctccgtctggttgtttttttgtttctttctttgcagcactaaagttttcctcaaattatgcatatatatagtgaaactctttacgatgttatcgaaaaagtcatgccaccgtggcatcgcttcatgccatcccacaaaacttttttaaaatatttttttaactaatgatctaaaacgaaatcatagacactcatataaatatgtgcacaaccatcctacgaatatgcgcagtactattcacaaaaaaaaacaaaaatatacatacgtacaataaaaaatgtcgcatggaaacctattatatccttatataagtatgtcattctcatctaaatagtgttgacaaaattagcacaaataattttgacaatatgaattattccttcgaatattacccatgaatatacgtaggtgacttagatgtatagtaaaagaaaaaaatctaaacccatattaacctgtatgtttacgaaagatggtgatatgcgactttatgtatagccatgacaaagtgaaatttgtttgaatataatagattttatcaattagtatatcaaagtttataatttatttcacataataaatatttcttattttatattataaggtaatctatggttcttaaaataaatacggtaacatatggtttattttagtattctttctataaacaaaaaaataaattgcccgcgcatctgcgcgggcttcctttctagttacactaaacatgaatccagtatcaactctctttttttgaggtaagataatgagtcaaaatctagtactacatccagtagccaactggtttgtctggttatgagtatttctgaatttactgtagtccaaacgacaagcatgaaatcctatatcacttttggcagcactaggatagcaagattcatctctacgaatggctgacctgcaaaatggcaaaggacacatcatcactgagcagtctcagctggaggaatatatcccactatgtggggactgcacactgtagggctgcaccgaaaggaaaggaccacaaaattttcaggctccagagccccatagcacattctggatggcttcaaggatgaagaaaatagtatatgtgccttgaagagcttgacattgataaatgctagccatgtctcattgcctaccacttctttctttttttttttcgtcatcttttcttttgaagacttcattgcctaccacttcagcaggcaaaaaaagttgaccctgtcaatatcaagttatcaacaggctagagaatattagaacaggacaagacttaaagagcatatggcaggccaaatatataatcttttgataagagccacttccagctattaaaaacatggggattaccagttttaacttggtatattagccgccccataatcggtaagtggaggaggataaggcccatggcgctttctggtacctgcaaagcatgaagcggtcactattaagccgtccacaggtattattcagcgtgcaggcaaaatgcatggagcacactgtagaatgtggagatgcaacgacgacagcggaatgtgaatagcagagcatgtcaacagctacttgtcacgataaagattgaaaaaaatctgaaaattcattaaactttctatgaatgctcttaaaccaccacgtgacactcctacaaacacttttaagttgtcatatgataatgtctaatctcaccattgattttcacttaaattggtggacccaatattttagaccattaaattagtgtattgtttttgttaaaaaaagtgataccttcctcctgtattctgtgggttggaaaaagaaaaaaaaatgtaaatactttgtacgtatgtaccaactgaaaaaatgaagcttacctactattcaccggaagaaaaaaaaagtaggtaaagaatcgtacgtacagacttatgataaaaacgataaagtaaaaaaaagacgcacttagtagaaaaaaataatggtattttaaattaggtttttctactattttttataaatatattactctacaaatttacgcgaatgcgtcaacctccccggtgtgatcaaggtggaagacgagggacgggagtgggagtggggaatagggcatccaggcaacttcgcgctcctagatccgatggaggcagcgacgacggtccagctcaggattgggggtgggccaagtgatgagtggggtaggggcatgagaaggggggagcgcctcggcgatggtgacaacggtggcgaaggagttttcccatttgagttgatctctagattgtagacgaaagcgcgagcgaggagaggagggagggagggaagtagggagggagggagggctacgtgaggtgctaggggacggcgacgcctcggtcggctggaggctgcctcggcatggtgggcaagaggagcgccggcacaaggcagcacaccgagcgctgcttggcagcgaaatcttcagtggctgggccacttacatgttggcctcacatatttttttgctgactaggataccacgtcagcaaaccgcacatgacatgtcatgggacttactttacatggttttgaatacttgagggtagatatttctggtattggtgattagggatgttatacagattcaagtactcgacgtaaagttgagggatagtaagtggacttattccaacaaagttgaaacacggcctgcaaaagcccattaagaatctagcctgcgagccaaccgagaaaattcgcggggatgttcggctgtttcggtttcggcctgcgtaattgcgtgggggtgttgcccagtgcgcgaggagagaagcccacgccacgccacacctccctcgctctgctctgccctgacctttcattggcctgcctgatccgctcgtagagtggggtcatgctcacacacctcacaactcacaagtcgaatacgtgtctacgcgcgtgattcacctgccactgcccgtggtatgacgattgacgacggtggaagaggacatgatctatatctatactaatatttatatattaatataaaaagtacgagttcatccagcaatcctctaatccttctgatccactgtcgcgtaggacccatctgtcatccaaagaaaccgcaccacgcacggagaaaaaaaaagagacggtgcgaaaaaaaataacgcgcacgctcggcggacctaacccatcgccgcgccgcgccatccccacgctgcgccgcccgctggaactaacccacggcgccgccatcccccacgcacagcaagaaatcgctaatctccgcccccacgccactgctccgcctgccgcgccgcccgccccacgccccacgctgcaccgcccgccggacctgatcccgcctcacc

SEQ ID NO: 22470 - DNA, 9463 bp, Oryza sativa
gaggcggagatgagagggagaaggagccgaggaggaggaggaggaggaggaggccgctggtggatcgagaggaaggggaggaggatgagagactaagaggaaagtggcggtggatttttttaatctgatggggtttttaatatggcaatgttttcacagtgcagtgctcttagtggccgtcagcaaaatatctaatttttgttaggtgtcacttaagaggactgcttgcgaaaatgacatatctttgctggcggttcacgttacacaaccattagcgaaaatagtcacttaataggaccgcttgcaaaaatggcatatcttcgctggcagttcatgtttcacagcagccggtgaaaatgcattttcgctgacggttcttagcctccacccctcgttacatttttgctagcggcgctatcgtctggctgccagtgaaaaaaaaaaggtgccaccttgaaaaaccttttttttagttgtggcaccggcatgatttcatcttccttctttgttttagtttctatttgattcattgtagtttgtgtgttcgaatggaattgctatgaagtgtgtatatgaactgcaagttcttttgatcctgtcctgtgtgtgtgatcgctaaagaaatgtgtatgtatggaactaaattgttgtcgattacctcgggaaaaaaatgttgtcgattaacgataaaaaaaatgtcatataaatcaaattatattttcttttttcctttaaatgagtatcaatggcggtttatggttatcctgcatacactgtatatataaatgtcaccgaacaaaatcgaatgttttgaccatgatgcttatccaaaacgacagtgttcatcaacagatcatcatcagaacggtgaattcctcttacttttttttttttgcctaaaagagtaggttacgttgttgtacgggatcagagaactccggcctctttattctttgcgtatgcaacaattttggatgggcatgtgcgtgaatgaggcgaattttgagctttgggagagaggaagtagataggatcatagaaaacgagacaggttgacgatctctttcggagtccacaaaagtgctgaagacaaatgatccggccggtaggatccacggacggaggaacctaccaggaaatccctcctacgacaatgatttaattcgatctgacaactgtgtcatctggagacatatactagtagtgctccatatgggcccacgtatttgtactctttttcacacatgtgcatgcaaatagtatcaaaatcgttataaccgataataatattagtacggtatcagtttaatgcctcgcaagtactcatgctaattaatcttgttgttgaggcaggtaattcacttgttcgttatttttcctagtcaccaaaaacagagcatttaataatgttagctctactcattgatcaaatcaaacaggaggtcgatcaattttctttatgcttattactgctccctccgttttataatcctccgttttatattataagtggtttgacttttttatagtacctttgtttataagtttatagaaaatttaataacatctaaggtggtgtttggatccagggactaaactgtccctatcatatcggatgaatttggagtataaaacataaactacttataaaactaattatataaacgagagctaattcgtgtgacaaattttttaagcctaattcatccataattagtgcatgtttactgtagcatcacataggttaatcatggattaattaggctcaatagattcgtctcgcgaattagtccaggattatagaataagttttattaatagtctatgtttaatatttataattagtatctgtgataggtagggagttttagtcccatctaaacaaggtcaaaaatataaaattagttttactaaatctaacattaaatatagtttgataatatatttgttttatacgaaaaatatttctgtaaatataatcaatatataagtttgattagaaaaaaaccaaacgacttatatgaaacggagggagtgcgtaattggttgcgtacttagacaatcatgcatattcagaaggtcaagaagtcgtttaccagtgaagtcacgcggttggatttagtaaacagggagctctttaattacttcttcctttttttcaatatatataacaccgttaacattttgaaataaatttaaccactcgtcttattaaaaatatatataattattatttattttgttgtgattgatttatcatcaaatgctttttaagtatgacttaaaatattttatatttgaaaaaaattaaataacacttggttaaacgtttgtcaaaagtcaacaatattaaaaaagtggtagtttttgctaaggctttgtttttccaatatattttttatgagtatgagaggggcggggatttatccgtcccttacttctttttcgcttgtatacatacatgcactcttttccaatagataacacttttaaataatgattttgctatatctcacacgaaagattttttcttatctctcactcgattttctcactcaaatttacagtgcattttcttgtaagttacagtgtaatttatgaaacttacactgtaacttttgtaagttacactgtaatttttgaatcttcgcatgtaaattttaaattttgtattggatttggtctttttcttgaggatatggtaatttagtgtccattatggtgtttcttaattgctttttgctttttattatatctatcggattttaatctaaagattaaaaatctgtgtgatacgatcgtaaaaatctttcgaaagatgtataggtactccctttaaataatatctaatcatttgttttattaaaaaccattgcaaatatgctaaagtgtaggtcatatttatattttttaatgataaaacatgttgcaataaaataaataatatttatatagatattttaattaggaagaatggttaaacatcgtgtcaatagtaaatattttgctcgcacgtcactatggcaaaggccaggataaaatacatcttgtgcaacgataaaatatcttctttacctacaaaaaaacactaaatcggacaggaaggacgcaatttgcagatatagtacagtttggactttggaccaatgattaaatcacaacaatccagtgggtttgctgttggcttccaacttgcaggcagcatttgtgacaactgaaaactaaacataaactgccctctcgtggataatcctgacgtcttgacgcacgtggtggtccatccttcacattggcgtcagttcagatttgttatatcaattgctgatgcttttcttttgtctcgtagtactaaactaaactgaatctggttttgacaatttctttttccaatgcagatagtgtttttcttttttcttttttgatttctttcttcttgatttgttttgcgtggagtacaaatagtgttttctttttctggaggtgaagcactcctttctcaatccgtacgtcaaatcactcaaggcgtatatacattatttattcgtaagattcgcagccaaacgcgttttatgtggtatcatgatggttgtagtctccgcggcgactttgagtaaaaggagaggcaaaatttggctcgttttgatttgattattgaacagatttacagattattgctaagaattagtactatctttgtctcagtgcagttgtgagattccgaattcaacttttaaccgtatgtcttatctgaaaaattatattttttcaaaaaagaatagtcacacataaagtattattcatgttttataatctaataacaacaaaaaaaaatactaatcataaatttttttaaataagacggacggtcaaacgtttgatataaaaaaaatgaaaaactataatctttctaggatggaggttgtcaggttacggataaggtataccctctattcttagatgtacgctatacgacaatataatatatctgcgcgtatacgaacgttctctatatacgctaaggaaattcatcatggagtccacagatggaaagattcctacccggataggaatgggtcgttactgtatcgtgtagggtccgatgtctccgagtcctacttggaaaccacctgacctgcggtataaaagggacccccgggaggacataaggcatcgaatctcataaataagacaaccaccacagcctacgaagtcaaagcctacaggagccaagccgccgggtgatctagccgaaccaactcgactacgatctcgtcagtatcatcgagttctgtcattccctttgtaatttgtggttttcactatataatcccataccaactgaattagggctattacctatcaaggggcctgaaccagtataatctttgtcttccattttcttgatgtcgtactacgtagatcctcgtaccagcgtacccaataccctctatatctggtctacgggtacccactgtcgacagtggcgcgccaggtagggggccttggtgctcaaggttctactgctatgacatcaagcttcgtcgacaacagcgtcaacaccggccccatccaaggagtctctacttcaacaatgctggtgtggactcaagtcggcgaaatcgtcttctcggtttacaccacggtactaatctcggctggtccatcaatgaccggaaacgagaacgccgtggctataaccccgggcgactccatgtcgaaggatcctcccgccgtagcggagaacggaacgtcgacgtcatacgagcccgagaaggttcctagtgcggccaaaccttgtccttccgacaagaaccacgagccgacaaggacaacttccgaggtaacaaagccctggtgtcctatccacaagtccatgaaacacaacttgcaagcttgctgagtttttctcaacgtacaagctgaaattcgtgcctgcaaggagcatggaatccagcgtacttctccaactcgtgatgtctattgtcccattcacaagacgaagaatcacgacttctcaagctgcaaggtccttctccgcgccatgaagacgccgcttcctaaggtccagcaatcagaaatctctcttaaggatgcagataaggaacaaggagcgacgttgatctcgaatcgatttattggagtaatcaacatcgatccccacgagccgtcagtcctacacttgcttgaagactatggctcgtcatcctccagcacaccacgtgacgtgtttgccatcggtgggactagcacgtctatgcacactaacgcagagacggggaaccaggcggtcacgctggcccaacacctcgacaccatcaatgcaatactgagagaaactccctatgatcctatacttaacgatgatctcgcacgatagacagaaccactatgggaatcggtagccaatctcagtaacgcgttcgaggaggccgctaccagagcacaaccagaacatccgacagctggcggtgccgacggcgaaccaccggagcaacggacgtcgcctagacgagctacccctccacctcgcggcaccggcgatctccatgaccatctgaatggctgccgagaagcacgacgcgcgcgagacaacgagaatcgttcccgacatcgtgtctcttcatgacgtcgcgagaacgaagagcgaggaggccgctcgaacgaagaccgactccatgataatcgtcacaaccgccatgaccgcgacgatcgcgaacagcagacgccggacgatactggtcgaggacgccgacatgacggtgatgataatggggatcggcgccaggaaaacaatggtggacgacgacagaattctcgagaacccgaacgtcgctctcggaatcggacaccggagccgagtgacccatcgtcatcatcatcatcgtcatccggtagacatccacggaggacatatgatcgccaacaccccaccgcccccagcgccgggtgtagagctttcaaccgttctctacgtgatgtccgatggcccgagagattccgacccggggcaatagagaagtacgatggcagtaccgacccagaagaattcctccaggtctactccacggtaccatacgctgccggagcagacgacaatgcgttagcaaactatttgccaacggcgttgaaaggttctgcgcgttcgtggctgatgcacctcccgccctactcgatttcttcatgggcagatttgtggcaacaattcgtcggtaacttccaaggaacttacaagcgccacatgatcgaagatgatttacacgcgttaacacagaatccgggcgaatctttgagggactacgttcggcggtttaatgattgcagaaatacaatccccgaaatcaccgacgcctctgtgattcgcgctttcaaaaccggtgtcagagatcgctatactaccctggagttggcaacaaggcaaatcacaactactcgaagattgttcgaggtcgtcgatcgatgcgctcacgcggacgacgcactgagacgcaagaacgacaagccaaaggcggggggagagaagaagccagccaaggacgcacctgaaccaagcaagaagaaaagcggcaagagtgggaaaaggaaagctcaagcggaagtcttcgcgtctgaatacgagcgccctcccaaacacccagacccacaaggcagtgacacgaagagaatatggtgccccatacacaagtcggacagacattctctggaggattgcctcatcttcaaaaagtcgctggaaaagcaattggtattgaagaagggcaagcaagtacgtgtcgtcgagaaagccgttgaggcaaccactcaggactcagactcggcatacccagattccgatcttcatgtcttgcacatcttcggaggttccacggcgtactcctcaaagcgagaatacaagaaagtggagcgtgaagtttgttcgacatggcagggggctgcacccaagatgaagtggtctgaacagaagatcgagttttcatatgaggaccaccccaaggctattgttatcccaggatgatatccgatcgtggtcgaacccactattcggaatatcaaggtagcgtgagtcctcatcaatggcggcagctccatcaatcttctcttcgccagcaccttggacgcaatggggattccacgaagcgagttgacacccaccgatcaacccttccacggaatcactcctcagtcatcgtccaagccattgggaaagattacgcttcctgtgactttcggccaagcgagcaacttccgaacagagcaaatcacatttgatgttgctgagtttgacacagcatacaatgccatcatcgggagaactgcactcgcgaagttcatggccgcatctcactacgcatatcaagtactcaagatgcctgggctgaagggaacaaccactattcaagggaacgcaaagctgacggtccaatgcgacaagcggagcctcgacatggtcgagcacacgcccagcctacccgccacagccgagccacccaagaaagtgagcaaaacaactaagacgccaaaaccagacggcgcaatcaaaatcgttccactctccagtgccaatcctgacaacacagttaagatcggggcatcactaaacgagaaataggaattcacgctcatcaacttcctctgcgacaatgctgatgtgttcgcttggcagccgtccgacatgccgggggttcccagggaggtgattgagcacaaactcatggtgcgacccgatgccaagccagtaaaacaaaaactgcggagatttgcaccagatcggaaacaggccatacgagaagagctcgacaaacttctcaaagctggtttcatcagagaagtactccacccagagtggctagccaacccagttatggtgcggaaggccaacgggaagtggaggatgtgcgtcgacttcaccgacctcaacaagacgtgccccaaggatcacttccctctccctcgaggtccgacacgtataccaaaaggacaacattgaaccagacgatctggcacggcgtgcgtccagacgagagccactcgaacccggcacctttctagacatcctgacaaagccatcagtgaaagaggcaaacgacgaagatagcccagtcgcccccgacatcagctcgggggctacagaggcagagcgcgccgttgccgacatcgagaccacggacgactggcggaccccactcattaaattcataagcagtgacgagttgcccgaggacgatgcagaagccgagaaaataacccgtcaagcaaaaatctactgtatgatcggcaacgatctatacaagaaggcgccaaacggggtacttctcaaatgcgtctcgtccgacgatggcaaacacctcctcctcgatatacatgaagggatctgtggatcgcatgccgctagtcgtacattggtcggaaaagcctttcgacaaggatttttctggccaactgccctcaaagatgcttgcgacatggtacaacggtgtgaagcttgtcaatttcgtagcaaacacacaaagctaccagcataagcactgcaaaccatccctctcacttggccgttctcatgctggaggctcgatatactcggtccattcccacgaggacagggcggctacaaattcctgttcgtggcgatcgacaaattcaccaaatggaccgaagcaacacccacgggggaaatcagggccgataacgccatcaaattcattaaagggatattttgcagatatggattgcctcaccgcatcttaacggataacggctcccagttcatcagcgccgatttccaggattactgcatcggactaggagtcaagatctgcttcgcctcagtttctcaccctcagagcaacggacaggtcgagagggcaaaaggtatagtactacaagggatcaaaacccgagtctacgacagactcatgtcacatgacaagaagtgggtcgaagaactcccctcggtactttgggccgtgcgcaccacaccgacaacgtccaacaaggagacacccttctttctcgtgtacttctcagaagccatgctccctaccgagttacgacatcagagtacacgagtacagaagtactccgatgaggatcaggaggaatagcgaaacgatgacgtgaacctaatcgaggaacatcgagaacgagttgccgtcagggcagctagctaccaacaggctgtcacatcctgattttcgtttcaggatttataaattatttaataaaataataatagaatttatattaaatgacctttaatttacaagtgaagttaaatgtgggaaataaaatttcctaaatataaagcatggatggatttaattttttttattaaattctccatgattaagtcaactctctgaaattttctcggatttttcagagctcaattcctaaatgttacaaagaacagttcagtaataatttgatcattaatgatctaattataattgttaagagtttttcttgt

SEQ ID NO: 22471 - DNA, 29111 bp, Oryza sativa
gagcctatactatgccatcctctggtatccttgagcacttgcatatttgctgtgtggcttgctgagtatgtcatatgctcatccttgcaataatcaatcatcctcagttgaagtcaagttgcgaaggagaagacgtttggcttataccccagttgagctgcctgtgggagtggagccggagcttcgctagattttatttttccgctgcagttttcttcttggtgaggactaagtgcctcttaagtaagtatttatcgttttagttaatttgatgaatctgtatattaaattgtcaatttgtgtacctcggctgattcctggacgaggattttatgcacaaataagtttggaaattactagtgaatttccgggcgtgacaagttggtatcagagccatctcgactgtaggataagccaaatggtcaaaccttaaggactaattttccgaaaacatgatttttgaaaattttcctttcttccttctctagaattctctataaatcattttatcatcctcttccctcctgctttcaacttgagtagttctaagacattgaaacttgaagacgccaatgaggtctacttatggaggttaagtaaagtggatcgaggaagaactgaagtgcccagatgtcaagatggaatgaagttggcatcctaccttagaacctatgccgccaaagtgtccttggagaatagttagtagggtagaacgcttgttgcttgcttgtgtgtaggtatggttgcattcccgtcattggagtagttcagtgatgagcgtgtaactatactaggttgcttgcttaatcaacttaaacaatataatggtctacacacatcagatcagtgttaacctggttaaggtcttgtctttagtgtaactcctctcctcctatcttctctaatctgcaacagatggtgaacactcgtgccagtggaagtggaaacaataacaatgaagggaacccaactcttgctcaagttctggctcaacagactcagttaatgaacatgatgatacagcagatgcaaaaccagctcaaccaagggaacaacaatgctccaccgccgcagaacaagttagctgattttcttcgtgtgaggccacctaccttttctagcactaccaacccagtagaagcaggtgattggctacacgctgttgagaagaagttggaattgctccagtgcacagatcaggagaaagtcgtgttcgtttcacatcagttgcaaggatctgcttcagaatggtgggatcatttccggataaacagagcagaaggacaaccaatcacttgggcggacttcacggaggcattcaagaagacacacatacctgtaggagttgtttctttgaagaaacgtgagtttagggcattgaagcaaaaggatcataccgtggcagagtatcttcatgagttcaatcgtctggcacgttatgctccagaagatgtacgtactgacgaggaaaggcaggagaagttcttggaaggcttaaaggatgaactgtcagttacgttgatctcccatgactatgtggattttcagcagctagttgacaaagcaattcgccttgaagacaagaagaacaggatggataaccgtaaaaggaaaatgactgtattccaggaggcacaaggtagtagccagaggcagcgtatcaagccactccaaattggtggatcttcttccgctggtcaaggacagtcgcaaccgttgaacatcggtggtgagatcaaattagagactaatgaaagcaatgaagttaacattgagcaagctaatcagccggtgccagttcagcaggatcagtctcaagagaataacagtagtggaagggagcagcaggtatgtttcaactgttacaagccaggccactttgcaagagagtgtccgaagccgaagcatcagcagccgcaagtcaacaacattgtcgtcacaggagccaatgcagtgccagttgcgtcttcaagagttgcgttttcaagtgttacagctcagccaccagtttcaaagcggcagtagttttctttaaagccttagaataattatcggagttatggaataagatagattgcagtttacctatgcccttttctttctagccgttccgaatctcgggacgagattctttgtaaggggggtagtttgtcacatcctgattttcgtttcaggatttataaattatttaataaaataataatagaatttatattaaatgacctttaatttacaagtgaagttaaatgtgggaaataaaatttcctaaatataaagcatggatggatttaattgttttattaaattctccatgattaagtcaactctctgaaattttctcggatttttcagagctcaattcctaaatgttacaaagaacagttcagtaataatttgatcattaatgatctaattataattgttaagagtttttcttgtttaaaaatccttaaattataaattgttgtttaaaaggaattattagaaatgattttaaaagcctagaagagaagatctaattttaatttgttaaatctcaatataaaattgggctagataaaatttcattaaatactttgcttaattctataattcctagatttttctgggatttatttgagctaaggaagtatttttaataaatgggattgcatttcatgaataatttaaattgaaaaaggttttaaaaagtcttcttttggctttgggccgaaagccggcccaaaaccctctctctctctccctcggcccagtccggcccaatccgccgagccgccgctctcctctctctctcagccgctgacaggtggggcccgtttgtcggagccgtcttcctccttcggccgccgccgcccgaaaccctagccgagcgccgccgccgtctccttccaaaattcggtcgatcctttccttctccggccgaattgatagaggggaaatgatccttgagatctcctcttccttttctcttttggaatcatcgcctaattcggtttggaaatccgtggattcgagttcgattcggatcgacctctctcctccgaaccctagctttccttcgccgtctccggtcgccgtgggccttcgtcgccgcctcctagcccctttaaaaggacccccgagctctcctctacccgctgcctctctcgccttcgcccgccgtcgtgtgtagcgccctagcctcgtgagcttttgcgccgccgtcgccgccgttcgtccagccgtgcgccgccgtcgctacggtcgtcgtcgtcactcgggaaggccaccgtcgggatcgccaagtcgtcgccgtcctcgtccgccgcttcgccgccgccgaagaccgccggagcaccgtcgccgccgtcgacccgatctccgccgccgcttcttcctcgtcgccggcgctgtccgttgcccttccgccgtggttttggtcaccggtgagttcgccgcgtcgccctctacccgttggtgccctccgttcgcgtcgtcgagccgtcgttcgccggcgagcttgcgctcccgagccgccgccggagctgacgtcatcgctgacgtcgtcgctgacgtcatcgtcgtcgccctctcccgtgagccggtcgtggaccgatcgatctcggccgtccgttttcgtgaaccgccgtcgtgcgcccggtccaccgaaaccctagcccgctgacgcaataatccttcttttccttttcaaaaataattcattattgcgtcataattcaattaaaatccatataaaggttttaatccgatttaatctttaaaaattcataactaattctttgtaactcagtttaatgtggttcaagttgcaaaagttgtataaaataaagatctacatattaaaattgtccataaattgaattaaatttatttaattctttttaaatgggctttaattatatttaatcttgtaaaattcataataaattcatttgaagtgagaatgaggccgttcaagtctcataattcatctaaaattatgatctacatgtttgtttactttttatgtattgtttatttggttttttattagtctttttcttcgttttgcgtgttagcttgtcgtttccgtcgttgcgaaggttcgcgagtgcgccggaagtgttcaagaagattaattgaagaccgattattgcaaggcaagtcacacagatcctaaacacaatcctttaagcatgttgatcctatatttaaattctctatttatttcaactgtgcatttattttcgaatgtcaccgggtggtgtgaacttattcctttgttatggccaatttgcattgattactttattccttgataccttgggttattataacttgactagttgggctttatatattggttcagctagatattagatatgattgcttagccatgcttagaaacattagcacacaattgggataactaatgtttcactatcacttatggttatatttaatgatagttcacgatggtcaatcgtgattgattaattaattacttgccaactaaaacttgataatggtgggttgtgagcacatggttttgagagtcgtgctcatgacaattaaggaccggttcgcgagctactattgtgaaacattaaccgtgccaaccacaagccagcgtgggcaacggctttaccttttgtataacatggttcattgcggagcacccgactgagaagtggcggagataagcccacgggggtcgctggggagtccatgccttgttttataagggggtgattatgatccaggaatggtgcactgtggtgagttgtgttgtgcaaagggtattgtcacagcctctattcgggtactttccagtatcgcgacgcatggttgacatgatgttgaggctgtgtcttgtgggtacagtggtacacctctggccagagtaaaactattcgaatagccgtgcccgcggttatgggcgggttgagcaatgtttttcgtgattagtcccacacctctcacaatattttttgatgttatacctggtaataatttgcttagctcctggtttggagattagatctgtacagccgggtatggttgttcaggatggttgggcctgtgcagcatgggtgtgctgttcagtgttgattaaaatttctgattaattactccactgttttatttctcttaaatattttgctaaacgctgcttttgcaaatgagcctatactatgccatcctctggtatccttgagcacttgcatatttgctgtgtggcttgctgagtatgtcatatgctcatccttgcaataatcaatcatcctcagttgaagtcaagttgcgaaggagaagacgtttggcttataccccagttgagctgcctgtgggagtggagccggagcttcgctagattttatttttccgctgcagttttcttcttggtgaggactaagtgcctcttaagtaagtatttatcgttttagttaatttgatgaatctgtatattaaattgtcaatttgtgtacctcggctgattcctggacgaggattttatgcacaaataagtttggaaattactagtgaatttccgggcgtgacacaggcctccgccggtatcacgagaagcgcatccgagcacgcatactttcgatcggcgactacgtcctccggcgagttcaaagccaagcagggcgaaacaaactctcgcccaaatgggaaggaccgtacacgatcacacaagtcttgcggctaggcgcattcaagattgcagacggtgatggtcgcgagttagcaaattcttggaacattgaccaattgcgtaagttccatgtataagtcaatagtatccatacttgtaagacatcttacaacttcaataaagcctgttttcaggtacagatttcaatcaaagtgtcccttcccgatgatcccttacccagatgacacctagcgttgaaacctgtagacccccgattttggaaatcggaaatcttctgtgtttatccatatcaatccctggatcagtagttggtacacacatacatagttggatcacaacatatcatgaatgaattcaggctaaaagagttaaatacttacattagggccaggtaggccaacaactatcagagaacaacagcggaagacaaaataatataagggcccggttaacatgccacaggcagtcgactggggaacgagacctagaacaagaccgcactccgatcatcttgttggatacgcaagcgtaccaacaagggcttctcttcaacactattctaaaagatatataaatagcaagggtgagtaccaactgcactcagcaagccaccacaacaacaatgcatatgatagagggtatttcaaggaagggctccaggttcttttgcgtaaagcaagcttttgcaaatcttttcacaagcctgagacctagcatagactgatcaagttttaataccagtgttcacattaaacaacgacggttctatccaccatccattgtaattccaaggatagcttcccgccattgagtcgtcatggttttctgaggacgtccaccttccctcctctcaggaagtggctccatcagcataaaatcatcatgcaataacccatcccacacaagttaagaatttagagtctagccaagtgtaatacacgtcccggtgctcagtaaccgtgagcacggctattcgaatagatttggtttactcacactgcagtggatgtacacttcacccgcgctctgcgactgcccaacacatgagccttgtcccaacacatgaaacacgtcacggcaaagctttcgataacctcgcattggcagtacccgctccatgaactttagccctcatgcactctaggcgtcatacgtttctagcagtgagaggagttctggcgctcccggaaagggaaaaacacacacattcctacgttgcttcttgtcgttgaacccagtccatcatgattgttctcttatgggtatcctcatgtactattgccaagccagcctctgaccatccggaacgggcatccgccatccacctggccatccgaactgggcatccgctagcagactgcttgccgcatcacacacctaaaagaagaccactacgcatggatactgcctccgctcagctatctactccgctaggtctatacccatacgagaagtgcggttgtacgggggtcgtttcatgcttaacttcatggctcggtccttaactgaccagggacggcactagccttttccggacaccacccaaatcctctagccaccccagtcgaaaacaattgtttcactttattttcctttcacaaatcatgtcatcaatatcatggcaatgtggcgctcatgtctccacatgccgcatctcaattaccttcccaaaggtaattgcccaagcatatagcatttgataaatatgagtatgcatgattctagaatacatttctaagcaatggtcatagttgactggggactcatacgtaatcatggttacaaagatttaagggtaaacaataatcaaggcatggcatattaacaagtaggatgttcattattgcatgcaattttatttgtaaacaaaacaatttcgcaattgggttcaacatgttcaaggaatagtgatgacttgcctgctcaggataattcttattattgatataatcttgatcaaccttcacctcctggaagttgcagacgttgcctcacgactaaccgatacacaaggtctataatacgcgagaaaaaccaatattcaaacaacaagcaaatatgcacaagcaaaatacaatgtcggggtcgaacctagggttgctcgtactattattgcttgccaggggatttcaatcatgctaagggctaaaattcctttaatctctttctatcgtcatcgttgtctatttaggagttaaccaacatagcatttatgggatacatatttggctaatatgtggtttagtctagcaaatggctatatatgcatctatctaaatagaacagttatacactagaggttctgttgccggatggattttggatcggtcaaataattactgtgaatcatttgtattattattttattgatggaggctttattttaattatgtacgtattttacttgtcaaaataaattataaaaggttaacaattacccatgctttgtatgttagaattgtttaggttaatcatattatggttacggattatcccatcacataattttacaataaataatcctgatttacagttgagctataattatatgaggtcaagatttataactagtatttatctaatatacatgtttatcatatattcctttaatttaatacatgcaacaagcaaattgatactataccgtatagctataatgtgatgtacagtatatgtgtatgcacaatatctatcttaatattgaatcatttatttgaatagttgctatttactacaagctactcactgcatgtgattttaagtggatttatgagtgggttaccatctatacaacttaagggtcaattttcaacctaaacatatactactatataggaaatgccgttaactaacttcgtgcgggtgattttagtcacactagctctgttattatctctcatagacatgttattatccctaataaacaagttgaagactcatctacgtgtgttcaaatttagtcacaaagtatgaggctaaacattatttatacaatttggacgtcatgagtatagttatatattgacatatattaataaatggcactagtatttccaatgctttaattaatttgaaacaatgctcctaactagtttacataggttttatagtgaggaagcgtgttaaggacaattatttgacatctactttacagtataatatcaattttatttattagcacatttttaagttaactattatgcatcatcttgatattaattatttaatatttataaatatattttatcaaatagtgaattatataccattggaaagcttatgaatttagatgaatttaggttcaagtttcactcaaatccgagttaaaatgagagagttatgctagtttaaagattcaaatttgaataattgcaaaacagtactgttcctaactcatttatttttattccataatttacattgactgacctgtgggaccggcctgccatggacacaacatatataagtgaattttcatagattttaatcatagggaccccacatgtaagggacttaactaataaagaccaaggggaggattactatttactaatcacgtggggcccactctaacctctctcctccattctcttttctctctctcttctctgttttctctcttctctccctctctcacggccgggcggcgcggcgcggctaccagcgacgaagggaggagggagggcttaccggaccgacggcgacggcggcggagacacggcggcgaggtgcggcgcggcggcggcgaggcgccagggcacggcagcggcggcgcggcggcggaatgcggcgtcggtggaggggaagaaaagggaaaaaaaagaagaagaagaggggaaatggcgtggcgagggaagggaaagggaaggggtatttatagggcacgggggaggggcggccggctttaaacggcgacgggtcggcgcggcgtcgtggggctcagggcgatggcgacgcgcggcgacgggacggcgcggcgcggcgatgggacggcgggcacgacggcgacagtgcgcggcacgggcggggctcgaggcttgttggcgacggtggtgacgcgatggcgcggcagcagcacggggctcggcgcggcgcgggtaacagcaacggcgacatgagcggcgcggggctcggcgcggcgcagccgacggcgacggcaacatgagctgcgcggagataggcgacggcgacgggcgacagcgacgcgcgcggcgcggcaggggcgcggggcgcgaggcggggcgacggcgacagcacgcgctgagggaaggggcttgaggcgacgcgacgcgatgatggcgacggcgacgtggccggcgacgcgacggcgatgggacggcgcatggcagcacggggctcgggggcgcggcggcgatgggagctcggggctcaaggccggctagggcggcgcagcagtggggaggaagagggctaggatggctaggaattccatgaaacacctcatgtgcaatgaatagtgctatccctaattaaaccctattttagccagtcttctatactattttaatcctataaactctaattttacttagttaaatgttaactaaatttaggcactaaatcctcatgaaaatttatccaaaattattaccacccatatttatttatttatcacacaaacgagttctttttagattaatttagattattggccctaaagtgaacttatatatttttgaagactttggggtaatattgaaattaatataacgatgtgtccttattaatacaatggcatatttgtcgagtttctttgtatagcattatattttacacggatagttttaatctatttattctacaaatagcaaattgagactcggtacaatattaatctaattgtttaattaaacacccacgtggacctattttatgtataaagcttattttatttatatgaccattattttatatgagtgttttgatcaagtgttcaaatattaatgtatatatattcccatgaaatactcatttgtaaataggatcattatagtggtgatcgtcatttcatgtggatttataatacttcatgtgagattggatccaaatacattagatttaatcttactatcccattagttagttaaacctgacatcggcctatcaaaatggttcgaatatttaatatttgatttgtgatttataatagaaattaacatttgacttgtactttatttggcttgctttcttgtgcactaatatttgtagggttaaacgtaaataatatattctcgtaaattacatctattgattaaatgtagatcttttctttactttctttgtgattacttacggtttggcaagcaacagcaatcataacaaccagcatgatgcaaaagtttttaaaaagttcgaaattttagtgatttttattgtcgggaattttcaggatgttataaaacctatcctcatgtccctttacgcagtcttgataaggcctccgaggaacctaagggaacttcggctggggacgcctagtgctgataaggccttgtcggatcctatagagacgaaagaccatgtaagatctggtcgtgtaagagttctcgccgtgcgtattaactaggacgtgtaatcggaaatggactttccaacttcacggctgggggttaggatcagtgcttgttcgagtaaggcaggtcaaaggtcccagagccttatcttccgagaagaattctccgatgataaggctggggcctagggagagtgtataactcaagtgactgatcgaagtcgcgaagtgagaaaacactcgtacacactccatccggagtaagaaagcttagctagatagattccttctctattttcaagtatttcttacagtccacaaaaattcaaaatatattacactctaccctgagatatttatcacaagatacggagactaccaagaaggccaacgccagtccattgactgaaagactttctccgcaagcggcgccatcgacttcgccagctggtctatctctgcatcagttctccaagaacgtgcgaacccctcgtggaggaactcaaggcgcagctgtggatggtgatctcgtatacaggccagcacatgccctcctgcatatcggctcgaccgacgacactcctgcttcaagacctcgttgatacgcttgtcgataccttcaagctgggcgttggccccgttcagccacgagatgtaaccggccacagactcctcaggatcctcgcaaggtactcggagctccttgcaaactcccgccatggctgtgcagcaactccggaggtacgagttgaaccacacctcgcgacctcgaagtgcttccacggcccgatccctcttcacttctaacatagtcctctcgagttccgccacctcaaacttcgtcctccagtattggatgtgacgatctcggtcggcaagcgcactctcgaggtctgctcagcatggaaacgactaagtcaagctatcttcctctctcgagaacatggtgaactaagtcaatacatacggaagaacgaaggggatcgaaacaaaaagaaccaacctaaggaagtcgtcgccatgcccgtctccacgggcagatcctggtccacgccgtcctgcggcacatacagctcgagcgcgagtgccggagcgattacaggcaactcaggctgcccgcgctgctggacatcctcgacatcgacgtctctacaagcaatataaagtactcagaatcaagacgctaaagaaaactaaggcgataactgcacacacaaaggcagttggaaccaacaaaagttttactaagcgggattggttaaggggtacaggcaagttgcagtcctactctttaaaaagtgggagaacagactctcccagatcaccgacttcttccatcacgtccttacgcgcgtcgttagccgccccctgatccaagatcttctggagatcgagtttagggtgcaccaacctcacgcacgtgaggacgtggcacgccccgatgtggatcccgttggacgtctcctccccgatcctggccgcgtgcttggaggggatcgcctccatcgccatcaccagttccgcgagcgaagacgtcagcgagaactcgtcagggttcgccgggatggtggtcgtgacaccacactccttggctagctggtgtaggccggtgtagttgacccgcagcgaaccacagacctccgacaggttgttctcgagttccgacatgcggttctcgagcccctgccgttgccgctcgttgcaggccaccagctccctcattttctggaggtcctcgcgaacctccgccaggtcacgcgccagcttgtcggcgcgttcgttaaccgacgacgccgccgccgcccttgcctccgcgatctcgcgacttatgccacgagcgccggcctcgaggacgcgccccatctcgacttggagctcctcccaggtgaggacgtcagcaggcgggcctcgagcgggcataagatcgctggcagggccgctgggcgtcacctcacggctcatgggcacgaccacgacatctgtcgaggccactgcaggagatgcgctggaattccctccagacccatcttgcgccgccttcgcccgcgtcgccctacgaaagattgccatgttggtcatcataacaagctactagaatccgatcaagtcaatgaccttaaatttcgtccacttacttctcgccgagtgtcaccagcctctgccgtcgtggaggcgggggagacgcatccgaggcctaagtaaaccaaagaggcttaccgatggggtgggcgtcttccgacggttgccgagcacggaggaaaacttcctccctttcctcggaacttagccaccactggtcgtggtagcagcagcggcaatggccacgtcggaggcctcctgggcaacgccctctttcaacgaagccgccgcctggtggtccacgagcggcccattgacgtcagtcagagggagagcctgcacaacatgaagtcacgatgcgatctaaggggtaaaagataaagggtcatcgattacactcacgttgattgcggcttcgcgctcagccgcccctttctcgcaaagaggggtgggggtgttgctcgccgtcgtggggccactgaccatcacgtggccgacacggcgctccacggttgcgctgttcaaacctgtagatcgagaaccaaatttcgataagtcaggaggaatgcgcacgtaaggaaaggaacccagaatgcaagaaaaataccccgaggagaaacacgggtcgcgtcctccggcccagattagtcaaaggctggatgggctcgagcctggagcggctggatccgtctaccaatgaagtcggcagcgacttcatacccccgacaaccctcgtactcggaggtcatcgatgatatcgataaaagactgaagggatggggtcaaggcgggtttggcggtccaagacggaatcttgtctggttgctcctcaggaacaacaaagactggatccgaatcttctatctgaagatagaaccacctcgcccgccatttactacgagaagaggggcactggaaggggatgtatcgcgacttcaggccatcccgaagtcgaaaaccaacacacccggatacctttttaggttccatccaacgcaactcatagtaaaaacgaaagaggtcaagaaacagctctaccccaatgtaggcctcacagagatgggaaaaaatgctgaggaaggctatggagttggggttcagatggagtagagaaagaccgtagaagttcaagacgagaaggaaaaactcagaaggcggaggaagaaaaccacagagaatatagtcctcaaccgcaaccatgcggcccaggacggattcaggttaagtacctcctggttccctctccatggtcccgcgaccggggagagcgccctcctcctgcaacttcttcacggacgcactagtggaattggacttgtcgaggtccattgccgttggagatcgccggagaacaaaccgaggcaagcgagttagggtttgcgtggaagcggagaagacgaagagtatttggaggctagaaagttttcgcaacagccggactccaaaatggattcccaaaactcccttaaataggcgcactactgacggtgcgaattccaaggaaaggagatagatggccgccgaaaatttctgggtccgttgcgcgaggcggtttttggacttcaattttaattcactcataaccgttgaacttcgcatggtgttgtcgaccactccttgtctctacggttctcacaccgagatcaaccagtcgagaacgacaacaactccgacatcagaagtcgctatcggttacatgagttcatttaagcagaagtcgggggctactgtcagggttacggataaggtataccctctatccttggatgtacgctatacggcaatatggtatatttgcggtatacgaacgttctctgtatacgctaaggaaattcatcacggagtccacagatggaaagattcctacccggaaggactgggtcgttactgtatcgtgtagggtccgatgactccaagtcctacttggaaaccacctgacctgtggtataaaaaggaccccctgggaggacttaaggcatcgaatctcataaccaagacaaccaccacagcctacgaagtcgaagcctacaggagccaagccgccgggtgatctagtcgaaccaactcgactatgatctcgtcggtatcatcgagttctgtcattccctttgtaatttgtggtttccactatataatcacataccaactggattagggctattacctatcaagaggcctgaaccagtattatctttgtcttccgtttccttgatgttgtactacgtagatcctcgtaccagcataccccaataccctttatatccggtctacgggtactcacagtcgacagaggtagtatctactcgatcatagtgataaactaaatattttatttaaaaataaattttataaataacttataataagtggtctaatcaatatagtatgagatttctttaaaaaaaacatatttcttaaaacatggagcaattatccgtttttcacaatccgataaataagttgaaaacaacaggacaggagagttaacacagtaaaattttcatggttattaactttgtaactctgcgatgaacttggatgagatattgttagaaatatggtcataatttgatatattttaatctagaaattaagataataaacatgatatgtgcagcaggaattaatctagtaaaagtgctaaacattaacatgctaatgacttgaaaagtatcatctagaaacatgtttagcactatagttagaaatgtgacatacccaaagaacgctccggtaccgtataatgcattattggtgttgctgcttccgttgatattgatgttctcgccacgacgccacctccaggtgtgtcattgccaccacctctaggtgcgtcgtagccgccgcttccaggtgcgtcgttgccgccagtgcctccaccattttctcctcttgtagatacgccgatgtagtgaaagtagttgaagcggatgatgcagaggaagaaaacgacgacatgcagaaccaatgtagcagagtagtcgcattaggaagcgctccttaggatgtgtttggttcacggtcaaggttctatgggatatagcggtccatattttgttagatatggtgatccagttttttgtttggttgaacgaatatggtgatacagtcttttgtttggttgtagggatgaagatggatttggtgattcaatttttcgtttggttggagggagtaggatgaatttgtaggtgtggtcacctctcacttgagatggtgagtataacccccccccatcaaattaatacacaatacaaataataaaatttccaacaatttacactacaatctcgattataaatacacgtaaaaaaagaaaaaaaagaaaaacaaaaaaataaaaaaaggggaaaaaagcgtttggatctgggccgccgggggctcaccgccgccgccgcctcctcccgccggcggggacctcgcgcctcctcccccggccgctgccgccgcctcctcccgccgacggggacctcgcgcctcctctccccggccgccgtcgctgcctccttccgccaaccgccgcctcgcgcctcctccacctggccgccgcctctcgcctcctcctccgccgcctcctctcgccggctcgccgctgctccctcctcccgccggctcgccgcttctccctcctcccaccgatgcagcacgtcgtcgtcgtcgttgtcgtcgccgggcacgcatcggcatcgccgtcgccgccgcgctcgtcgcccacgccagcgctcgccgctgctccctcctcccggccgcagcacgtcgtcgtcgtcgtcgccgggcaccggccaactcgctccacgcggtgacgcgaccgctcgcccgactcgccggctcgcccgggcggccaaatccgggcaaatcggtcggatacatccatccggcatctgaggggaatattcccctccgggccgccctatcccactcccgcccaccaaccaaacacccacaaaaaatgggccgccatatcctatccacccaaaaccctccatccaaacacatccttaaatatttgatcgcctgcctatccgcgaaggtactcaagcgagcggaatggagtttcgtaggcatgctcgtcccaaacacttgtgcacgcacttgctcagaactggggaagcagagatgcaacgcaggaacagagaaagaaaatggcgataatgggagaaagcatagcaaatcgggacaacagtccttgtatatgtactaggcagttaataattaagcttgctgtacgttcaaaaaaacaaattctgctcgttcgaaaataataataattaagctttgtgggcttacaaggccatggcctagcgctccgcccgcccacaaaaaaatagaacagccccaaataacatctctcccgttctcttgttggtgtgatatagggagtaccacctttttcttggcaggtaaatttttgtccaaatttgattggacaattattcattgagttagattcggctttgtcatttgggcctaacaagattttctctttggaataagtctattttgcctcctcaactcatgctcctagttgaatcgtatccctcaaccgcaaaactaggtataacccatcccctaactcccaaaaccattgcaaattgactacccggacaattttagaggcggtttcgtttgacgtgacagttgactcactgagttattaagtgagaccgacttgtcagcggccttcacctcatcccatcttctctctcacctctctcccaccctctctctttcatatcttcctcttctctcaccttccatcaacacagaggcaggacgacaaacgacagcacacaagggaggagcttgtcagccggccggccggaccacgcgctggggaggagcaagtcgatcggacgtgcactagaaggagctcatccgttggctgtgtgtgaggaggagctcgtcagcatggtggcagccgacacccttgtcgatcttctgcgacgccccggctcgagcatgcttaggaggtgggagggcgccggggcattgtgcgagagaagggaggagggggtcgtggaggacgaggcgaaggtcgcgcaggcaaacccctctaggttgtcaaccggccgtgtgcaggggaggagttcgtcggccgtctacacgcggggaggagctcgttggcatggtggcgatcgatgaaattcgttgaatgggctgatcgcgcgacggaggcggatgggatataggaagggggcagggagctagaggaggctggctggggatggaggagagcagcgcatgggagcttggggtcctgcacccaactctcaagcaatgtggggctcccgtgatggagatggaggtgagcagcgcaggtggcgtcatcgagctcccaagtggtgcggccgtgggatgtcgacaacgcctccgtggtaaggtaccacatcgccagggacacccgcgtggaccatccaccgtgaccccttttctgtcgctacagtctttcccacgcgccgcccctcgtggggatcgaatttagctacgaaatgacgggttcactactaaaaaaacatttttccgtgtggaggatttgctcgtctacaccaaggagtctgggaaaatcaatatttttgtgtgcgggtagcccaaccacacgggaaaattatcttcccgcgcagtcggttcaatggactgcatgggataatcgattatcccgtgcggtcaaattataccgcccgcacgcaaacaaaaaaaataaaattaaaaaaaataaaaataccctaaccgtaaccctagaattgcctggtgccgctcccggccgccttcatcgcgccgctgccacgaccagcagccgccgcacccgaccgtcgtctgtgcccgagaccgccaacatcgcgccggccgcacggatccgggcgggggccagttgcagccgccgtccgcgctcgcgcccacgcccacgcccaccggccgccaccgccgctcgtagtcgccgtggttgcgccgccgccgctcccgatcgagcccgccactgccggccccgccgcgaccggccaccatcgctgctagctcccgcgggccgcctccactcctcatcgtgcgctcggtggggaggagaggggaggagaggagaggaaagggaaaagtaggagaggaaattggaaaagtaggtgtgtagagagagagagaggagtgagagtaattgagggatttaatataaggaaaaaggaagagagaagtttgaaaattttgaagtgagtaggagggaaaaggaggagaggtatgtttgcgtgcggttcacttaagaggcccgcacatgaaaatcgattttcgcgtgtagacccttaagatttttgcgtgcgggcctcttaatggtccgcacgcgaaaatgggacgccgatttttccatgcggacgcgaaaacggtccgtggttgctctcgcgtctccgggaagctctcgttgagtgtcgggaaaggagcaaggcggagacacatcttcaagctgtggaggcaattttgggagtagctcccaaccgccgctcccatgcgagcttgccgatgtcggccaccgcaccacccaacgacctcggtaaccggggcagaggccggctggagcggcgcaagggtcgcagacgcacgtcattggtctgacgtggatggagccggaatactgccacagtgacctccctgagctccagtgtccttcatccgacatttttttgctcgtcttgtcgccgggagggattgaaattagaggagaggaaaagaagagttgctaacagaaggagcctacaagctgactcggtcaacgtagtcaaagatgccacgtcggatgaaagtgcctcccaaatcgccaagggaggttattttccctggttttcaaagctgaaggaggtgttatacccgctctttcggtagaagggacgtgattcaaccatccaagggcaagggttgagggaggcaaaatagacttattccattatcttttgatcctggcgaaattggctcagtggaactaaattttcggattatattcagggatggaccaggtttcggcccattggaagccctattcctggagatattcacagatccacacatgcaaggctgttagtggagtcgtgaactggcctaacttctttttggtttggacaaagaagatttgattacacacgttcgtccctctccagaacttgttcactttgctaccatttttaaccttgtctttttttggtaaagttaccaaaaacgaggctacatttagtttgttgccaaattttagtaagtatatatgaaatcttgcaaaaattttgcaaccttgccaaaattttgacaaccttaccaaaatttagcaatatcaaaacttggtaaggttgaaaatggtagtaaagtgaacaagcccctagtttcctaatgtactaatagtatgtgtcaattttgaacgactataaaatattactactatactttatagccttaaacattttaccatttggttttactttcctttggaataaattactttgaagtgcggcgtgctcaaatgtacgtataagggaaaagtatcgattgacagttaggcatatttcatagtgaacaaatcagacaattaattatgtaaaagatttaagttccctgtgccaaatctgcctatctatttatctacctacctacatatactgtattgagtactttcgggaagctttcattttaattaaggaagatatggtgaatgattagataaatatataatatatcatgaccgcagattataattgtgaatttatgttatataaaacatttaaaatactgtttttactttatataaaatttattaaattcaaaattgggaaatggtaatatgaaattttacccatctttaactcaatttagtattttatttatccaattataatattagaaattaataattagaaagttgtaactgatatgtggatatattcttggtttaatttaaactgcaattataaaaaacaaccaaattgaattattatatcagctcgtgcaacgcatttccttgatggctaatttatttgaggtgcctttatttgattagtcattagtacgttgttgaaccttgaagaagagaaacaatagactgctttttcaacacattgtagcccaaataggttcttttttgaagatctgggtgaaacaacgacgcataatatatttagctacgatgaaaattagatgaactatataagaccaaaacataatgaatatattcagagatagataaaaatatttattcatttcattgaagataaaaagtctgagataataattaactaaaagtaagttctacagtagatgtgactactgcatacctctaattttatccatatcattcactaataaattaagaggcctatacaatatatcacctctaatgcataaataccaaatacctctaactaatactctcacatgcatactacttatagtttgtgtgcattttgctcttgcatgatgggtgtttcatcatctctcttcttacttctctcctttaattaccttatcacttgatgctatgtgacacttttatataatcaacagtataatagtacttgctctaaacaatttgcgcttgtggctccttaatgatcttttttctagtaatttgattgaggcatgcacccttgttttctgcatgtgagccacatagtcatgcaaaattctaaaatgattatatatttcttccgtttcaaactacttattattattttaagaaaatatatatgcttaactttggcaatcaaattttagaaatccatatagtctaataacatgtgaacatatacattgtgaaaatatttctcatgatgaatctaaatatctaaatcttatgatattaaattataaatttatagagaatgatgatcaaagttagaaaattaagtttgagtgtttaacttgggacaaaactgtagaaaagataggtggttgtgctgctatctccccgaacaagttaaacattaggatggaaaaagaaacaaaataaagagaagaatactctctggagtttgtgatttcaacaaaaaagctgaagcaaaattagcctgaaataattaatataacttcaatcgatcactgtggttattatacaacttaattggagatttacactaatgaactcgctatttcgtgatactatgctatatctatacatcgatcgagctagctaattaacggccggggcgccgggcatctcctagacagagtcaccattattagcattcatgaacctaatcaattaagtgatccaatcaagtgtgtatctaacaacaaaaatttcaacatctacatgcacaatgtgcatgcctcacctaaatacaccaattaagttaagaagcaaaacgagatctaataataatgacatcagagaggtgagactgattgatcagttatcacgtcgatcgtgagaagaaaaaatgccgtccatgatgctgctgctgccgctgccgccggagttgaacatgacgtcggcgaggtccgccaccgggtaatggtccgcgtccctagctgctgcaccgccgccgccggccgccgtggcgcccattgtcgtcacctgcggcgcggtggcggtagtgctagtgcttccctcgcctacggcgccggcgaggctggccggcgtcatcggccatccgatgccgaggtggatggacgtggacagcggcggctgcgcctgctggtgctggggcggctgctgatcggcggcgggcgccatgacgaagtcctggccgagcacggcggcggcggtcggagagtttgtcaccgaagtggcggcggcggcggggagtgtgagcagcggcgtggtggaggtgaggcaggtgtggttgccgcagtaggtgacctcgtaggtgaaggggtcgtcgtccagccgctgcaccttcttcttcgcctcgcacccgtagtagttcttgtgagtgcaccggtagtagctcctgtaattttcggatattgtcgtatattaattagtggaactatcttatatatatttatcgataaaatttaacagatataactgtaatacagtcgttaaatataaacataatacaatcataaatcataatgtaattacactaattatacatatataattaagtgtgtaatacaacttatacgtaatttaatttcaaaaattccgcggtaacaatcgttaattagttcaccacagtttcagattttgattaaagtatcttaatattcttaaaaatttatgccatgcattaattatccacgaaggtcttccatttaattattacaggaaaatgaacacataaatatacattggttgtatatatatttatccagaagcagtagactgtttagctaaaggtgatcgattgtacgtttccaggaaacaacgtcggaacttgtctattttattacctaaacttttcgtgacatttgaaaattaaccattagcgtaaagacttgaatgttttttcactggccaagactagaaattcttttttaccgtcaacgataaaaagatgtaacttttcaacattcgcctgcgtttagagtggtttctatgatgtttcactgacactgacacattgcaaagtgcattatgtttaaactagttttgaattgtagcaagactaaaggaaaagtagtgtgtttttttaaaaaaactcttggcccattaaacttgagaagtgacttaattaggatcatttggcaactcagtttttcaattatttcgaaacctagcctcggaaaaaaattgtttcaaaccatttaataattcgaccaaaagttgaaatcattctatagttattatttcaatatttcaaaattgaaaaaaaaagtcttcaggaattttcttgaataaaacgccaaactctccaaggcatgtaataatgattgattttccattgcatcgctcggtctcttcaatttctctctgtaagtaaacgtacagataaacatagcaatttcaagacaagtaaagtaaaccgaccaaataattttaaattttcaaatataagttcttctaggcaacttttgttgaactttaatattaattactcgacgacaagctagctaatctagcaactggtttcttgctcatcacaaattaatacacaagctaggttatctccacgaagatttttctatctccattaatcgtttcatttacaactgattatatgccataatacttttagtgataaaaaaataatccattgaaaaaactttatttatatgttcttagtgaattaaatcctatacttaaaagtaaactatgataaaaaaataaaatcaattctacaatttaacttttaaagtttaaaatttagctatacggctaataagctaaaagagtaaactatggagctatctatttttcctacaaaaaataacaatatagttaaccatatgcatatatatgttgcattcttggttcacttgaattggacccacaccatgctgaaagccaactaattcaaaaaaagaaagaaaactcacgtggaaaagaaagaaaactgatactaggttattctgcgcgcatgctcgatcttttcctagataccataagtgaatttgacattgcaattagcgatatattatatactagaaaaaaatacccgtgcatagcaacgggtgaaagctattttaatcttattattattgtacggtttacctatggtgaattgtgcgaattcgcttgtatattatttttataaaatcatgagctgtaaattggagtccgattgtcacaaattagtgtgcgagtttttttaaaagagatttcttatacgactccttctgtatttttaaaattgaacgaacttaaaaatcgacttaaacatagatttgtatttccaaaaacaaataaacttaaaaaaactgactcaaacaatatggatgacgtgcacatgtataatagtattgatatagatatagatatagatataaatgtgcacatgtatatatgttgctggactttcatacccccggtgctaattgagttagtatatacgtacacacttgcgtattagccatcgatcgggctacgtgtactgtactatagtatatgtttctttttcccaaaaacagaaagatatgaatatatgatgctttgtgtatgcaataatactactggtgtagtggaggaagcggaaaaaaaggtgaagaaaaatcgatatgaagatgcgaatgttagccaaccatacacactgccagacctaaatatgtccagccaaatcatatttaattaatcagctatagttttactttccaaaaaaaagctatagtagttttactcaacaaagcccccattacgatacacgttattaaaatacaatttgaaaatatcaaaacaaaataagtataagcaaaattaaagagttccaaaattaaattaaattaaacattagtaattctgtggtacctgggatatctggagccgaggatgtccttctggccgtacttgcgccacgtgtacccgtcatccggcggctgctccgtgttccccgtccgctgtgccgccaccatcaccgtcaccttctccccgctctccctcctgatacacatacatcatctagttaattatttactcgcttcgacctgataaaaactataatttaaaattagatttgatacaatctagtgtaatgaattttgatttttattgggatatatagagtgagtatctatgacgaaaattcactaatcaggttaatttaaccgatcgatcagcctattcagtaatcaactaattaacagctgatgcgccgcagagaacacagtacctcgtagagtactcgtagttgtgtgtaaaccctcgtgtaacttgtgtgcaaagcggaagcgccatgacttggcaagcaattcggactgcatatatgccgcttagccgtcgccatcaccgcgaacaagaaaatcaatactccctccatttcgaaatgtttgataccgttaactttttaacacatgtttgaccgttcgtcttgttcaaaaacttttgtgaaatatgtaatattatatgcctacataaaaatatatttaacaatgaatcaaatgataggaaaagaattaataattatttaaattttttaaataagacgaacggtaaaacatgtactaaaaagtcaacggcgtcaaacatttcgaaacggagggagtattaattacggggtattagtactagttaagctaaagtctatagttaattaatggcttggtgtactgcaggtaggagaggagagaaggagagatggatatatggctagtgcgacgaaaattcggtggcgtttctttctgacccagctgcgcgcgcgcgcgccatgcacggcgcgacgtggtaaaggtcaacgtgtctgaacagcttgaccgccaaaagacttcaccaactacagtagcgcaggcgcgccgcgcgggccatggccatggcgtgcttcgacctgatcgaatcgattaaccctagcgtacgccacgacgacgaccgggtgacgcacgcacgcaccaacggagagggaagagtgacgtagtgatgtacctcctcctgctgccggcgccgccctggcgcggctggaccggcgacggcggcgagcgcgacgacgacgacacccgcctcaccgggccacccgacgtgccggcgcccgcgccgccgtacgcgtcggacggcgcgcggaacgccgccgttgttgcgccgccgccgccgccgaggaacgggttggcggcggcggcggcttcgtccggcgccgtgccgccgagtacatgcggaggaggtcctctgctggcgatgctggtgatggaggtatccctcgccgccgaacgacgttgacgccgcgcccacgccgccgccgccgtggcgcgccccctgcagcacgcgcgccgcggcggcgtacgcgccggcaatggcgtggcagcgcgcggccaggtagtccgggtcgttctgggtcgccgcgagctccgacatcagctcgccggcgagccggaacccctcgctgatctgcgccagcacctcgtccatctcccaaccctctcggccgccgccgccgccgccgacaaccctgctccgatcacggcgatcgaaaccaccaccagcagcagcagcgagcaacaccgacaacggggtcacctggtgcggtgcaaagacgtgcatgaacaatggttgcaaggtgctcgacgacgatctcgtatttaatcttcttatgcccgaggttaataaggtagctagctaggttataagcaaattaaggttactatatgcatgtgtagagggtgaggcagtgtggtgtatataggaagcagccgggcacgtacatgcggtaagaaagggagaaactgaattagaacgggtcatgcatttggtcgttggggttttattgactaatttgctaactaaataataatcaattaaaaacgaagagagatacggtatatagttaattgaatatctttggtgtgcattttgcctctcttgcttggtgctgatcgagtcactttctgactactctttggttgggtcttggggaagaccatgaaagttgaaaagggcattcaacatggaaggatccaatcttaattctggccactggggtttgatcctccgttctttggccgaagactcggtgcagctttaattttccaccagaagagtctccggccaactctaattaaatgaaaatggtgacgtcacggtatgtgacacctcatcgcacaactgataggcacctgcttggagccacaaatgaattaactgaagctcggccagttaattttggggtaaatatactaagctggcaattgatcttaggcaacttatcacataattaacacatattatatatatatatatatatatatatatatatatatagtaaatttgtttggtactccatggtgcccgggcaccatgattgaaatttactatatacccaattcaaatgagtatgaaactttttcaaatatttaggtattaacgttaactactttactaactagttcaaagcaagtttgaactgaattcaaacttacttttgttagattttgattctaggtatatagcatccaaacatataattagttaggtatgtaataatggattgtgaaataaagttaaatttgagttgttttgttgctaggtataggtatgaaatgaatacttataagtaggtatatactcacaatttgaaaattttgaaacatttgggcgaatttgtgtatttcataccatggtgcccgggcaccatggtgccccatatgagtgtcctatatatatatatatatatatatatatatatatatatatatatatatatatatatatatatatatatatatatatataaaacatgttttttccgatactttggtacgtcatttgtgtgtgattcggtttctaagttcgtacgtttttagaaaaatatttccgtatttgagtcgatttttaagttcgttctcttttgaaaatatggaaggaatcgtataagaaatttcccacgtgctaacttaagacgatgagactcctaactgtagctcatgattttctaaatatatatatatatccaaactaaaccatataacaataataaatttaaaacaaccttcacccgttgcaacgtacggacattttctctagttattataaaaattgaagatgtttttgtcaaaattttggtacgtcatccgtgttggaatcggttttctaatatttatctttatctctaatctatctatatacctaataaaaataagcaagaattccgtgtatttgattttgtacgtcatctgtatgtgtccgaacccagcgaagttgggaagaatcatatgtaactttttctttagatatccatggatatattatttgcctgattccgagtccgtatgagaaagttatgcccattttaatgc

SEQ ID NO: 22472 - DNA, 20478 bp, Oryza sativa
  unsure (1)..(20478): unsure at all n locations
aaagtagcttccccgtaattttactgttccatggtttagggtttagggtttagggtttagttcagtaatacagtaatattacggggaagctnctttgtggccgcacagccacagtgtggccatgtggcatcatctactcatttcgcgtcagccaatatatgttaaattgtataattatatggtttgctctgtacgtcttgtttagtcagatagttctataatattttttcttcaactcagctgaaaaataaaatgctggtgtccattcaagaaagagaaaattaggaaacagtgtttatatgaaatgaattctaatccatcgggggaatgccatctcgtgttcattattcttctaaattcgatataaacagttgtaaaaatttcttaaaaaattaataatgtactagagtacaatgatatctattagtacaccaaaaatcgaatttaaattcgacctacacatcaagtaaaaacatccaaatttagatgtgaatagtgctactattcatctgaatttgtcttttatatctcttgacgtgtgagttaaatttggaactaagatttcatgtagttgtatatatatgttatatgagatttcatgaagttgtatatatatgttgtataagtgttgtcaatagtttttagattcataatagtttagatagtttatgagcaaacgagaggacatcctctcgaggatcaaaataatttcccagtgtttatatatgtacatacatatgctgaaacttaatcaggttgtagatatatgtgccatgtatgcagcatatgcgcatgtatgaagtagtaataattattaacagggatcttgacatgcatatggacttttggtgtttggcttgccggtcaacacacttcatatatatatatatatgctgtatataactttacgcgtatatccagtatgaactctacataacgtgaagagaactctatttgtatatatgcaaataatataattagttgtcgttttagttttaccattctaagccaaacattttcatctttaaccaatttctaaaaactcatggagtttaataacatgtgaattatatactaaaaaatatttctcatgataaatctaaaagtataaattttattaagctaactatataaatttctataaattaatagtgaaatatatagatgtttgactttggacaaaattataatgataaataatttaaaatggagaaagtaatattggtgtgccgaaaattaattctatgctaaaaaataatttgattatattcgtgcctgtgcctgccgtgaagcgagggccggcatgcatgtaaaatacacatgcaagacttgaaaaaaccgatcaaaggaagcatcatggttgccgctgcacgaattgaaggtccggtccggccacctatcgatctggtcctgcgcaacatgacaattaattaaattgaaccaaattttcctcctaaaagaaccttcttggccgatctcgtatggatatgatgcatagttgcatacacaccaaacagtttaattttgtggcatttcctcaatttgtttatcttcctgaataattgaaattagcgtgaaacaattaatacatactcctccacttagagtatagggatttttagagttggacacaggtattaagaaagtaggtagaattaaatgggagaagattgttgttaggtttagtcccacattggtaattgatgatggaatagcacgacttaaaagatgggggcagttctcacccatcatactagccttttgaattgtacaggcccaggacctaaagttggggctccggttagaccagtgatagagcagacccaatgtgacctgggtggcccacgattggtgggacggactgcatactaagtggttgagaagtggacgctcctagcgcgcgtatgccccagcaattatggccacgcgtcgtcttccctttttttttcacgtttttttttcattttctctcattttctgatttttttcccgccaattagcaagttttaaatcatgatttgaaagttttaaaatctcgggttgaaagttttcaaatcttaagctgaaagttttctaaattttcaaatctggacttaaaagttttcgaatctcgagttgaaagttttcgaatccgagttgaaagttttcaaatctgggtttaaagtttttaattttgagttgaaagttttcaaatttgggttgaaagttttcaaatctgagttcaaagttcttaaatctgggttaaaagttttaaatttgagttcaaagtttttcaaatttcagatgaaaagttgaaagttttcgaaatctcggggatcgtatttctacactcattgaagcgccgaatatagtcccgcaatgattcgcctaggttctgggttagagcatgtaggtcgtcctcgatcgcgtggcgcttgtaagtccctcggaagttagcaacgaattgctgccataaatcttcccacgaagagattgagtttgccgggagatggacgaaccatgaccgggcagagccttttagcgcagccggcaaataatttgccaagacgtttcgtctgcgccagtgacatagagaactgtggagtagacttgcagaaattcttctcggtctgtacttccatcatatctctcgatcgatccaggtcggaacttctcgggccaccgcatgttgcgaagtgcgggtgtgaatgccctgcgtccgttgcctgggacagggcgtggcccatgaccgcgatgccttcgtggaggtcgatccgaagaggacgatgaagacgaagaagagggatcgcttgggtcaggagcccgagttctcaaacgatgatcacgtccacgatctcgactcggatgaggagattgggagtttcgatctcgtcggtcgtcgttattcctttcttgtctccgaggactgttttccgatcccggtcgttgtcgtcgcgtcggtcgtcacgaggtcgacggtcgcgattcccgttggagatgttccttcggccatcgtcccgctctcgtcgaagctgggagcgaggacgatgctgtcggtgcggatcgccatcctcacgacgaggagaacgatgtcggcggcactcgttctcgttgcgttctctcctgttacgccgacgtccgtttagatgttcgcgaaggtcaccatcttcatggcgcggtggtgtagggtcacatcttggaggggagcggtcgccggtacgccttccgtcggggttttcatcctccgcatctccggtaggccgctctccgtctctgttcggctttgggccgcctgcggcttcagcaaacacggtgttgaggttggtcacggtctcccgtagtcgctctgtccatcggctggcatctgggtttgttaccggatcaaaagggcttttcctcaatatcgcgtctaggttctgcaactgatgagctggcgttctcacagcggcggacgtgctcgtctcagtgttgtcgaccacgtttacatctctaggcgactgcgaggaggactcgtagccttctaagaggtgtaacacggatggctcgtttgcgccgacaaatcccacaaaccgattcgggatcggagccgcatctggttccttggcaacacacggagtttgaactcgtggctgctggacgcgatgatgcgctggtttgagggtcctgaggaagattctgcagttggtgagatcatgcactctagatctgtgaatcaggcagtaggtggtactcgttggtgaagtgcgttgtatcccccgttcccaacaggtgtagagttcagcttgcacgtggagtatcaccgggcagtcctcgagagcatgcttggttgtcttatgtatgggacaccaagttctcggtttcagggtggttgtccttgtcggcttcgatttttcacacggagggtgaaactcagccgcttgagggttcgtcccaggtgttggggccgtcgatgttccgttctccatcggagtgggaggaattattgacggggcgccgtttctctcagtcgtagccgtacccttcttgttcccgatgacgatcgggccagtcgagattggtgtaacggtgtagagcggaaatagatccgacttgagtccacaccagcggtgtcaaggtagaaactccttgattggcgctgaggctgttgtcggggagtcttgaagtcatactagtggatccttgagcaccaagtccccctacctagcgcgccactgtcgaggagtactcgtggactggaaggatagggtattggggtacgttagaacagggatctacgtagtacgacatcaaaacagaaaaaagacaaggattatactggttcaggctccttatcaggtaatagccctagcccagtttatatgggattgatgatgatgagaatagattacaaagagagtaaccgaattggcgatgccgatgagaccgtagtcgaggaattcgacgagatctcccagcgagttggctccgtggactccggcttcgtaaactttggtgggtgtgttggcgatgagatgcgatgccctttgcctctccctaggggtcccttttatatcgtgggatacctttaccctcaagtaagacttggagatatgtaaaccgacacgatatcctagagattttaccctttccgagtaggacttctgcaattcctaaacttcgtggagatattttccataatttgaggcgaattcctaacgatgtatacggaaaccaaccatatacgtgaagttataccttatcggtgtattccataagtcgtaggatagagagtatgttttatccgtaaccctgacaaatatttatctaaacttgaatataaagcattactttcaatcctacttattttaaataatattatgtagtatcataaagatcgtagaatcggaatactatctaaaatttcgtaggatcgtgtgaaaatgaaaattaagatactacgtaggattgatatagttttggtttgataagatgatagtaccgtactactctgttccaaagaaagacaaactctggctaggaatttggacacgcatatattcaagttcgtagctaggattggacttttttttggatggagggggtatgatactaggatatggatcgggatactgataacctacttgtacctactctgtctgtgtaattagtttttttcccttttgttttaccatttttacgaatgtggctcctgagaagttttgtctttttctgattatcgggcgagcgagcttcgccactgccaagaatcaatctaaggcctctctcaaagaatggtaggatcgtccatgttttgacttaagaattatggactccatcgatttctgacaagttgaattcgtcctatatacgagagattagctttgttgacaaattctaattcactacagagattaagaactgaactcaactactgtccgtcgagcatagaagttttgtcttaaattgatagtttccttgaaagccatgttcatgcagggctgcatattggtgactcagtgagtcattgtcaaagaggtatatataggaccgaaagtattgctggttcacctgatctcacgctaattctcattccaatactacttttctcaatacctaaaagtataacaacagaacaagtcaccgataatagagaatcaaaatgtcttatatctaacgacggatcgggagtatttctcgttcgagtcaggcccgtttagttatcaaaaagtttttcccaaaaatatcacatcgaatctttggacacatacatggagcattaaatgtagactaaaagaaaaactaattgcacagttagggaggaaatcgtgagacgaatcttttgagcctaattagtctatgattagccataaatgctacagtaacccacatgtgctaatggtggattaattaggctcaaaagattcatctcgcggtttccagtcgagttataaaattagtttttttattcgtgtccaaaaacctcttctaacatctgttcaaacatccgatgtgacaacctaaatttttgtttcgtgaacaaggcgcttagtcgttctaaaggagagacaagtaagtgacatgacatttctgaccgtcgttttctgtggtttgattagttttttgcgtggagcaccgaggcaacatgccccttttggtgtataaaaatgatatatatcgcggtctctattttgtctcctaggcacgattgatatttgggcaaagctactgtgctccacctatagtccatctagaattaaagttggtttagcttcaataccttcactctttatttcctttcctcagtgaattctcgatctgaagtaaattaaatagagtatttccttggcaatgatatcctaacatttctagagaatgattaaacacacacatttgcatgaaaatccttttttcaaacggacccttttcataatgtttacacacacgcacgagcccacacacacactagcatattgatgtgcgttgcaacgggattttaattagttaaataaaattatcactaacttgttattattatctcttaattgatgtacatatttgttattaacatgtggaccttttaattccacactattcttttttttcctttttatagaaagtagagagttggtccgagtggttgatatgtgagtcccctagcctcacattttataggaagtatagatatatatatctcttttttaatagcacatgctctgcatatcatattttttcatggaaaattattttttacaaagattatggtaaatttgctgccatttataaggacaactatgctctttttctaaaaagttttggggcaattgcttatttgaccccgttttagattgtaactgccaatttaaccttactttttagagtttgcttatttgactctccttttcaaaaacgaagctcctctctgaccctatttcgtttaggtgagttcacggtgttaagttaggggtaaatagtctattttgcccttatatttgatcctattatatcttacttgtttgaccctattatgtcataccgtgtatatattcgaatactttaacatatttgtaataatttttgcataagtttcacaatgaagacaagtttgacagatttgtcataaatttgccaaatttgagcactttgcctatacactagtaagtggtaacaactactagtactatcaagtagtactggaacagtggagatcaggattacatgagtaaatcaatcagggatggcaacattcaggtttagtttgatcagatatcatgccaccatggtcagatgagatcagatgctgccggcggcgccgccgctgaggatgttgagcgcggcgacggcggccttctggaacctctcgcggtcgtcgtcgagcgccctgcccttgttggcgacgacctccttggcccgctcgatctccgcctcgatctcgccgccgcactggtcgatttcccccgtcatccgtgagtgaatcatctgctctccagcgtctaatttggaatcaagcaagataacgagttgcaataagctccactgcgcgcagccgcagtgggggatccgccgccaccgctcacttcctccgcgagccgccgccgctcccttcctccgcgagccgccgcgccgcctacgctcccttcacggccggtcgccggcacggatcccgccgccaccgctccttaccttcacggctgggcgccgacgcggatcccaccgccgccgccctctacctccacgagcgggtgccggcggggagtcagctttacgctgccaccgccccctcagcgccaccgacggacccgcagacgccgccaccgtttcgtcaaacgccgccgccgcaagcccgagcgcgccggtggggatcagcttcatgccgccgctgcacccggcgcacccgcagacgccgccgccgccgccgccgcaccgcccgacgccgtcgttgcaagaacgagagagacagagagttgttcgaatggatagggtttggatggatagggttgtgagggtactttgggaattaagaataataatcacatttcttttttaaaaaaatcaatccttaacggaggagtgaaaacaggtcaaacgggagcttcgtttctgaaaaagagggttataagcaaactctaaaaagtagggttaaattggtagttacggtccaaaacagggtcaaataaacaattgtcctaaaagttttaaacatgtactccctccatcccaaaatatatgggattttggattgatgcggcacatcctagtgctatgaatctaaatatagagtatatttaaatttgtaggactagaatgtgtctcatctatacaaaatctattatattttgggacggatagagtaaaatagtttgtatggaggtaactgtagtggcgcttcggatttgagagcggagaggatgtgaagagaggggatggagcaggggaaataagagtaatttatttgttctgctgacatgttgaccaacgtaatgatgctaaattgtttgatgaaatgaagagttgaaacgcaaatctgtgtcataagattgaatatcatatcactctatggagcggaagaaaagaagtaagagttgaaatacaagtcttctttttgttgttctttttgggccattcaaattaagccaatgtgtattgggaaggaagtgcctagagcacctccagtgaggggctaaaatcgatttcaatgaaaaaactgaaccatgcacactgtagtaagagcaagtttaatagtatagccaactaattaccagctccaaatcatttatagccaatttatacaatagttacctataaatatatactacattattaatatttggccccacatatcatatacacattgtgtcttagagtctgtaccgtagctggctcactactacaaaatcaatttttcatagcgtcaacctttctttttctctagcggccataagtgaaaaccaccagtgaaaattaaacaagggatgaggtgctaatgaccgccagcgaaaattgatcttagctagcggccggtttaagtgcacctcttgtaaaaatagaagtctttttgcaagcggacctctttagtgaccgccagcaaaaattgaattttcgctggcggttgctaatgagctccgacagcaaaacgtacatcgagagcacctctcgcaaaaagaaaacaatggcgttattaaaaaccccccacggccccaccgcccaccacccactgcatccctctcctccatctcctctcctcccctcgacccctccgatacccagtcgcctcccactcctctccggtgctaggagacggcggcgcggaggcgtgcgagcgatggcaaggcgctcggaagacggatccggcgacagggaggagcacgggcgaagctcgtggcggtcgaccgcaaggggagcagcgacaaagctcgtggtacggcggcaaggggagctacggcgacttgggccacgggcggcggatctggtggcccggaagtcgtgggcggtaggcgacggggaggggacggatccggcggtgggcggtgaaggagagggcggtcgcggtggaagaggtggatttggcagcggggagcggcgtggtgggcagagccgtggcagagaggggcacgtgcggtgaatgcgcggctgggaggggcgtgaccgatagatctacgaccaggaggagcacgagcggcgggcggcgaaggagaggggcagtcgcggcggctgccacgacgacgatggccgggccccaaaatttccagtggcttcctctaatcccctcccttctcccagatccaacgtgtggtggcggtactcggccggtctctcgacaacagcgatgacgatccaatccagttagtccgattagtctgaattgtgatgtggattgatccagttgaaaaccagtgaatggaaatttatggctgtataaattgtgatgcaaattgtgttgattttcggatttgttaactgtcatggatatgtggatttgtaaactgtggtggatttgttaactgtgatggatttgttaaatgtgatggatttaaattgtggatttgtgaatttatggttgacggaggcaggcggagcggcttcgctctgtcattttttttagcgttggtcaggattttcgctggcggacgatacaacagagccgccattgcaaattcattttttgctggcggctaccttacgaagaccgccagcaaaaatggatcgacgctggcggttggccaatgccagcgaaaatactatattatcactggcctttggtttatgagggtgctgttggccgcttgtaaaaacctattttggccgctaggaaaaataatttttgtagtagtagctacaaatctgtatccctttgctcatctctcttttctttcaactcctcaatatgtatttatagctggcttaggccatccctaacccagaaactatcaactagtttacatacttgccatgtcatatagacactatgtatagaaactatgtatataatggatggtgtcttcaaattaaattatcatccgatcacctctcttctctctccttctatccacatatcatcttgtttttattcttggttcttgtatagagatgattttcttgcatgagaaatggtttcttcatctttttacctatctcatcattaactctcttgccacatactctgtccgtgctcgtaaaggaagtcgttttggacagcgacacggtctccaaaacataactttgacttcttgttttcataaaaatatttattgaaaagtgatatatgtatacttttatgaaagtatttttcaagacaaatctattcatatattttttacatttttaaacccaacaacttgagagttattaatgatttatatttctaatgtttgacttaaacattgtcctaaacgacttactttgcgagtatggaggaagtagaatttttacttatgtgacaatgcatttaatgctatggaaactatgtcacatggagaattggggatagccttatagtatgctgttgtacgtacctgctctaacaacacaaacaaataaaaatatatttattgacttctgggtcaccagatagagggcgaggagagaagcgattgagatagttttttgagtaaattccctgtgtacccctgaaaactcactcaatccctttcatacccctaaaatttacccgatcccttctgtacccctgaaatttcaatttgatcccttccatgcccctaccgttacattttccatcattttactgttacgtttggttgcaaatgtctttttttgcccttgatgctttaggtttaaatataagcttcaaaaataattgaaaattttgtttgagtgcacatcgtgtgcattttataaaactaatgagactaaataattagtgcagaaaattttgacataaattttgaaaataaaataaatgtaaaaaattaaaatttttatttgaaattttaataggacaatggatttttttatcaggagcattcataaaaaaaaatgttgtgaacattggtatacctatctttatatgaatgctcctcatttttatgacctttttttaaaaaaataaatacgtatttttttaatttcattatctaaaaatatttttttgggataaataatgcatcgcacaacaaactcataactataatagtctcatgcgagaagcttttatatttttaataatgtaattcatgaatttctttgttcatccaagggtaaaatggtcatttttatagaaaatacacggtcaactaacggtcaactgacgggaggggtatgcaagggatcaaaatcaaattttgggggtatataaggaagtaagcaaaattcaggggtatagaagggattaggaaaaatttcaggggtatataagggattttctctagtttttttgatgggtctcacaaaatcgattctcacgctgtaataatcgaaccaaaattttattcggtttgtgtactgcactaaccgaaccaacactacggggcattttggattgataccaaaattgtatcttcctaatttttcctaataaatggtaaatgtgtttgtttggattgaggtcatccaattggcagtgcccatattttatttggccaaattttaaaagttttttcactacagtaccaaaatttaacttgatatcgatcccaatccaaatatgagttagataaatttaccttaccaaattattggtaatacaaagtttacctaaattttagaattaccaatgaattgatagggtagaaatccaaacatgtccaatatgtacccttagtagtagtttgacggacatgtcattctctcttctaaagcaataccaaggcttccatccgtcctaaaagaaaccaacctcatatgggatgtgacgcatcctattacgatgaatctatacacagatatgtcatatcatattttgtacgagattggtttattttggtgcaggaagtaatgctctaacacaaccatcgagggacgtacggataatattatccgtgtatgccttctggcctagtattgctgatcgaaactgaatagctgatggaaagggacagcatcttcagatagtgctttgcaattccggaaggaatcaaaagaagctgaagcggaagggatgagcctaaaatattccaaacacaagattactagatatagtagtattttttttccctatttgtcgtcgttgccgacatcaactacatgcattcaaaccctttgccaagccattgacctgacaatttagaacgcacgcatatagctagtagaaataattaatttacaggttagcatggatgggcaagtgagtaaaacagagcaggtcgttgcagtgcatggcgagtcctccattatagtattaaaaaaagactaagcaagaattaattaatctcattatcaattttcgacaagaaaattttcatgcggccggcgtctggagaaagagagatcgaggagacctcattgacagcgaaaggcatatattactacattaatatgcatgatatggatatggatggatggatgcttcgtggagagatcggtggagttgccggcaaacggggggcgtagatcgggcttgtctggcggccggacaaagctaattagagagaacccaaccaaaaaaccgagaccgaccgcttcaaagcagacgactttgcgaccccgtctgtgtggatggcttttgctcgctctcgctcactgtactcggtcagtttgggcgcgagtcaatggcaaactcgatcaccaccgccaccacgtcgtcctcgccgtacgtcgccctccaccacgcaccctcacccgatcacactgccgatcgatcgaacgtgcacagcgacatgtgctgttcgcttgtgcgcgcgcgcgcgcgttgcccgcatcggccggtgtgttctctgcgacagcggcgcgcgcgcggtgatcgatctgccggcgacttggaagaaatttatctgtacgtggacgtgacatgattgcgtcgatggcgccacacacagggaaacccgggtacacggcgcgtgggcgcgggcgtacgctgttcgtcgtcgtgtctgcacgaccaggtgtgagtgagtgagcgcgcgcgccgcgaatcgcgtgttggcaactactacgacgtacgtacgcgcgacattgatttctgccggacttttcaatggcatgttggcatgtagaagtagaacgtttctcgatcgatcatgggggctcactcgcggccggtagtccggtcctcgagtatggtggtattcagtagtgctgcgaatggccggccgggaactcatgggaaattagaggtccatacagggtacaggtggtggtggtctagttgactggtccttgtgtttttgcgtatatatctggacattaattcatcgcataatttcattcattcgtgtctacaattcgtaccttgccgcgcagggcgtgtacggagcacggtatagagctactagaaagaaagaatgggcaacagattttttgttttttctctacaacagaaaacgtataatttaacaaggaaatattgttgatttaagcacaaatattttaagagaattaaaatatttaagaattggtctaatttgaattaagttttattcgatgaaaacaatatataattggattggcacttaaaatttattttcctatgattattattttgtttctacaaacattgttgtatatgagaaattaatgttcaaattaatttagggggtgtttggttgtcagccacagtttatcatgtctaaggttaattaagttcacacgcacattttccacgctgctaaatagtgcattttttgcgaaagaaaatccatacaatagttgcttcggaaaatatactaatccattttccaaatatttttaagctagtactaaattaatcatacactaatgtgtcgttccgttttacgtgcacaggggattagttcccaaccaccttgttagaacgcatgctaaggttatacaagtttgataaacttggtagttatttggttgctaccatagattccattctaactaattgggtctcacgtattaatattaatgactcacaaaagtctaataagattttattaagtttgctaatatgtactaaagaattttatcacctcaatttagtagacagtatggtgaatttgctcacctcaatttagtatacaagtatggtaacttttatttgcaaataatgataaagtatagctagcgaccaaacaacctcttcccttattagagaccttatatttgaccatgcgtcataggacaaaggaagtagaaatggagaggggatatgtactgggccaaagttccaaaatcactcatgattactgagcagtttcattgtgcacatattggtttacaaaatagctttttatacacatacaaattataaaaccctaaaattgaccaaattagaaaaatcgtagatcatatctctccgtttgaaaataaggtatacttgtggtagcaaatgctctattaggatatcatttatgtgaaacaaaatcgtaagttgtaaataaactacatcctaatagagagtactatgctcctccgttctttcttataagacattttaactttttcatattaaaacatttttaaatgtgttcatctaactaattttattaaatctaaaattaaatatattttaatagtatctttatttcttttaggaaatattttgatagaagtttgactagaaaaatattcaaagtgtcttgtaatatgaaatggagatagcaattgttaaaatttatttatagaaacaggatacaccctttatattactccttccgtttcacaatgtaagtaattttagcattttccatattcatattaatgctaatgaatctatacatatatatatctatctagattcattaatatcaatatgaatgtgagaaatgctaaaatggtgaaacggaggaagtagtaatatataagacagtatcaaatcaaactatgatagatgagagtatccctccgaacaagtccgcgtggtctttgagccttttgtccattttctccctcccaccaccgggccatttctccccatccaggcccatcttctcttctctcctagtatcttcttttctttttggaaaaagttcacttaaggtccttcatctggtcgtcgagttttaaaatcatccttgaaccttcgaatacctcttgtaaattaaaccaggttacgttaggttccaagacaacattgctcactggtttagctgacgtggcgctaaaagcaaaaataaaaagttaaaattcacatggggcccgtatgtcagtgaagctttagccggttggcttcagcggacgaactcctgcacgcgcatcggcctggagcgccctgaggactgcggtcaccgtcgttcccaggccgctcgaccgccggcggcgatggtcgttgaggtgggcgaggaggcgggcaccgcagcggaatcgtttcgggagcagaaccgccagcggcgaacagttcgacgcctacttccccttcgccatccgcattcgccgcgccgacgccaccgatgccgacgcgacgacgccgacaccgtccccgccgcctgcatgcgtcgcccctacatcaagtgcaacagctgcgacgtgcgaccgcgccctcgacgactggctccgcgacgatttccccgaccgcctccgccaactctactactacaaggtgctcggcccctagcctttttttctcgccgctcctctacgtccaggtacacacctccatccatcaaccattcaaccatcacttcatcagttcgttcaacacatatgtttttgatgcgttaattaaacaactcaacaaaaataatccgcgtgtgaaaattgaaaattaaactgctgattagttgatagttgcagagtctattgggattcttggattgattgttcacaatttagtgcaaatctgagtagctagctatgcaagcttgtgtgatatgtcgcaggtgctctacgtcgcctgaagcggctcactctaccactctaccaggacgtggaccacgagctccccacaccactgcccggccaccaccgccgccgtccgccacatcaactacgacgggcactgccacccggtgcacgtcttgccgagcacgccgctgcaatagtgattcgcggagtcgctcgacagcgaggataaccgtaaggaggaggagacatgtgtcccattgcaatttttttatttttaacccaaccatcacaaacagggcggagccaccgcacggcttgcccgggcagccgttcgggctcgccggcaaatacaccattgaatttttaatgttttgaaaggattaaagttataaatattgtagcaaatactatacatatttaagtttgctcgggcttgaaaattttactagctccaccacttatcactaacatgttggtctcacgtgatttcctgattttaagtgccacgtcaacgctatataggcgtcacatcagccaaaaccactgtccaaccattttggaccttatttgcactagttttgtaagctgaggacatgtcatatcttgtattcaatttaagaatgaattttagactcggcaacaaattaaaagacctaaagtgaatttcatacgttggcaagtcaaggcctgaaccccgaagacataaaaggatggaggaaaaagtacacctaaggtccctcaacctgtcaccgagttacaaaatcgtcccccaaccgcataccgggcatccctcaactaataaaaccgttcacttgaggtccttcagtggttttgactccgattttgtctctgacgtggcggctgagtcagcatgggacccacgtgggccccacagccacatcagcctcctctctcttttccgctcttctctcccttcctcagctttctctctctccattctctacggtgatggcggctacgggcgacgcggcaaaggtgggggaaggaactgcgggcgggcggtgggggagggcggcgcgcgggcgggcggcggggggaggagcagtgcgcgggctcccccggtggtggcgggggaaggagctgcgggcggcgggggaggggtggtgcacggctggcagaggagcgcgcgggcagtggggggaggagttgtgggcgggcgacgagggagggtggctgtcacgcccagaaattcacgaaccagaatttctaagctgaatgtgcattaaacccctgtccaggaccagccagggtacacaaacgacaattgttgacatacagattcacgtcttacaaaaatataaaagattacaaacgcagcggaaaagataaaacgagctagccttggaagcttgacttcagcagcgggcaactccactccacaggcaaaccttgacggcagtgacgaaaccaacctctctgagacggctccaattgagaagaacttcaactctggtgtgggggaaaagagagcaagactgagtactacccactgtactcagcaagtcataccggaaaaggaggtacgatgcaggatataaccaatggaggctaggggttcttttgcataaaactagcatttaaaagcagtagttgaaagcagtaaaacagctgtagtaattaatcaatattaaccaatcactgtccaacgctacaccatgttgcaacaggcccaaccaaccacccgaactacaccagttcattaagctaaactaggggtgagactaatcacggtgaatttgattgatcgcccataaccgcgggcacggctattcgaatagttttagtctggccagaggtgtacaactgtacccacaagacacgattccacacatgtcaccatgccccaaagtatcaccatgatactgcaaagggggaaatcgtgacaagaccctccgcataaccctctcctaactatccacaccacgctaaggtttcacccccacccctcaaaaggcagtgggcggtcccctcttgcgccgcggtgaatccggcagctggacaaccggacaccccggccgacccaactccatcacgcccaccctcgccaccggtgcctaggaaagggtcgagctatacctcagatcaagcagttacccactcccgcttgtggtaagcatggtaagtatcccagggtttcccgtgaaccggtccttaactgccatgggtgcgactagcaaaaccatgcacccacagcccaccattcagtgtattttaattaactaacaccattgcggtgcaccaatccaaaactatgctcatagtcaaagtctatgtaataatgtgatccccatttgtatactagttgagctaagcatggctaagcatttcctaaaccaacatctaatcattttgatacccaagttatcaatggcataaggtaaacaataaatggctaagtaataggacccatcccacatgacattataaaagaatgcaacatttaatagaaatgcgggatatttgtaaattgggtacaatatgatcaattgtaatgcatgacttgccttgctctcgcactgatgagacctcagcaacgtctttgagaaaccgcggatcgacgaaacggccgaaatctacgcgacaaacaaagcacacaagcaaaacatgctataagactactgaaacaggaaacaaaacaatttttaatggattctttgcatttttatgaatttactgagacttgaatggacgtaaacggagctcggatgaattaactatgaattttagaagataaattgtgtttttactaataaagaaaaagtccttaatcaatttattgcacaataatacccagggctaacgtcagccaaggggggggggggcggcgccggcaagtgggccccacaggtcagcgactccaaaggggggaaggtggcgcctggcgggtgggccccaccaggcggtggctcaaaggggaggcgaggaaggcgccggtcgggctcggctcggcctcaaggccgaccgaccgaccaaggcgaggcggcggcgagtagggatggcaattgtgcctgtttgcccgtttacccgcgggtaaaaaccctattagggttgggtttgttctccattttatacccatgggtatcttattgggtcaaaagctatgcccgatgggtaaatgggcatgggtatgggtaatcactacccatgcccgctttgcccgtttacccgcgaaatctaacttacatgtaggctaggagcaaaatccactagaatacataagcccagttctttgttttcttcggtttcccttttatttcccttattatttctctcctcttactctatcgccgccagaggagagacacgacaccgaggtggagaatatttgatgttttaagttcgattcgaacttagtagcttgtagactttttgttccactgcttttgttgtggcgggtaaacgggcacgcccgcgggcataaggcgcccgcgggcaatgggcatgggcaaccatccttacccgtcatgtagtaatgggtatacccacgggcacaaataatctcacgggcatgggtatgggtaggcactacccgtgcccgtcgcgcccgattgccatccctagcagcgaggcacggccaccgacggcggtgaccggcggtgcgggaagcggcggcgacggccgaaaggcggcggcgcatggccggagcagcggcgtcgcgggaaggtgaggaaagaagggggagggaggactcaccggcgacacggcggccgaagcggaagacgaaggcggcgacgacgacccgacgagaggaagggcggacgagcggcggcgacacctagaggaggggaggagatgagttagggatggagaggacgaccgcgacgaccaaagtggccggccggagacggaggggaatggatagctcaccggctcgtgagggagatggggttccggtggggttccggcgacgcgaggcggtggccgagatggcccacacagcggcggagctagcggcggcggcggcttggcgcggcggcagccctagcggcgacggcacgcggccggagatgggcggcggcggcggagctcggcgagcgcggcgcgacggcggtagagggcgtgggagaggacggtgaatggggg

SEQ ID NO: 22473 - DNA, 14216 bp, Oryza sativa
gggtgttgggggatttcaaatcccccaccacttgcgggcgcgcgcgcgcgggagatgcgggggagagggcggcgacatgggcgcgaggtgcgggcgcggagtggaggcgcgacgtggagtggagaaggcggcggcgcgggcggttggagctctggctccaacgaccggaggtaggggacgactgacaggtgggccccacctgtcggcgcccgaaagagaaagggagggagggagggaggacttcggggaggggaagggaggagcgggccggcccaggaaggggcaccgagcgcggggagagagatgggccgacggcccatctagagaaaaaggaaggaaaagaaaagaaaaggaggaaaaggattttcctgggattaaatattacactttggtgatttttaattggttaaaattatttctaaggctctgaaaattccactaaaaatcccgttaatgtattgtgacatgtggaactcaagaaaaatcccacattgccaattccaattattaattgcctttattaattagggatttagctctaggttaattaagataattttttggacgatttatttaacaaaattttaaagcaaggaaaaaaaaggggaaaacttcagggcgtgacagtggcgcgtggggggcggggaggagcggtgtgcgggctctcccgccgcccacgaggagccgcgctgtcggcaactcccactctcagatccctctcgcgcgctctctctctctctcaccagggacgctattggcatcgcggtgacgcggtggcgccaggatcgagatcgggatcgacctccgcgctacggttggggggcaacctcctcttcacgctctttgtggcgggcgtcatcgccttcacactccttgctatggtccacaaccccgacgacccactactccaactcctccgatgtcgccggcgcggaggctaccaaggcggtcccgttcatcaagctcgacgacgtggcgaccaaggaggagtcagggtcagggccggcggtggtgtaggccatgaccattgacacagaggccagctcggacgtgggtgcagtggcggaggtggcagcggcggcgacagaggagaaccccatcatcgaggcggtctcctgcgacacggcggtgcctacttcgtcgcctgtctcctgattcctaaacacgacggccgtggcggcggtagtgtcgaggtcgacagccgcctactacatggtgttcagcgacgccgagctgataccgacggctgcgacgacggcggctgtgatgcagcaggcgccgctcctggatgacatcaagatgctgctcgacaactactagcctgcggcggcggtggcggtcactgagaacgggattaggctgctccctcgatgacgatgacgctctcggcctaacaccacacgctgagaaaagtgagagagagagagagatgaagggagagaagagaggaaaagagagaggaggctgatgtggctgtggggcccacatgagtcccacactgactcaaccgccatgtcagacaaaactagagtcaaaaccactgaaggacctgaagtgaacggttttgttagttgagggacgcccggtatctggttttgtagttaggggaacgattttgtaactcggcgacaagttgagggaccttcggtgtactttttccaacggatggaccctagaatggctccgaagtgaacgggtcaagcctagccaacataagtacataacaggccattcatgcttaggcgtatatgcggattcggcctgcatgcccaatattcttgggaaaaagtgcaccgaaggtcccttaacttatcagcgggattcaaaaacgtgctccgaccgcaaaaccagatatgtggggtccctcaactatacaaaaccggtcacccgagatccttcagcaattttgatcctggttttagtctacgtgacagctgagtcagcgtagaccccacgtgggccccacgtgtcagccaaccactctctctctcccctcctctcccatctctctctcacttatctcctctcgggcaagccggggcgggtggggaggagatcgctagggcggccggcgacgcggcagcggcaacacgaggcgacgcggccggcgacaaggcggcgggagccggggcggcgccgcatccacgaccgcctgcctctggtctcccgccgtccctcggaactccgacgtcggaaaattctaacgacgcccgctagctagtctgaccaccatgagcagactccctcgggattccacgaggttacgagcaaggacctgctcctcctcctcatcacggcgccagcaccgacggcgcgtgcatcacgctccagtacatctccaacatcatcatccacaacatccacatccatgattgtgtccccgccggcaacgcgaatgtgcacgccttgccgacgcactacgggtggtgcacccactccgacggcgacggcatctcgctctactcggcgcgcgacgtgtgggtggaccactgtgcgctgtcgcggtgcgccgacgggctcatcgacgccatcatggggtcgacggcgatcattgtgtcgaatagctacttctcgcaccacaacgaggtgatgttgttggggcacagcgacgagtacctgccagactcggcgatgcaggtgaccatcgcgttcaaccacttcgggatccagctcgtgcagcggatgccactgtttgccgatgtttgccatgttcttggcttgtttgccgatgtaggtaaataagtgacgccattgtttgccgtgttcttggcttgttttgctagtgagttgtgacagcagaagaggggaaaaaatgtttttttttgtgtgtgttggattggatttcgtctgtttgtttctcattttgtttcccgccgccgcgtcgctggccacgtcgcctcgtgctcccgctgccgccgcaccggccgcgtcgccttgtgctcccgccgcctcgcctcgtgctcccattgccgcggcgtcgctggctgcgtcgcctcgtgctcccgccgccgccggccgtccttgcgacctcctccccacccgccccggcttgctcgagaggagagaagtgagagagatgggagagaaaaggggagagagagtggttggctgacacgtggggcccacatgggtcccacgctgacttagctgtcacgtagaacaaaactgggatcaaaaccgccgaaggatctcggatgaccggttttgtataattaagggaccccatctatctggttttgcggttcgaggacgttttttatctcgctgataagttgagggacctttggtgcactttttccatcttcttctgtacggtagcggccggtcgaggaagagctgccgaacgagaaaggccagaacagcagaatccaaaccctcaagaaaagtgggcggcctgctggtttgcgggctaaacatctgtctctgtctgggataaaaaagtctatttataacccttacccatgggtcaaatttgattcgcactaactaccgtaaaaccaggtccagaacatctacaattttttaaaccaatgcaaatcagttcccttggggattttggactggtttcagctgacgtggcacatactaaccttgctgagttatcttcattagacatggcgcttatgtgtaattagccagtaaaaaatataattaaatatgtaatgagatgcacgtgtcagtgataactctatcataaaaaataaaaaaaactactggatccacctgccagccacatagaaaaaaaaataaaaaacctcaatctattatcttcctctcactctctctctattcccctcctccacacccagcacatccggtgatctgtgggacggcaacggaacagagaacgacgcattgagacggaagccactagtgattggcttgggcatcttctctcggtctcgtaccacgacaagtcgagaatactgcactaccttataccttgtttggttcacgggacgcattgagacggaagccactagcgattggcttgggcatcttctctcggtctcgttccacgacaagtcgagaatactgcactaccttataccttgtttggttcacggtactaatctatttagtccctctatactagtccttaagaattcaaataggggtaactaaaagggactaaaagtatatattgggactaaaatctatccattagtccctattagagaacttatagggaccaaagtggcagcctctctcttctcctcctcggtccacgtgcttctagtcccttttagtccttggattcaaacagtaggggactaaagtttttagtccggggactaaatgatccaaacagggcctgggttctatgggcttgtaagcttatttggctctttaccctatcaattcattagtagtgtcgaaatctaggtaaattttggcactatcaaaatattggtagggtaaatttatttagttaacatttggataaagctaaattcttatggtagatatgatcaaataggagaggggcactgtcaaatatttagtctcaatcaaaactagcacacatctgtacctaataaaaaatacgtaacgctttcggcgaaaattttcgtccgtcatccatcgcacatggaatcagcttcgttaatcaattttttttgggcagtaatcatattcgtttcctaatctaaaaagccaggcccaccatcaagctcaaatagaaactgtaagggcgcaaaatcaaggataaatctaatcataagtaaacaaataagaagataagagataagatttaaatgttaccgcgtgatcagtggtaacaaactaataattctatccggattgcccccgagctccagcagtgcaaataaaaaggtgaaaaggtgttgagaagaggtaaccaaccaaaagcaaaaccagacatcggcttcaatggcttcatctcagtcagagaattaattttcgtaattgaaaggtgattgtttattagatcttgtattagaactccaacattgtggtatcggagcttaaatttagcctacttccttattcacattatccctgtgattagaagccatcggtgccatcttggttcgacatgaacaattttgagtcaaataagtttattctaatctgtttaaattcttatctttactgcttagtgaagattagctattgttcatgttcaattaaagttaataagattgagttagggttcatgatgcactgctatgtttagacttattttaagtttaagttttatgtccaattaagcttcacttagcagtataattaagaaattaagggtagggaagaatgagataaatcggtttcaattttcccgaaatccccaaattgaaaagaacactaagcctcaaaatccgaatcaaatccaaatccaaatcaaattaagaaaattaagtccgagtttggattcttaccggatttggagccctaattctaccgggaaaccccaccgctatttgggtctcaccgggaagcgggaccgctgcccttcacctcctcgcggtcacgttggactccccgtgcgcgtgccatctaggtgttcctccactgtccctcactggggacatcaagcgttggcttagtgccgccttctggctccgtccccccccccccgggcgaccaagcccgagtgttctcggcgcccgtcgccacttgcacgcccgctttgtcagactgccgacgccatggcttggcttggcgccgacctcgggcgggcctcccagccggcgaagccagagccgcgtgcatgcttcaccacgacggaccgtcgtcaccaccatcgctgccgtccactccctcgtgtcgccggagattagatccgggagagtaagggagaaaggggattagggttagggtttttagacccctcccccttccggctggcgatttcatcggcgcgggaccaatctgagccatccatcagatcggacggctcagatcggcccaacgtcgagcctgcataagcgaattggtccacacgcgcttgcccgcgtcaaggtctcataagctcacccacatgcttgacgagccgtgcctcgcgccccacgggctggcatgccgtttgggccgacaccagcctctgggcaaaaaaattcatttttcatttattttcaccctaaaatcacttattgttttatttaataataaataattttagtcaccttgagtcatcatttcaagctataaaattgcagtaaattttatagacgtattttaatttatttctaactaaatataaccaacgggaagtttagttagaatatttaattattttttatcttctcagcctaatggagttatgatttaggaatatttttgcactttgattttgtttttcttttcttttttttcctaagtggaaccaacaagaaatttagaaaaaaaataaaattattatgttgtgatacttaaattttaattattagtatttatttattgttaatattaatatcattttcacccgttgcaacgcacgggcatattgctagtactatttattttgttaacaaattggtagggcatgtttttgttatcaaaccaaaatggctctatattgaacggagtcagcaggtagatagataggtttgtaggttgtaagatatatttctgaagatgaaagaaggaacagagctcgctgtgagcattaaagctaggagtgagatgtgctatttatctcagagataaacatacctcttgttttagatttattaagtgatgatttttttacctgtcgtaaacactaattaaaaattatttttactatctagcagtcatttaatatattggacgttggggaacctaagtacctaacccatctcgccacatgtccatatgattgtgcttaattttaatttgcaagctcaataatcagtataatatgctggttttgtaattgttgaaacttgctgaagcccacagactggatcagtataacgagctgactttcggcaggcatttgccagccgtgttgccctgtcgtacagctacccggccatatggctcaaatcaatttatcaatggccactacccactatcagtgttgatatattatggtatataccgcctcaacgcgctccatatgacctggtactcgaaacttaattaacatgcatgtcgtcgctctgcttaattaagataattaagttcaactacgaactcggcaattaaacaaagtaaataagctggagagactaattactggatatcgactgcacccacgcacgcacacatgcaggccaagtcaattaatggatccgtactccatctcactctcttgatcactaacggcgacatgttcaagtagatcatagtcgtcatggcctcatggctagaaggatcgcgggagaagtcttccatacatcttgctatgtacttcgtatatatactaatccatatagctagagagcttaacaaccagtcaacagtctgggggagatatatatatatacactacatctattaaagaaaatatacccctctctgtcctaaatatttgactctgttaactttttaaacatgtttgaccattcgtcttattaaaaacttttaagaatattattaaaaacttgaatagtagtagtatatttaacaataaattaaatgataggaaaaataataattatataaattttttaataagacgaatggttaaacatgtttaaaaaagttaatggagtcaaatatttttggacggatggactactggtgtgtcatttgatcgatcagtgataagtccattcaactcgacgccagtttcatctatcgcgcatatcgattatctcaaaatacatatatcacgcattgtttatgcatgctagaatatgtgcaggtcaggtcaacggtttgttgctgacagctcaaaggaagttaattagttgtagggattttcttttcagtctggtaataatatgtagtagcagaaggtatattttgcactcctcaactttcaccaaaacttaaataacaattttcaactttctagttaaagatccgtgcattgtaacaaatgttgtaagagataaaagcaaaaactgtaagtttcagctagttgattaaagcatatattaattgatagaatatgttcgaagactccaactgattttcacaaaataaagaggcaactgtctataaaaacagtgaaaacattctaatcaggctcttaaaaatgcatagtggagactgataatcataatatcatttaaggttagtactatcaacagtaaacctattataatacacggtagccaggatcctcgctcgggtagccaggggaactacccaggacggcagcggcggtgaccaccagatctgcgccggtcccgctggatatcgggggtggcagctggcagcagtaggggtgagctgcgctgggtggcggtgtgtcacaccccaatctgataccgccgtacaacggcacctgacaggagcgtgtcgtagggaaaacggcgcgaaccgcttcctacgaaaccgcgatctcggtaccagtcccaggacatagtgctggtacccacggtgacaaatatgaatcatatcaatccttaaaataaatagaggacttatttacattaacttaggttgcagctcagacagcccgagaatacaaccgacgacacggacgaggcgaacaccaacaacaacaacagcagcggaaccaacggtctaacacccaacaccacaggcgacggctgggaaccaggacgaaaccctaatcttcacttcactttatcttctcttcagggcggaggaactatatatatatatttatatagagcaagggtgagtactttcgtactcagcaagtcacgggaacttaggtgtttaatgcaagcttggaagagagacaaggttgttttgcaaatcttttatttgaagacattttgaaatcactaagtgatttatttctttctaagtttgggccgaaaagagacttgcgtctcgattcgactttaagagatgtttttcaacagctcatttagtaatgtaccgacctctggggtcagatcattacttctcgactcccatagccattccacttgattaatcggctcccagagcctttttcattttctcggactcccagagtccagctgcccagcagcaaagcaatcctcttccactcgggaagcctagtctatgatgcccacagacatcccgaatcacacagattcgtttctgaccactcaggtcatccatctgccacaaaggctgattctggttacgattcccacaccacaacaacttttcacaaagcacaggcaaacaaatctacgcaacgggaaccacctcacatccgcccatgaccgtgggcacggctgttcgaacagttagttaacctctgcagaggggtacactttacccacaagacacgaacttactccagacactggccggtgtcagaggttcgcgacaaagcctttcccaagccgacctagggatacctcatgccacatagaaggatcaaatcctcacataaacataggccattttaggcgttcaccaatcaaactccaaccacctcgatcggtaattcagcaagcttctcgttcttgcattaccaggaacccggtttggctccaaccgaccccgccccggcgttcccaactattggcatgcgaggtttccctgaaccgactagctacttagccagggtgtcccattccaccttgtggttgcactttgattatgttcgatgagtttcccacaggaatcagtccttatatgcgaatacgggacagtgccacataggcacaacccccgcatcgcgagttttcacaattcattttattttcaaacacaccgacaccacatgtcgggttttgaaggcttcacaaacccatttcccaagttttcgacaaacaacggtgtatgtgggatatttggtatacgcgctcagagagcacgaataccgaggtaccacaagggtggagcgacaaggaatcagggtagtacgacctacggaaattagtgcgactactgggtaggtccgtcggtttggcacgcaaaccgaggccaagcaagttaagtgtgtgattctaataatgcaagttgcaaacaaaataataatgacttttcaattataggggcaattgatcaaagggtgacttgccttgctcaaggtcttcacgaagcttcacgaatcttcgagaaaaccctcgacgaaaatccgataaccgcaactatacgcaaacaatcgaaaacctaaacaaaagaccaaaagaaagatcctatttagactaattagtagtgccattaaatagatctcaatttacggaattattggaagtggaacggagtcaatcggacgagcggttggggagatatggatttcctaagattatttggattttctgtctaaaggaaaaggatttatcaaatcccttggaaaagaaaaggaaggagggatgtcatttagacttactcgggcggcttaggctcggcccaaggggtcatgcgcagcgcggtcaggccattgggccggcgcgggcgcggggagagagaggccgacgcgggtggacgcggtccaccgcgcgggacccacatggcggtggttgggttcacggtggggagggcgcacgcgggggcgggcgctagggtttcgggtgcgcgcggttcgggcgcggcgcgccgggtggacggatggcggcaggcccacgtgcagccgcacggcttgccgtggaccgcgcgcacgggagggaagacggagggagggggcggctgactggcttggcccggtcaaggccgaggtggcgccgagatggcgcctacgtggcagccacgcgggccggcgggaggaggaagaaggggcggccgagatggacggcggacggcggccgagttcaccggagctcgtcgcgacgattcgagagagagggagtacacctgaacgatgggacggacgagagggagtgagccaccggatcggattcgccggagggaggccggcgacgacgaatcgcgacggcgcttgccggcggcggcaaaagagggaaacgacgacgacgcgatgagagctcgattcctagggacttgagcatctacgcgacctcctgagttcatttctagagtcggattgggtggagctacaccgaggaaggccagcgacgagcggctactaccgagtttgggcagcgacggtggcgagcctacgacgagcagcggcggcggtcggggcggcgccagcttgctactggaaggctactcgcactactgcccagagctaaggagaggagagggagcgaggagggagaacgggagatgcactaccgagccgagacggacgctgtgacgagcggccgacgacgcggaagcgagctctccggcctcgggccgggaaaggggaaggagacggcgcctggagtcccgcgtcagctcctcgcgcgcacgccggcttcaccagcacgcgcgatggaggagggaggcgaggacagcggtagcaaggcggcaagggcacggtggtggcgagggaatgaacgagagggagatggggcggcttggtttaatagatggcaatgtcggtttagggaggaagaactgacattggcggtcaaggagagcgagctggcggtcatcgacgcgtgcagccaaggcggcgacaggtgatgacgccggcggtgtcgggcaaaagtggaaaaggaggggaaaaaagtgagctcttctctttgccgagttggggagggagagggataggagcgggagctcggcctcacagttttggcaggacatgcgtggaacggctcgggcacgcgctgtagagctcgcggcaggcagcggggccgagcggcagcgtagcgcaggcgctgacggaggcggcgaccgggcggtcggtcacgagcgtgcgcgcgcgcgcgggaacgagcggcacagccgaaaatcgaatggcggcagcgggaaatcggcgatggcggcagcgctagcgtgggagagagagatcgaacgagagagagagagagacagcgagagagaggaagaggacgagagagcgagagaacgtccgagagagggaagggagagagagacagcgctctctctctctctcggtggtcacgtgcggcgcacgtggagatggagggagctgagaagagatgggccagcggcaggtttcggcccaaatcatcacgagggaggtaaaatagacttttaccggaaggtttgatttggagagaagtttgatgtggagattgaatttgaattcaatttgtatatttgtacacgagggttcaaggtggatccaagggaggggtcaaggaagggcttcaaaagcgggaattttggtatttttgggatggatttatatttggcggcacgaaggattatttcagaggatttcaaaaagggaagatcattattcaaaaatggaacaaggaagatagcggtagaatgccatggatagatagatagacagaaaggtaggttgataggtagagggacagatagacagatggatagataaacagatagataggtatagtagatagatagatggatcgatcgatagatagatagatcgagactcagggagagatgggatggaagagaaggaagaggtggaccggaaaaaggatgaaggtatccaacctatgagggaggttaaatagactttcacagagagatttaattgggaggttttagggttggagtctggattcgaatttcgaggttgatactcggtctcgggagaataggaaggagtcaaggaagggaacaatattcggagacgagtcaaaaggggatggataatttagagaaagagagtgtaacttgggagtttgtgtttgactactcaacgagatatgtggtaaggattttggagagaagtctgaatagaagggttcggacttcgagattatttcggaacggaaatcattttggggagaactcagggcgaaagggattgaatcttgggattttgagttcaagggtggaagtgatctcgatttgcatattcagacttggatcagaagttcgagaaagagaacaagggtagattgatgaaccaatacagggagaaagatagatgaatcaaaacctgagaggttgaattcgaatttgagaatcggtttgaaggaaccaaggagagagcttatgacgcgaaggtgaatccttggacggagttagggttcgggcattcgacaaagttcacggatggggttccaagaggggattccgaatataaggaatcgagcttcgggactatattgggatggaaattttgaggagacgatctttgataacagggtatcgagacaagggagggatttaaattgagatctttggcacaacttagactcaacactcaaagaacgaaattttcgcaattaggattttgccgaattagtttttaacgtctcacgaaaagcagagcgttacacggtgaccaacagcggtagggatggcgacggcggggcggatccgacatccccggaggcaatctggcccctcagcggccagatcgagtggggcgagctcgcggtgggagagcccgtcacggcagcgagcgggagcggagatcgcgacaacgcagggctcgcggtgatggcagtgacagcgggtggccggcaatgacagtggatggaggtgcggtcggcggtggcagcggctagaggtacggccggtggcgacagtgacgaccgacgaggtgcccacggcgcgaggaggcgccggaacggccactagcgatgtacgccggggaggctcgggtcggtggaggcagtggccggcgtagcgagaggcgacgaggcgcggtcggtggtggcatgtggaggctggccggcgggggcggcggtgcagtggtgctcacgcgccggcagaggtttagatggtggtggagcatcggtgtgtcaacggtggattggcaagcggtggatggcgggtgaaaacccaaggtaggcaacgatggcgctcgagtgtcactccccttcttgagggtgttgtcgtgccgtctcaccctttttagtggggctgccgggtgaaagcccagtcaatgttcttgagaccacgacggacggtgggtcggtggcggtggtgctttcgtcgcttctctctctctggagacaccctctagcagcaccattaccggaaccacccaaacatctgctgcaagctcgctctagagttacatcctcttatatcgacgcccagtttatacaagttagccacgtcggagggcctaggggggagtggttccattcttctttctcaccctctctccctaaatccctacagatgatgag

SEQ ID NO: 22474 - DNA, 5393 bp, Oryza sativa
tttgttggcctagcggcggccggtccggtgttacccttctcctggatttgtatttggcgctgtcggtgtgtgagtggtgctatacttttttccttttcctagttacggcctcataggattataatcttgtaatttttttctagtgtattaatatgtacttcgttcaaataagaaccttcaatatctcatcggctctccttcaacatcaaagaataaaaaaggggaagaaaacataggacaaatacttttttttgtctcatgtgtgtgcttgtcattaatatatccaagatttcgcgaaacgaccgttgataactcaaccctatttcttacttcaaaaaaatcttacgaatttcaaaaataaaaactctacagcagtacatacaactttttttgtccgcccctgaacagtgggaaacatatgctagtaggacaattaattacttgcacacacacgtacgatgcaccacggctcacacagccacaggcgcgcggttgttgcacccaacctgcaatgtgtgctggtgcaaagttgcgagattcaaagtttgacccagcgctaaaaagtggctggttcgcacgaactcatcgatcagcctaatattctataccggccacctgggcgccgtggtaggtggccacatgttacttgcgcaagtggtgcacggaacaaacaattttcgtcacaccttgtcataagctccttatttcgcaaataaaattgcatgcgtcggctaacactatgcgcgcacactccaaccactaccacttttgactgcggttgtggcatcgccaccaaccaatgatatggttaagctagtgctcgtaccttttttttttccatcacggttcacacacatgcatatatgcttattaactgtttcatattacatcatatccgtcctaaaatataacatttccagaattaaatatagttatacatacttattactatctacgtatcaaaaaataatatcgtataactttatatctgggcaagtgtatgtccagatatataaccaaaatctaccatatcgtgagacgaatgtagtaattaattgtttactattatatatgttttaaaatataaatatttttaaagttggataaggaaattaagaaataggtgacaatgattagttaaagtatgtgatttagttaaggaataaataaataaataataaacgaataataattaggattagttgagataagagataggtgaaaaaaatctttatttttttttaaaaaagttaagcgatagaaataactttattttagatagaggaactaccaatgaatcaagtgaatgatggagtcggtgaatttaggcttaaacgtggtacgtatgcatgctgtttggccacggctgctatggctcctggccttttggggtagcgccgtaccgtacctaccttcccaaccaactccaactttgttgagcttgaacacgacccgtgcgtggacagggtttacaaatgcgatctctgttgggagtatgacacccatccaatcaactaaaaccatgagatcgaaccggttgcttttgtcaacataatccattgaagttttgcaaaacgaaatatgagttccaaagctaaccagttgtttacgtgtaaatttgtaataattagttgtaactcgtttagcaaatgataaaatgttattctattattagaaaaggttacgagtgagccgacaacgaaaacaaactggtttacgcccaaaaccaacctttttttgtttttcgattgatttgacccaataccaatctattttgtggaaatgaaaagtttcaagtaacaaaaaatagaaatattgatggaaaagtgaggcaaaattttggcataacctttgctatagttatgatatttcagattttaaacaacactgacaatgcataatgtaacatataaacccaagtgaaaacatcataacaactgtaaaaaaaagttcatccatcaacagtacagcacataaaaatttagaggcacttttctgattagaggcgatttgtaatcgcctcttaagttataaattctacaggcgggaaacacttataaacaattttaagtgtactttttatacacttcctaatttgcattatatgtaaagccattgccttgagacatttttatatctctggaagggtaccttttagcaatttaatcctggtagcgatggagtaacacaaggcatatacaaccaaataatgagaggagtgagatgaggttgagatggttattatagagaagatggaagcagatagtgaagagtgaagagttgccgataggtgggtctactctcatgggctcacacgttagagagaaacgttcctacgatgtactccctctgtcccaaattttaggacaccatctttttaaggaaaatcaaactcgttaacttttaactaataattatactaaccatatatatgctaagtattatgcatgttatatcactttatttatattttaaagtactttcatgttatgctaatttcatatttgttaggaacataacatgtaataaattaatggttaaactatgtcattgaagacagtgtaaaaaaatatagtccttataatttaggatggagggagtactgtatgttagaggagccccagtcgagtgaagatagaaataggaattgtggttttttttcctttcttttcacaaatgcatctaaagaaatattacaagacatgaaggcttattataaaacgcctcatcatttttgaagacaattcatcacaagactacagtgatttattacaattttcactaccatgcctctacagactacagtgttataagtattgtagaaaaacagaatatgattacaaaaaatgattgtgatagagtacattaattcccagctggatacaattcacatcaaaattgcaaagtcaattctctgtctcgttgtatccgattctccatgcttcgatggggatggttcaaactcgagatatgaattcacgcaaaataaaggaaacatactggtattagaagtatatatataaatttacacggctacgaaatgcattttcccatatgatcaaatccggttttcgcaggcggctgggtgactcatgcctccccccccccggaccaccaccgcacctccctatcaccggatccgccaccgctgcgcctccccaccaccggatccgccactgccgtgaagggggagggtgaccgctgtcggatccacgcgggccgcaaacgccgccgccgttgcgcgcctcctctgctctccaccattgcctgagccctccaccaccgttggaaggaagaggagaggggagaagaagaggaagtcatggcacacctcctccgtcctcttgcactgcctgagcgctccactgccgttgggagggaggagaggggaggagaggaggaagctgtcgttgtcgcccttgcccatcgtcgccgccgccgccgccgttggcagagcccaccgcagggagggaggagggaggagaggggcagaggagtttgagaggagggggagagagagagagccgggagagaaaaggagagtgggtggttgactggttggagatagagagagatgagtggaaaataaaaagaagagtgggaatgggagggaggatttttgtatgcggatgaattaagagccccgaatacgaaaatacccttattttcgcgtgtgggtgttttaagtgatccgtttggaaaaattgattttttgcatacgggtctttaaggagccgtatgggaaaacggaggtcgagttttgcatacgtggacacttatggtccgtctgtaatttattggatgctcgttcagaaaaattattttttagtaatgttagttgctgagcaaatgacaattgtcaccgctccacctaactcaaaaagacacagggagcttttgattgaaatggtccaaaccgaagagctgaacatctggttggtaaatgtctcctctcagttcaacgaatatcgggcagataacagattctcgcatatataattgtctcgtaataaactgtgcaatgtcaacctcattttagtagcacatttgttttggatagtagcatggcctagctttgtccatctcttttcttcccttctccgtgccataccacacaacattttgatttgggacaaaaggttggtgaaatggacatattttcacatatatatatgctatatttttcttctcagtttaccgaaaagatgtacccttatatctcgtcatcgattttgggtcaggccagaaaaccattggtaacagaatatatgcatagttttctttatcaataaaattaatgttttatttaaaaatcgataaaggaactttttacaaaattaggctagaaatggtctgtctattatgacaaggtaaacttttgcgacattaatttggatggcaacttcaacaattcaaattgtcgttgtccacaaatctcttggttgtagaagacccacgcgtctgcaacatttttgcgccgaaaacttaatacataaacttgatttgttgggatacatggtgcagaagatacgatcattaataattcaaacagtgcatttcatggtccaactgactgccacgtcattgaacccgtaatcattcgctaagccaaatcaaattggcctcaaatgaattttcagcacgactttttacgccccaaaaacctagtactccctccagttggaaatgtaccctaccaagaaacttgtgtccgtcacgacgcctgtatcatcaatctagtcctcttttgtaacaaaataattttagaagatttcttttaatgccgtagaaattaaattaatcctaatgaaaatcatgtaaaactcacccgttataaaatgtcactaaccccctacacggttggtgtcctctttgtagccgaaatgcctcctctttggccactgcatctccacccatttttcaaacatctccaactaactttttgttccatttgcaaaaatgcaaaatgcgaaatgttaacttcacacacacccccctaccactacaaaactctcaccaaccccaatctagctatcagttcagaaagcaccttcccttctttccctattagagcaagtctaatagtacagctcactactagcttcaatttatctataaccaatctaatagtcaattcatacaatagttgcttattatactattaatatatggtctcacctgtcatacacacagtgtgtcttatagtccgtgctgcagctggctacatatctgtagcctgctagtcttctctctcatcgtttatctcattaaaatatgtttatagctggctaatagcttgctaatagcatgctattgtacctgctcttaccaccttctttcccttttggcaaatggcaatgagtgcaaaaatgcttggaaaaataacccccccc

SEQ ID NO: 22475 - DNA, 41924 bp, Oryza sativa
ggccccgccggcgcgcccatcgtcggcaactggctccaggtcggcgacgacctcaaccaccgcaacctgatggcgctggcgcggcggttcggcgacatcctcctcctccgcatgggcgtccgcaacctggtggtggtgtccagcccggacctcgccaaggaggtgctccacacccagggcgtcgagttcggctcccgcacccgcaacgtggtgttcgacatcttcaccgggaaggggcaggacatggtgttcaccgtgtacggcgaccactggcgcaagatgcggcggatcatgacggtgcccttcttcaccaacaaggtggtggcccagaaccgcgcgggttgggaggaggaggcgaggctggtggtggaggacgtccgccgcgaccccgccgcggcgacctccggcgtggtgatccggcgaaggttgcagctgatgatgtacaacgacatgttccgcatcatgttcgaccgccgtttcgacagcgtggacgacccgctcttcaacaagctcaaggccttcaacgcggagcgcagccgcctctcgcagagcttcgagtacaactacggtgacttcatccccgtcctccgccccttcctccgccgctacctcgcacgctgccaccagctcaagtcccagcgcatgaagctcttcgaggaccacttcgtccaggaacgcaagtaagttactatctcaattaattaccttacctgcactgcatatccccaagaatccgcaagaacaaatcctacctaattagtcccagattattatactaccccatttgatctctccttcaattttttttaaaattttattcgtcatcttgcgtatccaaattgtgtgtggtggtaggtgaggtgaaggtgactagtttggttgcatcttgcatgcatgatgcatttgcatcggtgacatgaactggatgagcgaaaagtttggtagtaaaagcaatattctacgctagtagtagggatgtgcacatgccacgcgaggaaggggattaatttggcagcagcctcagatctgtttgggtaggaggaggaatcaaatcactttgctgttgctgcttgctgtgctgagcggtgacagcacgaggtggtagctgcgaggtcaaatttctggttgtgcaacggcttgactcgggctcgacctgtgccgcggagcccagctaccaccccgtgccaaagccaatgtccacgtcacggttgtttaaactctggagcctaattaaagcggttggtttttggcatgttgggatacatccaaccaaggttgagaattagcggttaaaattcctgtgtcacaaatcttatagattaggtaagcttcaaaacttttaaggcttagttcggcaccccaggttcccaatccaaacatccagtatgcaaaacggaacaatccattagcacgtgattaattaagtgttagctatttttttaaaaaaatggattaattttatttttttaagcaactttcgcatagaaactttttacaaaaaacacatcatttaacagtttgaaaagcgtgcgcgtggaaaacgagagaaagaggttaggaacatgggttgcccaacacaccctaagtattcatatctttccaatatttacatgggagcaatatgtatagatttatctcgaaacttaattactttcatagtattagtactaacaaaaatcattagtttaagtaacactagggtaccagtaccatgtcgatgtccaaaatgatttggtttagtagtgacaacaggagattaatctgtaagaactggacttgcctaatgttcaaagcttccttttcctaaacatgcaaataagtctgacgagtaggtgagccgcacatcatgggttgcttttcgtgccagccagctgaaagcttacgatttgggcaaagtcctgcctcatcacggaagcaccgacggcgacagaaactctctaccagtaacctaaccgatcggaaattcatttcgttctcagcgaattgagcagatctactagctcccccatgtgctcaatgactgaaaaggtcgcaagaacttcagacgcttcccctgttttcttctcgatcagtacactgcataactgagtaatataatcccgtttgattggatcgatcaatggtgccaaacaacaacatgcagctatccctttgattagaagatatacaatttgcagcttgcatttttttttcggtttctggatcgatttgcgactgagaaactgctggcctttttggtagtagctgtgttgggaagcttcggatgaactgttcgactgacaaatcggcatggacgtgtttgtgtcttttttgcaggagagtgatggaacagactggtgagatccggtgcgccatggaccacatcctcgaggccgagaggaagggcgagatcaaccacgacaacgtcctctacatcgtcgagaacatcaacgttgctggtacgtttttgtttattccgcgcaggatttgacttttagtttatcctcagcttaattttctttggatcaggcctaaagtatatatcgtagtacatcatacgtatccatgtcatagttttgacaaagctggagttttactagtacttgaaaggaactgagtttgtggagaatagaaggttcagaaccaggccaaattgcaatgctagcatttttctaccaacacatcacatcgttagtgtggctaaaaagaaccttaattaagtatgcatcatatataatattgtcatgataggctatggttaaagtatggcttcattaaatacgagcttttatatgatcaggttgccatgttcttggtcttgaggaccagttctttgggtaagaagtagtagccacgtcttaatcagagtaaccattacctaacatacaattgtattttttttattatccggcacatgcccaatgcacaaagtcgtgtgggtacatatggtaggcggctatctcataccttatgattcaaaccatatgaactaccgtagatacgaaacatttgagtcaaaaccagtagtaaaaaaaaaaaagggtgtagctatatttatggcgccatatttttcaccaaaaaatagtcggtatgtatttacattgtaactccttaaattacatatgtaattttaatgtatttataatgtaagtctcaaaattacatatgtaattcctaaaattacatatgtaaattcaaaaattacatactaactatatatgtaagtaggatgtaaatgtggtgtaagtgaggtgtaatttctgtgtaaatggcttaaaaaagtcgattatagcatgtgtcgacataattttagctaacccgatccggtgtcgtgcttgattcatatcatgtaattatcacggcacgaatctttgtggggatcgagtgatccagaaatcgactgtaacgaagcaaaaaatgtggcgacagtagtttagcaaaacccaaaaaaaacgccaattttagttggattattattttttagaaaagagtacaaaatgttaattaacaagaagcgtacttttttttgtgcgaaatgtgcagctatcgagacgacgctgtggtcgatcgaatggggaatcgcggagctggtgaaccacccgagcatccagtcgaaggtgcgggaggagatggcgtcggtgctgggcggcgcggcggtgacggagccggacctggagcggctgccgtacctgcaggcggtggtgaaggagacgctgcggttgcgcatggcgatcccgctgctggtgccgcacatgaacctcgccgacggcaagctcgccggctacgacatccccgccgagtccaagatcctggtgaacgcgtggttcctcgccaacgaccccaagcggtgggtgcgccccgacgagtttaggccggagaggttcctggaggaggagaaggccgtggaggcgcacggcaacgacttccgcttcgtgcccttcggcgtcggccgccgcagctgccccgggatcatcctcgcgctgcccatcatcgggatcacgctcggccgcctcgtccagagcttcgacctgctgccgccgcccgggatggacaaggtggacaccaccgagaagcccggccagttcagcaaccagatcctcaagcacgccaccgtcgtctgcaagcccatcgacgcctaggtcgatcgatcgacctactcaaatcaatcatgtgctgcgttatcctattgcactaaaaaaaggttgtatttttgtttggggggggggggggggggtagttatgtgtgtgttctgtgaggcaggcacctgttgttgtaggtttacttaacttttttttttcttatacttgttggttcaaacttaattattggtaatctatactgcccaaacattgcaaatatatcatttctggctatttacacttcatcaagacaaattccaatagccctattacagctcgtaaaacacgtaaccttgagaacatacagcttttgcctccacattggtatataggtgtcggtgtcgccataatttataggtaagtttgttaagaagattcctcatagtgaaaaaaaactgaaaatgaaaaaaacgcagcctacatagtactataggtattgaaaatataagcacatataggtttaatttattttataaataaatcacgacattgaacatatatactagtataaacacatcatacaatttacacatgtaaactagatagtagagcgtgaacatatcgaatgtacgaaacattatgaatgcgtaccggcaattttggtcgtttggctgcacagtaggaacaactcgccataacgggctttgacgttgatgtgcagcacccgagcaaagaggaagacgatccaccataacgggctttgacaatgacgtgcaacactcgagtaaagaggaagatacgagctgtggtggacgaacaactagtagtcgcacgaaacgcttttcaaattcatatgtataatctcatcatactacttccaaaaagcaagccctagtggaagaagagaaagtagccgcgaagcatcgacttggcagtccaattagcaaagaaaattaaaaagaactctttagacccacctgccatccctttccctcaaccaataatgccaccatatatataatctcataattctgattcaattactgtcataatgtatcatcaccaaatgcattatcccacaacactactcaaatatctactcatctacacatcgatttcaatggattttctaagttaccgtccacggctatgctaaagactgcagcaatgtacagtattgtcttggttaagtatcaacaccaccaccatgagggagagggatcgcaggtgggtccagagagttttttttttcctgattcaactgtcacggtggcgtcactaatgcaagcacaagtcaaaacaacccagaacagtgctaagggatgtatttgtccaatataaatagttgagggtgtaaaatatcctgtatttaagtttagggagggggtaattcagtcgactgcgatagtttaggagggaattagtactttttactagtgaaaacgaaccgattgaggactcctggaaagaagaatcaggctgtgtttagaactaaagtttggatccaaacttcagtccttttccatcacatcaacctgtcatacacacaacttttcagtcacatcatctccaatttcaaccaaaatccaaactttgcgctgaattaaacacagcctcagagtagctctatataggaacagcacacagtgttctcttttcttttgtgttaattggatcgtcttttgttgggcatcaaaatttctgggcatgggggttcttgttggatgggttggattggccatactgcatctacttgtaatattcatgttggtatatatatatgctaaatcagactagaagaggtaattaagtggaatactaaattccttccaaactaaaggtacggatctatcattgtagaatattgcatatatatgtagatcatgaacctagatactacctccgttttttaatagatgacgccgttgaccttttctcatatgtttgacctttcgtcttattcaaaaaatttacgtaattataatttattttattatgagttgttttatcattcatagtactttaagtgtgatttatatcttatacatttgcataaaaattttgaataagacgaatagtcaaacatgtaagaaaaagtcgtcatctattaaaaaacggagggagtagaaaagaaggttatatatgatggaataaggattgcagttaacctcaccaaataaaggggtagatcagaatttttaacatttcacattgctcttgctgacttgctgttactctttacatcattacatctcgaaattgaacttgccaccaggcacagaacaacagaacaaagcaaacagaccgaaaggagcgaaaccaacatattagagcaaaataactttagattaccataaaaaatccaacatattatggaattggataatcaattattcattttgccaatatacaattctagccaacttgcggcaccttgctgatcccttcgccaccggttggaagggctccaatcaccagcacgacgcgattacaacagaattcatcattttcctctcgcccaatactattcgaaatcaagtacacaatatttgtcacctgcggattctcacgctttatggtgtcgtaggccgtgtcctggtcctttccgaggagctctggccatgtctgctctgcacatcgaccacaaatgatgaccaagaaatccatgtattataaattgttgttctccttcatctcaaacaaaaagtcaagtagaatgctggtgattggagcaggttgaaagaaggaagaagatgataagagggatgatgggtgtgttactcacttccttgacaaggcggtgccgtacatggctcatctgcagctagtatacatgtggttgaaattagaactagtagaataggcagcaggaggagggttgaatataatgggggttttggcattgtagatgcagtatacatgttcttgttcactcgatcttgttgcaggttggatttggggatagaagcatatatataggtcaaaagcagcatgcatttgatgggtttatctggcgtgagctggcaattgaagatttcaatcatttgtattcatagattttattgcatagattaatacatggattttattgaagatttcaatcttttgcattaatggcttgagctggccagtattaaatttgtggacactacagattttattgcatatgctctagatttatttcatttagagtgaaactagcaaagtccctgtacttcgtagagggatttacaagagaattttattggatgtttatgtagaaaattactccctccattccaaaatataaagcataaccatcattaacccaaagaccaagaaataattattatcatctcatagtttggattaccctaataaatagaatacatgcacccaataaaattaaagattttgatggtggaagatttaaataataatattgtagtggaaaagaaatgctaattaatgacatgcatgcatgcacaccttatattataaaacaacttttaaaatagttatgccttattacgaaatggagggagtgcgttgttttgctagttcatttaccgtgtgaatgtacatatcttacggaattaagcgacagaatcgcatggcattgtaaaggaaaattaacctttgagatcgagattgtcgttttctttttaaaaaataaatcatttgtggatactacagattttattgcatatatgctctagatttatttcatttatagtgaaactagcaaagtcctatacttcgtaacgggaattacaagagaattttactgcatgtttctgtagaaaaaaaatattttgttttgctagttcatttaccatgtgaatgtcaaattcttatggatttaagcgacagaatcgcattgcgttgtaaaggaaaatctaccctatgagagactatcgttttctttttaaaaaaaaatcaaaattagaaaatactagtcgccaatggctattattgttttattataaatattatgattttaggaataaggtaaacatgctgattatttttcaaattatatctacttagcctaataaaagaatagtccacattaattacaccttaagaattattaatttaaaatttttaattaaattaataaatactgttttgatagttcatgatatttcgagctgctactttgtattcagactgatatatatcaatatatgttctctgttcgtaaataaagattaaatagctcagttttaaaatgcgtttttgtcagttgattggactataattacctgaccactcattgataaaacagttcattcaatagacaagaagcaacagaattcattattttaatcaaaacaataacttcacgaatgtgttcattaggtcaaatataaaaatgtaaattttagatgcaatgcgttcgaatgctgctggttacttgttagaatctaaggccctgtttggtacagctccaactccaccttcctagtttattttgttagagcgctccacccagctcagctcctattttaggtggagctgaaactatttggttgggctccagctctaggagaggtggagctagagctggacctgtgccaaacagaccctaatcctagaggcaaagccaccacagatcttaaaaaccgattgtagggatgtaaatcagacatatgattggaccacgtggctcctgagaatttagagttaggtcctctgaaaattagccacgtgtcccccatctttatcttctcaagcccgccgttcggctggaatatgattggtccacgtggcacgttaaatttgcgagtaatttgggagtgcgtttctctttcgtgcgcctaggtgccaggcccgtctccctaggaaagtctagatcaatctagctggttacccaaacaattaaaagccgcactgggcttcacgacccagtaaggacgtcttatgccactcagactctcacaagtcataatcataggctcacagtctcccgccctcacgtagtcacttgtttggatttgtggtgccactgtgtgttgctcctcgagctggagtaatcataaatagaggaaaataaaaaacgaagaaaaaataagaaagaagtaaggaaagtgtgtttttaaatagatgacgttattttttatctaatgttttataattcgtcttataaaaaatataagtaatgattaaaatgtctttaatgataataaatgatactcacatgattttataaataaaacaaatgttcaaatgctatatttaaaagtcaacaatgtcatatatttaaacaaatgttgaagtattttaaatccttgtaggacatactgtaggttaagtcgaaagataaatacgaaataggagagaagtacatgacaacattaatatcctatattttcagaagaaacagtaaataggaaaataaatgaaaaccatttaaaaggttagatccaattttgtgttttgagaaaccatttttgaaaaatatttgttatatactacctcttccatcctaaaatataagaatttctaacaattataaaaccaattaagcttgaagacaaaactagctcgtagactcccaaaataactactaactcatataaatacatgggaaataaattaaagagcgccaactggcatgtttattttctagtttaatttcgagttccagacttgaagtcgcatgagtttcttcaccacttgattggttgggccaagaagttggtcagttgggctgaaagggatgggatatggcccgacaaaaaggaaaataaagacgggctaaaacctaccataggagatggtccacaggacatatgggtcccactaagtctaagccctttcggctgacttaccacaggaggtggtccataaaacacatggatgcgataaaattggttatctttgtgaatggaaaacaaaaatcagaatggactttcagttacgaatagtagtatcaaattttgcagaccactttgctcttgcccaatcaaaattagcgaaactatacaaacagaaatctcaaacaaggcatttgatttcattcacgggccatctgcaaaaggagttgacagtgctggaaggaacacaaatcaagagctagtttcagtcgttgctccctccgattcccgatcacagcaactctccctaacatcatccagcaatgacgatgcagtatcctgcaacaacagcgtgtgcacctaattagaatgcagagcacttgattcactcgaaaaggcatcgaatcctgtcatcctgagttgttctcaaaataactttgtaccaataacagaaaaaaaaatgaaaggctgtgtctcagtgaatctaatgggaatggaagcatttaccagcgaaccagagtgcgcaatcccttcctttctcttcctctcttccttcgatctcagtgattccactggagtgtaaacctgtcaaatgaaattgagaactagccatcagcatccaacagtagcacagaaaacaagcttaaatcgagctaaatcgaatccgcgggcggcacgcggacgaacgagagtacgagactgacctccggcatgccgatcagccgcatgagctccgcgacgaggcgccgctgctcgtcggcccgccgctcccactccctcgcctcccgccgcagcgccgcggcgcgctcctccagggccctccccgtcacctccctcgccgcgcgcatccggccccgccgctcccgcgccttctccagctcctccgccagcgacacctccctcaaccccaccctgcatcccccggccttcgcgtacgacctcaccgacggcggagacgacgccgccctcgccgtccccttccccttccccttccccttcgccgccttcccggcgagcgccgcggctggggaggccaccacgttggtgtcccgcggctgcagcggccgccgcacggcgacgacggcgaggcccccgcatcgcgcctccatcgcgagctgaggatgcaggagaggcgagaagagagaaaaggcggcgattgattaggaggagtttttcaagggggggatttggtgggatgggtgattcgaatttgaacccgggatggaagggaggtaaagtaacggctagtaaaacaggttgccctacgaatggacggttctgcccctggggaacgtgggggtatcaggaagatgttgaggggtagttacggtatgttggagggggtatgaatatgatgctgttttgcatgggttctaggggaggcttttgacgatctggctttgtgctgggtgtcatctagcgggttcggtggcttttggggccattggaggtttaaaatcgagggcccaaagcatgaaagtgatgcttctgatctgagccaatatcaatacatgtaacacaccacaaacacagatgtttatatacacgtgcgcacatacaatatagctatgacagtattttagagactaaatcagcatatcttaatattgataaaatcatcacaatataataattcaatcttggagatacgctaaaccgcacccagtgtgcgttttaactaaaacgctcccctcacatagcccccccaaccttccaccccctccccccacccccatatccatccgcacaatctttcccacatccctccttctctaaaaaattctttcgttaaataatcagttactatcagctgttttagttcaataagtaaccaagttactatcaagtaaaccattttttaatgtactcccgcacttctttcatgattggccccattagtaacaagattgctcaccttttttatctactcccgcacttctttcatgatttgcccattagtaagaagattactaagtcgatcagctatgagtaaataagttactaacactcccgcactcccaaatcgattccatctctcagtaaatggattactcctagagtcctaggttgttttcaacctttctcaatttggttcctcctctcagtaaatgaattactctcacgacgttctcatctcttctcttaataagttagggtgtgttcgcatgtgctagttccgatccagggctgttgggaaccttgaccgtgtgggtcccacgcatccacgtgttgtggcgctacagttgttcggaagcaaatggctcgaacggagttacggtgccgtcacggcttccttgcctatccctcgatcccctttcttccgtcatccactcctctcgctcgatcccctttcctccacactcctctcgctcgatcccctttcgtccacagcgccacgacgaaattgccgtagggaagcagaggaatcccccctgccacccgcgaatcgattcttccacctacaaaatcgcaccgccctcaccaatcccccctggaatctctgctccaacgagtggtcgctgtcaggtaaagctgccggcagcacgacccagctccatcgattcaagcgagcagtatcgccgcaggctaggagcatcggtgcaggaggcagtgctgtggctctgggtcggatagtgctgagcatcgtcctggagggtggcaaaagcgggcaggcgtgctccctgtgcgcgtcggcatcggcgctcgtccggccgagtcatcttgtccatgcctggcagcgcccgtgctcgtcttggagcgagaacagttcgcacggaattgaagcgcggaggcagcaaagctggcggcctcaacaggaagccagctctatttgaggaggcggttgtggatgcggcaatggaggctaaggggaagaagcggaagagagaggttgaggtctcacaccccgcattggagagggcggtagttcctacgaactccgctctaccaatccaccgatccgctctggagtccggcgaggactcctccgagtccgtcacgtcggacgcgggcaccgccaagcctccagccaaggacgtcgtgcatgtcgccaatgcactgtgtacggtgtgcaccaagtcccccaaagccgtcatcgagttcgtgcgccgagtgagcccttccaccgtcagccgttcaattgactgggacctcgtcaacgaggacaaatcatcgaaggtatggctggctggtgtagtttgtttatgtcattcattttgtttgttgactagcatttcagtagatgtccgaatcgcgtggtcgctggaccgatttcgagctgcatgtgtttcttgagagttgcttggaggagatggcggcattcaacataacatcgaactcccccaaacccaaggcatgggagaacttggtgaagaaaatgaagaacaagtgcaagaagaagatgacgaaggcgcaattggagtatatctgggggcagtgcaagaagcagtaccagctgtgggtgtggcttgaatcgtaggcgaccggacttggccgggacccccttactgcagccattgtcgtcgacgaaagctggtgggaatgccaaaatggggtatgctacttgtacacaaattcattttgcaatccgattatcttgctaccattgtgttaccatcatgtctaatatgaacataggcagtatgtagtaaacgttttgggctttggggaatctgattggtgccgctagtataacctgatcagaaagcaaatgatctagattgttttcagcgtataatgaggaatcaaacagattctagaataatttcagtagaataaatgcattctcaaatttcggttggataatgtgcttctgaggaattggataatgtgatgctgctgccctttgttctctagtgctatatggtactataaattggctagtccttagaagtgacttttgaagaacttaaatggagctgcaagtacccttctttactcctaggggtattagtttgtcctatcagttaatacaccagttaaccatttacgcatagaaataatgaatggtagaatgaccaaaaaatgtattgatctatgtttcatgtgtcataactcattcctttgcaaacacttatcaggaggtaccataacccagtaatattattcttacatgtaccataactcattccatgcagcgtagtcacagaagtgtgaaaataatttgaacactacatcttttgctgaaaattgtttcttattttttagttcctaaattcttaacaacattctttgcatcaaagtccgctatatctgctcatatatgtgtcctattggttatgatatgttttactcatttcgctaattacattactacatgccatgctgcctacactttacatgtcatcttgtctgtactgtgccttgtcaaatatttcctctataacaagttccatgtgtacaattgtgacaggtgaagaagggtgtgatcgccttcagaaacgatcccctgaagcacattgatcttcatcacgcggtctttagcacgcgcaccgttgtcggcaaccactccgccgtcgctggggctgaccaaggcccaccgcaacaacccgttgaatggcagcccattgacatcgacgagctgacagcagcgtacactcctccaccgcccgcgccgtcgacatatggtcagagcaatggtagtaagggcaaaaggaaggcatccggtgagacctctggaagttctaacaagcggacacgcagtagcgattggggcgatgcgcttgacaggctcagtgtgctgtgcatggcgtccatggagagccacgcaaagcaaatggatgcttggaaggctagcagccctgacggttgcatggagttggaggaaaaagatggcctccggccaggtagtgaggtctggtttatggccgcgcgcttgctacgtgatgcaagcaatggccactgctttatgttcgcgcgcctcaccgacccagatgatcgcctgcgatatattttaacaagtggcaacgggtttagtggtgcatctggtggttcgaactagtatcagctactctactcctgtttgtttcatgtgttgtgtgttttatttccaactaatcctgttgtaatgtgaaataacttgttcgtggtaacatttggtgttctgtgttgagtgtaagcatctctttcgacatgaacattaatttggtttaatacatgtgttatgcttcattgtctgatttcatataagttggtgctttcaaataaattgttgcattacattccctcatgatcacacaaattgttgttttaaaacgaatgtgtgctttcaaataaatgggttctttctaataaattgctgctttctgataaattgttactctcaaataaatcggttgatagatttgttacaggaacgcggagatgagtagcaatgtcggtccctacggctgggctgatggccataccagcagcgaggaggaagatgccatcatcgacttgctggccaatgagatcaggagaaatgaaagagcacctaaccgaattccagttcagaccggtatcagtaggatgatggacacgttggcgaatagaaggcaatgtcgggccatgttccgcctgaccgctgaagagattcacagtttgcacagccttctagtaacttcttatcagcttgtcgatactggggggatttcttcgctagaaaaattggggattttcttgttcatgatggctggcggccgttcgacaagagacgctaacaatcgttaggtccggtcgaactcaaccgtctctatttccttcaatgaagtattggattgtctcgacaagttggctaggaaaattttgagaccaaaagataccaacttcaggacatctcacataatgtttcaaacggaggaatggtacaaaccattttaccaatccgtgggtgctgtcgacgatacccatatatgtgttgtgacttctgcatgcacgacgatgcaacacataaacagacaccatgtcacgacgaaaaatgttctcgtcatatgtgatcatgatggcagaattattttctgtgattcaggatggccaggatcagttcatgatcaaaggattctgaacgaggatgtgcagtactatcccaatgattttccgcagattccgcgaggttagtgaacttcacttgttcactttacaaactttggtttccacactccaatcaatttatattcattgcggtgcgatttaattaattatccataatatgttctacaggaaggtatctacttgtggactcaggttttcctagtaggatgggatttcttgcaccgtacccacatgtacagtaccatagggatcgattgggacgaagacaagcggcggcacccgaaggccgagaagagcacttcaaccattgccactcctctttgcgaggtattgtggagagaactttcgggatcgtcaaaaagcagtggaaaatactcaaggtgataccgtttaacccagatgatacagttggaccacggatcatacatgctgcttttgctcttcataactttaagaagaattataatgatgatgtgaactacgtttaaacaaatcctctgtacagcagacatcccattccgacgcaaccgggaactttcaatgcgatgtactatgcaacaaacaacgaggaagcgatgagatgagcagatggcgcgacctcattgcgaatgatgttttcagtcgctctcaaagatgagcagcggcataatgtgctttctggtggggttgagatgaatgttcgtaacaactacataaggattgatcaaatacaatatgagctgcctttaattatcactttttgatgcatgtcttaatttcgcaataaatttcattcagtcgctgtcgaccattcctcacatcttatctgcgtaatcctaatgcccgaaacttcttttttagttctttgctaatcacgtggtcttctgaatttacagcggccaactatgcgttctgaatatagattttttcaaaaaaattccctccatgcaatacaaccatctattaacttattaaagaaatcacatgtgtgtgcatatcaaatatttctttcacaattggtgccgcgtagcaaatacctctttcacccgtgtgttgcaaaaaccacccattttcgcatgctacagtacctccactgccagcccctgcccggcatcacacggcacggcaacggaaagtgtcggccatagacggcgtccaggctgccgctttccctccgtccctgacgccctgacgctgctacagtggtctacagtactacatgttcccaacccaaacgtaaagctccgatccggcacttgcgaacgaacccttacttccgtttttttgacaaattgacccttttggaaaacttatttcgaaactaacccctgccaaaaacttcaaccaaaaataggccgtcgcctcagcgccaaacacattggcgctgacgttggccgtgtcagcgccaacgggactggcgctgacattgtgccaccgtggcggccggggccgatccccagctgacgtggcagctacctcagcgccaaccggactggcgctgaggtgggacttggccgcaaccccaaggcccagaccagcaagccttctggatggcttgcgggctgggacctcagcgccagccataatggcgctgactgtgggaaactcagcgccagccaatctggcgctgaggtgggacttggccgtttcggccgtggcccagcccagcaagacttctggatggcttgcgggctaggacctcagcgccatccataatggcgctgaccgtgggacactcagcgccagcccacctggcgctgaggtgggacttggccgtttcggccgtggccctgcccagcaagccttctggatggcttgcgggctgggacctcagcgccagccaaaatggcgctgacattgggaaactcagcgccagccaacctggcgctgaggtgggacttggccgtttcggccgtggcccagcccagcaagccttctggatggctgggctgggacctcagcgccaggtgcactggcgctgagtttgtacatgtcagcgccatttagcatggcgctgacgtcccagccctgctaaactttagcaaaactttgcacacaacacaggcaaacatcaaatgacagaaatttacaggcagtaatatatccagagaaccatacaaaacatacatccatccatcaatcccaacatcattccatacatccatagaatccatcaatacatccatatatgaagtccatacatataagaaataaaaacatcccatcgatcctcgtctatacatccagtcgagtccatacatccagtccatacatccagtcgagtccatccatctatccatccatccattgaaccatgcactcacctcctcctacctctagtgcgaggacgaggcacgtcgggggtgtacctccagtcctgcgaaggagcccgccggcttcgtggtcgagacgggccgggctgcgagatatccggctgtgacgactctggtgcgtcctctagctgcgagggaccgagctcatccgcctcctcttctctgtcctcatccccttcttcctcctcatctccttcctccgcctctttgtcttgctcgccctcctcgtcacccacctccccttcttcatccccctcttggtgggcatgagcatgttcgaccacatcagtcgacctgcagccgagccttgctgccaacttccgacatcgctgccgtagtctctgcataaaaattgttaagtgaaattactaacttgtgtaggtcgatactcgtggagaaacggtgcgggattgtttgaagcctcccgaattgccgcatcacgcggtggcacatctggaactccactgcatagaagcagatcagtgggcaccgtagggtcttcaacgcatcctctatatggcacatgggattcagttctagctcgagcacttcctgtgcctgatatggcatccacaccacctgcagcaacaaaaataaaacacattgaagcacagttagtactatatagtaagaaaccatcttcatgtgtcatagaaccccgaatagcttacatgttctggctgtaggtagtccatctcgtttgtgtagtggtagtacgccaaattcctgcggcctactactggagatgggaccgattcccacaggtgagctacagtgggacgtcggtctgcatcctggtgcggccaagcctgatgggtcctccacatgggccgaccaactggaagcctcatccacatccaaacctgcgtcacatacgttagcttccaacatgttagcaagaaattgaaatgttatgaaacataacatgcgtgaacttacctgtagcaaccaaacacagcctgctaggttcgcgtccccgccttgccttcggcaagcatcacagagttgccggtacaaccaggctagggcagccgacccccagctgaaggtacccgcctcgtcccagtccgcgagcaacggcagccacatccaagaagccatatctccaccagagtcagggaacagaatactgccgaagatgtacagcacgtacgccctgcagtatcgctgtactgtagcctcgtctgcctcagcgggacactgaccaaagttggctcgcaaccaactcaaaggaacccctgatgtctttgtctgcctctgaccatcaggtgccactggaggctccagaccaaggtactcctcgaccctctccctccagttccccgacgctgtgtcacctgtaaccggataggaagtggaatcattagtaattgcaaaaaaattaacaaatgaatacgaagactcgttagtaattccctgacgctgtgtcacctgtgaccgcctgaccccggataggaagacccaggatcatggcgacgtcctccagagtgaccgtcagctccccgcacggtaggtggaaggtgtgtgtctctggacgccaccggtccactagggccgtcagagcagcggcgttgtacagaggcaccggtcgctgcgccatggtcacgaacgccaagagcttagcccgccgtaggtacgggacgtaccggtcgtcgaacagtatgtgcgccgtgtgacctctgactcgaagggtcttcaagcgctgcatcaaaaataaaaatgcgattgcttgattctttttctcttctgcgtaatcaagaataatataaaatcataaagattgaaaacaatccttggagcaatggtcagaatattaacaaaatgcgattgcttgattctttttctcttctgaatcattgcctgattgactgtatggtataaagtcccttagttattcgtatatatgtgtgccattgtgtttatttcagcttcctatactttaggaagcttctaaaagtgcctttgctactaccggagctttcactttggattttataacaatttcctgcacaactaccatgtagtgtgggactaaaaaatatttgtttggattcagtatgatggatcccaatcccaaatcagacaacccttctgagaccattttttcttactcagtgttgcatcctgttttgtccttagaagtgattggtaggaattgatatattgctaaatgatgatacattgctaaatgatgatacattactcagcatttgttttgatttgagggaaatttgcgacgccaagattttgcaattataactctgcatcaagcccataattcagattcttcattttacttctcttttgtaaaattggcattcagtaactcaatttacaattattcattgtggaactgtgcatattattcaagttctaattgtttatttgatatattgactttcccttcgaaatggatttgtctagaatgcataaattggtgtttgaatccagattatcattctttcttttttagtatatggagcacacatgcaatatatcctgtagtcctgtggctaatcttcagaatcttctttgtgtgttcataagatagatagcaaagatctccaggtgcaagtggtagctatctaactacttatgttgacatttatctaactacattatacttttgacatgatggatgatctatctgtacaaactaaaatcaaagaagaaaaaataaattcgatcataaaaaaaatggaatattgttgatgctaacctctccgctggcaatctgtggggcccggtgcttctcctcgtagaaatcctccaaccccggaaagtgctccatcctgcaaatgaaaatggaatcaatagtaattgaaaaaatattaaatggaaaaatcacaatgagaacggaaaggaggacaacagaaagtaaacattgaagcaacaatatgaacttaggaaatgaatgtcatccaatcccacctgtgtgctaccctcaccacctccccccgtcctacggcgctttttcggtcgatccttagacttgtctcgcttcgggcacctagttttcttatggcctagttcgtggcatagcgagcatctattttgcatgaccggctctgaatttgtattgttcggcttttgtgaccgtcggttggctgagcttttgtatgctttgtccatatcgttcttgaaccttcttgtccttcttcttcctccacacttcatccccacccatattatccatctaataatccatccttagccaactattatcaaaccacgtctacaaccaaaacaatgcaaaatatccaataaaactttggggaacttagggtttatagaggggtttaccttctcttccgatcccaaactcaatgccgcacaaatcaccttcgattagagaggtttttgggggagattgggcgaggagaacgcggtggcgaccgaaccctaggcgggcggctggggaaaaaacggaggaagaactggctggggcggcctcggccgggctctaagtagccaaggtcagcgccaacttacttggcgctgaggttgggcacctcagcgccgaagcggttggcgctgaggtagctgccacatcagctaggggatcggcccggccgccacggtggcacaatgtcagcgccagtcccattggcgctgacacggccaacctcagcgccaatgcgcttggcgctgagccgacggcctagttttggttgaagtttttggcaggggttagtttcgaaataagtttttgaaaagggtcaatttgtcaaaaaaacggcccttacttaggatagtactcccaattgattggtataccttctcttagtaaataaattatagtataccttctcttagtaaataaattacttagaattaacattgctattgccacaagatttcttagtaaataaattactatggtaccgatgattctcaacataacttattgatcttgccacaaaattttttgtagtaaccaagttactattaaactaatggttcttaacattttctcttagtaactaaattacaccaatgattctcaacataacatattggtcttgtcacagagtttctcgtagtaaccaagttagtattacaccgatggttgtcggaggcgatggcggcgtggtggataggtatggagtgaaagagggcaacgggtcggccatggagggctggccggtggtcctcttgtatctggccatccgcggccagccgccgggagcacgcgcgccttgtgctgacccggcgtgcttgaggggatgcgggtgcgaacgacctcctcgctatcggtggtgtcccaccttagccgaatcatctctccagggcttgacttagtccctgcaaccgaacatttcgcaattcagtgaattgaaaaggccaataacaaatacataaaggaactcttttggtcaaaacgctcaccaatatgagtgaacaaatggaaattcagatgggaacagatttctgagaatacaacacacaaatttgcaaatgacatatttctaattgacatttagagcatcatatgtgtatgagccccataattttcataacatttcagagcttttgacccaactgtgagtatctaattgtccagccgaccaaactaaaaaattatgaaaagggctgcacttgcaaaccgagagaacatgacactcagagctctgaatataatttctctgaacgaaaattctcagtccatctttcattcagcaataaccgttacaaatcaacatgagagttgagagcagccactagacagattgaaaaattgtcacttctgcgcatgtctgtgtgaaccaaaaacattcatagaactattagccaatcaagatatcaactagaaaatctaagaaactacaagcacatcaaaaagaatatttaagaaactgttggcttatcaattaaatgttgtccaaagactgatgaaccgatagcccaaaagccaagcactagtgatataaatcgacatttgttacatcattaagatgagcagaggtgtgcatatcagctaacaagcctgcccagaacacacatgagaaatttgtagagttgtgatcgatgtgcttccaataacacaaaacgaaataggcagccagatctcacctgtgcacagatggaaataatcaccgctgaggacgcagaaatcaagtggatgagtacctctcgtcaagtgcatcaagctgtacaatctgccatgctttcccttgatgaggaatacaatcaatcagcttcaatgtcgctggccacaagtaaaattaagaatattaggcctgaaaaagtatgttctgtcaaaacattccgataaaccgtagcatgttgaatgggaccatatgtagtccggtagttcagaaatacaatccaatccatctgcattgttgaaccacaaaatttcagagattgtccatccgattaagctccttgcaaatcataaaatgtatgtgcattgcaaaagactaaagacagtgaacaaaattgttcagttatacttgtttctaatagttgaacatgaataaaaactataataggcagctaagtaataccttggttatcaaatctattatgtgctcaatatgctttgttaaccgtggctcgtgagtagggggaggcactgaagatcagacatatcaagaatggctgatggccggccagttcctctacgggaagaggagggcagcaactgctcgccatacatcccaccaggagccattgttagctcgctgtgtggcagcggtggtggcagcacaggaggcggcgccataactggcacatgaacctcctcctccagctgctgccgcttcggcggtggtttacggtccttcaaccgccggtggcagaaccacatctgcagctgcttgtctgtgagccctaacttcacagacagcaacagagaccaaaccaagtcaaaacagaaatcccacggccgtttcgatcgaaaaatcgacaaaacaaacacgaaatagccctaaaatttccagaatccccaattccccgtaggccatcgacgaacctgtgtaagtcctcttgagaacctccaactgatagggcgtcttcatgatgcgcttcaccttcccgctggatccagaggcgctacaccaccaacagcggcggcgggagtgggagagggagcagaagcctgagccgacgccggggcagggctctcctcctccatcctagcgtcgcccgttcttgtccgctcgcctctgcccggctccgatctccggcgactgcagcggcgacccacgagcgctacctctccagccgattccacctgtcgctggccgatttcgcccgtcgcccgccgcccgccgctggaggacaccgccaccgccgacgccgctcccagatcctaaaaatacggggtataaccgtacaaagcaggtgtcaagaaaatggcttataaaatggtgggggtgggcccacttaaagtaacaacgttactatgagtacaaggtaaatacatactcacgtaggaataattttactatcggtactacacgagcgggaggggggtgttccaggggtggggtgtgggggtggggttgtgttttaacccatgtgtagtatagtatatctattcaatcttcattgaatataggagcattataggacactggataaacgatcattttaccgtctggggcccttgtttgattgggtgcacggtccatggtagatgttcaccgcagtggcgtagccaggttttcaagatatggtggtacaactcagcaaatctacaataggattatacaggattgcaaggtttaatttcaatttaccattccaattccaatcgatcggatatcctaaaattgaaatgagattgaacatttgaacctaaagaaaaaaaccctactgttagggaggagaaagagagaagcagatgagaagttgagaacctgctaacgtgctgtttgctgtgctttggtgttgcgtgcctcctgatgaatggagtgctgctgattgctttctccctgctggttgctgctggcctgtggcactgcgcgctggtgcggtcgctgcccgcggtggcgcagtcgccggccgccaacgtggcgacatcacaactcactcgttagtgccttagggcattagcactgcgtcacgtttttctgaggagcctaaacagccacgtacgaagaaacagcgtgaagctcctctctccacaatgcggcgtgggcgcgtgtctttaggtggacctcaccaaactgtttctcatgcgggccccaccacaaaaatttacttttttggtcagcttctcccccttctctctgtgtcctgctttctcatgtgcaaatgcgattaaaaaagctgtttttctgacgaggctctcggagccaaacgaggacgcgcggagctggtgaatacatgggccccatcttcttttcttctccacgtatacaatctgcttagctggacagttgaggccaaataccatgtagatgcattgtgaatggccttagtgcctcagtggacagtggtcgtcgtgactcgtcgacttgcgcgctcgaaaattggaaacgacaattacgatggaaacgaagcgacgcgccgacgcccgacgcggtgcttgaattggcaaaaaaaacaaagcgtcaaagtgccatctatatttttctggaagtagcgtatagggctaatgggccttaggccaaaattctatgatggtccatgaaccacacggaccacattatagctccgcccctggttcaccggttgatatcccaaacctactggatggcacgcattttgtgcagctatattttctttaaagtatttttaagtatcgcaggacatccaacatgcataaatttgaaaatcaatatgatagctctgtttttttaacatatgatatagttgacttttcagttcttttgattattcttctctataaatatttatccaagtttgagaaaataatatttttgtcaaagtttaagaataaaataattacgtcatatctactagagtacttaaaagcagaatcatccaccgtttcgttcgcatagcatatcacacgaagcacaaccaccacctctaaaataaatgaataaataaccgcatcctatcccaaccaaatccttccccttccttgatcagtctgtcatttgagaagagtagcagtagagttctgatgttgagctgtatgtgcctccgagcgaggaagtatcaggtgctacagaacagttccgtgctcccgtactaccaagctttaaaaatgcacccaaaaagtcaaaaaaaatgtaaaaaaaatagagatctgcagcactatgacagcatcacagaaaaaaatcagcttaaaatatgatgtacacagggagaaaaaaaacaacaaatctgtgctccaacagtgttcaaacatgtcgctttactattcatattttgatttgattttatgtgatgttacatgtcatagtgctacagatctctgatttttttcacatttttttgtgactttttaggtgcatttttgaaacatggtagtacatgagcacgaaacatttccgtatagcatccgatacttcctccgagtttttctttgccaagtttcgttatgtttttctactgtttgcaaaacgctgttcaaccttgataatctattattattattattattattattattattattattattattattattattattattattattataacattggacggagatatcacgttcgttgtagagactaaaagttatcatattaattaaagaaaaagaaaaatgtttacactgttagattgtgatgggtgtagattataacaatgtagattgatcatgtatccataaaggaaaataatagacaaaatccatttgggattttcataaaaatatatactccattcatttcatattataagtcatttgaccttttttcttagtcaaaatcctttagattttaccaagtttactaaaaaacttagcgacatttacaataccaatttagttttattaaatttaattttagatatattttgttaatatgtttattttgtattgaaaatgttagtatatttttctacaagtttaatcaaacttacagaagtttgacgttacataagtatgagtaaaagaagatcaaattacagaagtttgacttacataagtatgagtaaaagaagatcaaatgacctataatatgaaagagggagtaatagaaaaggacacatacgatactacaggaactctttttggagtccgactcacatgtcccaagcatgcaaatcctaacatgttttttatatatagaactaaaattaatataaaaataagattaattaaaattcaaaataaaaataaatagactccaaaaatagtatttcaatactaaccccaaataaattaatatttcaaaaaattataacaataatacatctatactcctaaaaaaattagtagtggtggtggtgagcaatgaatctgccaccacccctaccactaagtccatgcctttttagattgcagaaaaaaagtgaggctagaggttccacatatcaacctctacaaaatctctattttttattagaaggaaataaaacagtgtgggacaagaggacccacatgttaataataaatatatgtataaattaagatagggtgtatatctttacctattataaaagttcaaggtgtttttgccagaattttggtacgtcatccgtgtttgaaacagttttagttttatgttttgattttaatctatacctctactaaaaaaattcccatcttatatacgtaaaaaaaaagaaagaaaagtccgaatcaaaaaaggtaaataaagaaagaaaagaaagtccgacttaacgagctattaaaaaaaagaaaagcttccgtcgtagttagtaaaaaaaaacatctcttgtccgactctatagaaaaaggaaaaaaatctcccagtaaaaaacaaaaaatctgtttgattttgttggcaccggtattattttttccttttttctttgcacgcagagttttttttccttttttctttgcacgtagaagagttttttatgcggctaaagcttttggtttttttttatctttttttaatccgatctattcaccgtgcatctcttgggtgcttatagttttttcgtcaatattttttgtcaccggttttttctcccgtgtactttttgtttgtctcatccggttttataatcccatctgttcgtcgcacgcctcccgaggtgaaccctagcaccacgccgctgccatatcgatagtgtgttttttcctccaatttaattgtaaaaatcgattccctactcctctctcaccattttctcaatgatttccccttcgatttagctttaattgttggatttaatctctgttctaaagttgccgattttgacggcgatcttccccggtcatttttatcccgaattttacgctctgattttggagaaaacggaaagagtagattgagtggatcaaaaacctcgaacaattttggttacccaagaaagattcggctggatttgatggggagatttgctttggcaaacgtgcgggcacgagattatcttcgggcacgggattatcttcgggagtcttcgggaggttgaagatggtagtcatattcggaaagttgaagatggtagggtcgaagagaagcagaccaaatggagggaggtagcgggctagcctagggctgaaaaggaaggaaggctttcggctaaaaacctaggaaatattttcattaacttttttttaattataatatatagctatcccaatgttaagatttttattaacttttttaattatagtgtatagtgatcccaatatttcaatttattacttagctcttgatatatcactgcaaaaagtctttacccgttgcaacgcacgggcatcttttctagtataaataatggaataaaggttaataataagttaagatagggtatgatggtggtggttgatggaacatctatatctatacttctatactaataatataaaaaggaggaattgtccccctccaatcctacaggccaaatcatctggttaaatcccaaccgtctatccatagatcaggtaatccgtaccgtcgactgatctccaccgcacggtttcatcctctccacgcacaaagaccgcgcgaagcctcaccctcttcaggcgtgactagctcgctcctcctcgcttgtactgctgtcgccgcctcactccaccgctgcccacgccgaagctgacgtcgtccccagccgccgccgccgcagccgaagtccaccgctaccctcgctggatccggcttcttctccagtcaccaccggcgccgtggtgttttccgacagctaggtccttcccagcctccaccacactacaccgcagcctcccctcgccgacgccatggtggttcccgacggtgaagtccttacccttttgccgcgccactccactgcccccgctggcaccgtggtggttcctgatggcaaggtccttccccgccggcgccgcactccaccagttgggttgattaccgatactatcttgcttctggctgcctcaaatcgtgagaaagcagggaaccgatagagggattactccagcgccaacgtcgatagaccgcttgcctcacttgcgccgtgtcaatcccttctccgatcccctccgtccccatcgtctcttgccgctcacctccttctactctgccacacaacctggtgatctctctattgtcacatgttcccctctccctttggttaacgctgaggagtattaactaattttgttttgcatgttatatattttataccagaagtccagaacaacgtccatcggcatgaagatgagttgtttcaggttgttgaattgcttgccaatcccctttcgattttccgtacgaaatatactcagatcttacatccattccctcatgttggttcctctgtgattttctgttgcagagcatagcttcatcaagccaaatttaatgttttctaatttctcctgtttgttcttacgtgatattacttgtagcagctaaaatcaagatgatctggcttgggtaggtttttaggttgtgtttgtatgcaactaaaagttgccaggctacgctactaggtatgctgtcatgatttatatatttttttttgcagtgtcatcattttgtatgaatcatatcttcatttggtaccattaaaattctttctgagttatctcttaatttcttaccattagaaacaatgactctcaatgttttcaaggatcaagttcactgccatgatacactgaatatagccatgtgagggagctcttgccatcaaaaatatgcattggacgtgcatgattactagtagaagcaaaactaggagtagcagatagcaaaactaggagtagcagatgcatctaccaaaggaaacccgaaacaagccttcccaagcaaggaaacccaagacctgacgaaaacaaactcgggctcagaccctgacggtctgaccggccacatacctgctgttggtatttcttaacgacgttactagaaatataattcccagcaatggcacagaaatactcctggtatattatggttacagagttcatccgcaagcgcacggatataccattgtagtatttcacccgagagtattccaagagtattgtatttatttaatcatgggaagatcatggtagattgaacttgactaataatttatatattacttgtaataatcatagtctaggcaggggttaagataatccaagagtagagtgacacacaagcagtaagctactcattctcatactaaattatctaagctaagtggaaagaaaagagaaagataatgtactcctatacttctagtatacatagtatactacattctagtcatctgatatactagctaataccctctatccgatgcccacctggtacttcgagaagccacccctgactgccgagttccttacgacagcccgtcataaccatacaaccggggctaaatacagaggagtatcctctccaggaaattaacttagtactatatacacgcgcggaggaatacccgtactgagctgtcactatcagcggcccacatctcatccgcagcatataaccccaaataatgatatcccgtaagctagacactacgtctaaactaccagatactactctaatatcatcgtcatggcatagagcaattgcatacgcaaatattatacccgcactaaaacatctcctagatgagctagtagtatattcaatataacatgaacataatgtaaagttggcaatcatatactcggaaagtatttcaattccataaatgtataaagaagagtattctaaataaagtacaaagcttacaaaagagaagagaagagctactagagccataaccgaactcttctgaaggcttccggactccgatttctactctattcctattccactagcttaagaacactaaactaaacttgagagaatatgcttgaggtgtgtggaggaagtgaggaggtgaagcccttttatagctgaactatgacggttacgacggttggaatggtcggaattaccctccaaccgtcataggggcttcatctcagccgtccagccaaaacctggatccaacggtggccaggtgggttcggccgaaccaggggccggcccatccagcccacaatttggctggtggcctcctctactgctcctctccgcagacttgtgaattttggcccaattcgtcgtgttaattttgagttcttggcccattcatgaataagtttgattctcgacatcgtccgattgatttatcgtctgaattgatgtcgattctactccactttatggttattctctgcaaaaagttagtgaaccaaatactagtggaatattattattctaacatataaatgcattgcaagcataactagttcccttctattttggtagtactgatggtcgaaactgatcgctaacgatcgtcaacacctgcggtcagtccggagttcaggctgtggtcaaaccacccacatacctgcggtctgaccggtcctgtgaaggaaacccaacactttccaaactttggcaattttcacctatttcatccataggtgccaaatttgggtgtaaacaccgacatcttcgaccctcctctagatctcccttggaaagaatgttgacatctctagcactcctctaggactcctaggagaaaactccgaccattgggcaactccttcaagagcttcctctcactattttactatattataactctactatagagcagcctaaacatgaaagtgagttgtactccactttgctgtgtgttgagagtgaagcaagctcctccttttctatagtagttcggtaagcttgggtgcatgaaaaaagagggagtaggagatgagaaaccagacttccgaacacgatgggagagaaaaaattaggatggagatgaagatataggaaaaaatgagtaaattgcacacacggtgcattaacttggcagatgagtgcaatttagtgcaagaacttgagaaatgagtgttttagtgcaacaacttggtaggtaggtgcaatttagtagtataaaatttttataagtgatcatataaatgcaacaacttgcaagataggtatgattttgatacaataacctaagaagatatgcgacaatttaattatttggagcatttttttatatagattcaattttaagtacttattttgacaatatactagcgtgtatttgtataagaatatttatatttttatcctaataactgatagctgaaagtcaattaaactggatatagaaattattatatttcggttgatatttgagaaggtgaagaaaacaaaaaaattcttaaaaggtaattggatgtaaattgtatgtgcagtataattcttaaagattaaattcaatattataaggtaatgtccgtaggattactatgtaatggcatattgatatcgtgaaaaaaattcacttagcatatgcttagccaagttgatgtaccaaaatactaataaattattaagttcttataccagaacgctttcacttgttaagttgttgtacttggacatttaattctcaagttcttacactatatcgtatccacctgccaggttgttgtaccataggtgcaatttacttgaaaaaattgagctgggtgaaaaaaatacatgcgggtctcctaactctttttacatgtgagcatcttaaggatgtgggaactttcccaacttaattatctctggttcggtatgcgtgtttttccaaaccgttaaatgatatgtttttttacaaaaagtttatataaaaaggttgctttaaaaatcaattaatctatttttcaagtttttatctaatactacctccattccaaaatatagcaacatttgttctgaacggacaaatttatagctaaaaatacttatattttgaaacggagaaagtatttaattaatcatgtattaatttgccacttccttttacttggtaagtggagaagttccaaacctcatctaacacggccttaaaaaactgtttttactccacatgaaaaaatatattttttatattttttgaactatgtagatttttaaatttaaaactagatacttccaaaacttattttcagaatctgctagttcatccggcgtggtaaaataatactgaacaccacacacaaccagcgtgatagttttgtcctgtcacgtggcgtgaccaaataacgctaccaccacaccaatgagatcagcgtgatcaaataacattgcacgttagccagactgatatgatagtattattttaccaagctagtccggctagcgtgctaaaaattaagatcttgaaaattagttttgagagggtttattttaaaattagaaataaaaaattcaaaaaataaaaatattcctgaaaaataaggtcgtccgcaaaaatcgtttttgattggccgaggagaaggcgaaacagactgccactgtgccacaccatccaccgttcgccggcgccggcgccggccgccgccagccccggcccaccagctcttccccaccaccgcaccgccgcccccaagccaaaccccaacgctgcgtgcgagatgaaccgcctccgccgtcgccgcggcacctcagtggcgccgccggtgaccctgccggacgacgacgacctcctctcggagatcctcctccgcctcccgccgcgtccctcctcgctcccccgcgcctccctcgtctgcaagcgctggcgccgcctcgtcaccgaccccgccttccaccgccgcttccgcgcccgccaccggaatccacccctcatcggcgtcttcgaggactacctcggataccccttcttccggtccgttctggatccgccggatctcatcccacgggagcgcttcaggttgcggctcgccgaggacgagggcggccagtggcgcttctacggctgccgccatggccgcgtcctcctcttcaaccgggccaagaatgagatccttgtgtgggtccccgacaccggcgaccaccgccgggtggccgttccgccggagattgacggcaaggagaagatcatttggaatggggcagtgctgtctgctgccaatgccgacgacgggttcagctcttgccccttcaaggtggtgttggtaggcgtcgccggcaacaacacacagatgttcgcctgcgtttactgctcggagtccggcaaatggagtgatctcatctcagtagctgctcccttcttggtgtttttctttcgtgatcctggcatacttgttggccatgccctgtattggatggcttctggtgatcatgggagtaccattcttcagtttgatttggatgatcaaacccccgccgtgattgagtggccctccgattccgatccaaattgctacactcagacctggctgacagaaggtgattgtcttcgcgtcgccactttctctcgcggaagccttcaaatgtgggagaggaaagtctgttctgaaggtgttgccaagtgggtgctgcagaagacgtatgagctgaagaatgttcttaacccggagattaggttgaatgtagagtatgtaacaaagctggggtatgctcaggatataaaggtgatgtttgtatgggctgctcacagtgtcttcatgctccaacttgattcgttgcaggccaagaaagtttgggaaagttgtgtcatcgccccaattcatccctacgcaagtacttatgttgcaggtacttatgttttcagcatttaactgcataacagattaataggtgtagttgtataaacacgaaataaaaagcacagaatctagatttgaatcatctggcgtctcaaataagtaatttgctcgctcatttcagaaggtaacactgttttttttttcattcaatacctgtttgagcgagatgacattttagaagccttgcggtccaccttgttttgaattttgaacattgcaagatgtagaagtatttagatttgtcatggaaaataattgcatggtattttgtttttatttactcgaaaaattaatgttcagtcttgtcaaaagagggtaaaaagtcagaagcatcaccagtaagaaattaatttgcacctgcatagaaatgtattaatttgcaccaggaagaaatatatatacatatattttttgtattatcttttttctaggataacattctgcttgtcaacgaagttctaattttttttttactagattatgttagcttgaggatgcattactctagtccatttatatacacacggtcagtgcagcagaataattttagttaacttgtgcacccatagttataaggtttattaacataaattttcgaggaatatttgcttccctttagaattttattcagtttacatttgtgatatctccagtacgtgtgtttttttaatgtgtggagtctactattttgggttagggtgtgtttgcaagaggaagttcccaacactcccatctcgttttccgtgcgcacgcttttcaaactgctaaacggtgcgttttttgcaaaaaatttctatacaaaagttctttacaaaaatcatattgatccatttttttaaaaaaatagctaatacttaactaatcacgcgctaatggaccgctccgttttccgtacatgggagatgggttcccaacacccacctccaaacacagccggctttgcatggtgatttgtgattaaagaagtatctgtctgattatgattttgtcagatgaccaccgtatttctaaaataaaatagataactaactacagtaaagaattccttgatagatgcttggagctctagttcaagatgaaattaactagatccctcacttgcattctgaatgttcatagtttttctatttcttagtactaaatttttcaatggcaggaattatggtttaagaaaaactggtaaggtttgttttagtgccatgctaagataaatgatatttgttgaccaaaagaggtttcacttatgagatattgagatacacattagaaagagttgagtgtacaatcacaaacggtagtaatcatacatggctggtgtacttatgcctctccgacaacttttaatttgaacatagtaattattgattggttcttaaatttctgaaagaatacgtatgaactagaaacaggtgtttctactttctacctgctatgtgtggttgtgcccctcatctgccaaaatgaagcagtgaagtagtaatcctttagttgctagatagatgtagccaaagttcgagaatagttccaacaattcaattgttcctctatcgttgttcactgtttcttctttttgtttttgcctggtaataatactgacattattcaactttggaaatttgatgtgcggttcacaatgctgaaaatagtagttgcagtttgcattgcaccaaaaaaaaaaagtgatataactttgtgactgtaaataccagaatgactgatggaattgttctcctgcaggtatctagactttgactcttattggtaaggcgcagagatggattgctggtgcatgatcttccattttgtatgtggtggtggtggctgtgtggcctatgaagatatgtgccaatggcccaatgtagaaactggaagctgaccctctatttatttagtccacttgtcaattgtgaagttgactcgtaggaattatgtactcaaggtttcctggtataagacataacgactgatgccctgacttgctttctactaaagtgaactgaacattaggctaagcattaccaggccatgcacaatatttttcatttcagtagcattttatgtgttcagaattggcaccaacaaaattatggtttgatttgctatgcccacagcataactataattcatttatttactaatctaggtgcaatcatttatttttataactagcaaccgtctatctgaaatactacagtattatatactaaaattatgaatctttgatactccttcctccgtttcacaatataagtcattctagcatttcccacattcatattgatgttaatgaatctagacatatatatatctatctagatttattaacattaatgtgaatgtggaaaatgctaaaatgacttgcattgtgaaacagaggaagtacattggatcgaaaaaactaccttagcattatgacagataaagtggatcatatcattaacactacattactcagtaagcctcttgatttgcaacccttatattgaaatatgccgggtgctaaggttcaaccaggaccatagttttaatgcttagcattgcaacagcatcggacatataaaagttttacccaaaaatcagatttttcttttgtttttgctaataattggtacgaataagcataaggataagcaaaacgatttggctgttaaaatcccaatgacaatgaagagtagagggggcagcaagcggctcataaatgagtaggtgattgtgtttgatgggacttctaaaagcgataaaatcataacctagtgagacaataaaaactaaaaattagaaggtaaattggtggcagaggtgtaagatcaggtggcagctggggtgaattttatagactaaagccatgtgataataaggttcgatttattaatatttagataattttatatagatgctagccgtgtaatgcatggaccatcctactattttcgctacctgaaatggggaaagcttcgccctctctttctagaaaaaagattaactatttagtgccttaatttactaactcaattgattttgtatttcttaatttttcactgaacatgaacacacaccaatcgtaaagatatgtggccgccgttgcccgcgttgcgacctgagaatcgatcgaggcgagctgcatatcgatcacttagctagaacattcgttcggaattcggaaacgaaaacgacatcgacatccatttcatgatgatacacatatatgtgcgtacacactatacagtatacgcaacatgtattgcatggatttatatataatattgtagctttcagccgttgttcatgccttgaagccatgtattgcaaacgttgtacgcctgcgcgcgagtgcggcggctgcaagttgccgaattgggcacgccgcgccgtcatccttcgcggacaagcccagcagtggctacctacatgtttttatgtttttttgataatggaatgaaacatcccggcctttactcatgagagctacagccaattattataagaagtagcacactaaaaggcgcagtccaaaattaaacaagcacaccaaccaaaaataaaagaaatcctaacataacaaggaaaacattatttcagtctattggtgaatctccatccatggttggtaaaaagttacataaccgttgactcaaggttacgacatgcaacagacaggaattctctatcttcctcacacttttgcagttgggcccacagtcgaagccaatatgttgccctgaaaattacctgcatataggaaatagatggtgatttgtcaaaaaccctatcatttctacacaaccacagagcccaatataaagccgaggcaccaacaactatcagtttactcttttccttgtccacaccctgaagccaaccgttaaacatatgagatatacttctagggaggtataaaccaaaagagaattgcaccgctctccaaataaactttgcataatgacaatccataaacaaatgttgaatagactcatttttcatacaaaaacaacatcgtaaacacccattccaatttagtcttgctaaattatccttggttaacacgacacccttaagtaagtaccatatgaagatcttaatcttaagcgggatcttaagcttccaaataaacttatttctgtcaatgcaaccattattaattaaagctaagtacattgatctaacagagaactggccattctgatgataattccatctaaaacaatcagaagaatcatccaactggatgtgagcaatagaagcacataaatcataccaaagagttaggttctgtccaactaaagctctcctaaaagaaacatttagcggaaccgaggccataacactggcaatagtagcactcttccttctgacaatagcatataaataaggatacttatctctgaaggccatgttttctacccatttatcctcccaaaatcttatatgttgaccatcattcacaatccaagagcccatacttaaaaatgtgttttttattttcatgagccctgaccaaaaatgagaatcaccttgtttcctatccacttgggttatagacttattatgaagatactttctcttcaataaatcttgccacacaccattctcattaattaacttatataaccacttacttaacaggcatatattttgaatctctaaattatgaacacccaaaccaccctgatctttgggttgacaaattatatctcatctagttaatctgtatttctttttatgatcatccccttgccagaagaaacgagatctataataatcaatcttttgaagaacccctttcggaatctcaaagaaagatatcatgaacatagctaaactagaaaggacggaattaatcaaaaccaatctatctccaacagacatatgttttcctttccaactactaagttttctctctattctttgttcaataaccttccaatcattattacttagcttcctgaaatgcattggaatacccagatatttaacagggaaagacccaagcttacaaccaaagatactcgaatattgatcatagcaatctttcgcatgaccaaaacaaaataactcacttttgtggaaattaattttcaggccagataatttttcaaacacagataaaatcaatttcaagttctttgcttatcgtaagtcatgctccaaaaaaatgatagtatcgtttgcatattgcaaaatggacaaaccatcatccacaagatgaggaattaccccattaagcgaaccattatctttagcccttttgattaacaaagctaacatatcagctactatattaaaaagaattggagataacggatccccttgtctaaggcctttatgagtttggaaattatctccatttaaccttatcataggctttctcaaaatcaatctttcgaattacatcactattatttttacgatgcaattcatgtaaagtctcatgcaatataaccacaccctccatgatatttctcccaggaataaaagcagtttgagtaggactaatgactttctgggcgacactcattactctatttgtggcaactttggtaaaaatcttgaaactaacattaagtaagcatataggcctatattgttgaattttcatggcctctacacacttaggtaaaagaatgatagtaccaaagttaagcgagaatagaggcaaagatccattgtgaaactctttaaacaggtcaagtaagtcattctttatgacattccaaaaaacttgataaaattcagcaggaaaaccatcaggacccgacgctttattatgttccatctgaaaaatagccttcttaatttccttttcagtgaaatcctgagttaaagcctcattctccaaaagagagatctgaggaatatcagcaactctactctcatcaaattgaagtaaagaatcatcaggaggcccaaaaagacccttataataagtggtaatatgcgattttaaatttgcatcaccatctatcaaatggtcactatcctgtaattgaaaaattctagttttcctatgttttccattcgcaactaaatgaaaatactttgtattagaatcaccctctaaaatatcctttgatttagccctctgataccatttgatctcctcctctcttagaatagaggataatctattcctacaaaaccatctaatatccaattcttccggactcaaaagggaattttctgcctttttatctagcaaatccaacttatctaaaatttttttcttttcttttttatataaaccactactatgttttgaccagcccctaagatgctgtcgtaaccgtcgaatttttgcctgccatctctccatagcagtattgccttcgtcaacactagaccaaatttccttcaccatctcaacaaaaccatcccgtaaaagccaaccaagttcaaacttaaaactatgttgagcattactcagagatgaagaatttgtattcaacggtaaaggggtatgatcagagatatccctattaagagccaccacagaagataaaggaaatttctgttcccactctgtagacattaaaaccctgt

SEQ ID NO: 22476 - DNA, 537 bp, Oryza sativa
ggactggcgctgaggtgggacttggccgcaaccccaaggcccagaccagcaagccttctggatggcttgcgggctgggacctcagcgccagccataatggcgctgactgtgggaaactcagcgccagccaatctggcgctgaggtgggacttggccgtttcggccttggcccagcccagcaagccttctggatggcctgcgggctaggacctcagcgccatccataatggcgctgaccgtgggacactcagcgccagcccacctggcgctgaggtgggacttggccgtttcggccgtggcccagcccagcaagccttctggatggcttgcgggctaggacctcagcgccagccataatggcgctgacattgggaaactcagcgccagcccacctggcgctgaggtgggagttggccgtttcgggcgtggcccagcccagcaagccttctggatggcttgcgggctaggacctcagcgccagccataatggcgctgacattgggaaactcagcgccagcccacctggcgctgaggtgg

SEQ ID NO: 22477 - DNA, 4648 bp, Oryza sativa
tgtcttagggcagcgtgatttatattccttgcccacccttagggtgatctattctttgtagatgtttttttaattcaaatgtttgaattaatggggtattatgtattatttttattggtattgttggtttcatctctttgccgcaatttctttgcccttgtaagacagcaccggtttacgttgatacaagactgaatgctagctataggaagagcattggcagatggcgaagaaattgttgtttccgaagaatcgggcttgagcttgtttacggacctcttatatgtcgttcatgcacgtactgcaacttcgcgctccttcatatactctgtttgcgtttcagcttcaggttacttttctgccatcatatgttggattgatcgggcctgctcactttgatgccattttcaaccataccatcttttggcaaagttgcccaaaaaaaataactacgtttagtttgttgccaaatttgctaaatacataataaattctgccaaaattttggtaatattgacatcttgtcaaaagtttattttggctacaatctgaacaggcccatcatatctatccacaaagtgaatccacacctccttaactgtcctgaggaataaatctatttagtgaataggataggtatactaagcaaacacgagcgcaaaatggaaataagtaattcatttttaaaaatatcattgaaaaagtagtttaaaaaatcatataaattaattttaaaattttataactaacacttaattaataatacgctaataagtcatctcgttttacgatgggagataagttcccaagttttcagactctttgcaaccaatcactacactggccaaggtcacctgtgacggtcccaaaccctcacctttaacggctttgagcatggtcagtgatcagtggtcactggtgagtccagtcacctttgacggatggccgaccatcacaagtgacacccacctctgacggacaagttactagaagaccatcagaggtgttggtctccgctagcctagggccagttaggactctcacaagtgactcatctctgacggccctttaaataaaggccgtcagaggtgatggtctccgtatatagaagttgccacaggtgatttacctgtgacgggcccgaaagtaaaggcccgtcataggtcacctctaacgtgcctttatttgttctatattaatatagaacaaaatattgccaaactgctatgctcgtgataatgtgcaccaaaataaagatgataaatctgcttaattacatgactaagagcaagtacaatagcggactataagccaactataaacacatatgaggagatgaaagaagagaaatgtgagcagtgggctacacatttgtaacagatcagctgtagcacggactttacgtaatatgtatacgtatgacaagtgagacaagatattaatagtgtagtatatatatttataggtaactattgtataaattagctattaaattgactatatatgatttggagctactacctagttggctatactaactctaacagcagcaccggcctaggatcgccggattatcaacagtaacaaccttttttacgtaaaataacagaattattacagaactacaaaaataattagaaattttgggtcagcaggtgagtcatagtagtttttactaatactatcgggatttcaaatattttagcacactactaaaaaccaatttttatactgtcaaaactcattttccatgggattgggctacccgtctgtccaaaagtgtgctaaaattgctatttttccatatgggtatttatgtcgtccgcacacaaaataaaatttgtgaaaacaaaataaaattccaaaaacccatgcaccgccgttcgtcgttgccgccaccgtcgatgtcgccaaagcccggtagtagctcctcatcatcatcgccacagtctgttgctgcgcgcaaggggagctggatccaccgccgccgcgctccccaccgctggatccgccgccgtcgctttccccgtcgttggatccgccgccgccgtgcctccccatcaccgaatctgttgctgctgcacctcccccaccgccgcacctctcgactgccactcttgctcccgtatcaccgtcgttccccatcatgagaatgagatataaaaattttgaagatgctaagaaagacaaacaaaaggaagatcagacttgtaggcgagtctttaatagccgcattttcacaggtctcttatgcaaccgcataagaaaacatattttttcatgtggctcttgaactgctataaaaataattttacaggcggagtagttatgacccacctatatagtggcagtctgatagcaaaatcagatttaggccttgtttagttggggaaaatttttgggtttggttgtcacatcggatatacggacacatattttaagtattaaacgtagtctaataacaaattatagattccgcaatgaaactgcgagacacatttattaagcctaattaatccgtcattagcaaatgtttactatatcaccacattgtcaaatcatggcacaattagatttaaaagatttgtctcgcaatttatacgcaatctgtctaattgattttttttctatatttaatactctatacatatatccaaatattcaatatggcaacttgaaaagttatgtttcgggaactaaacagggcctaccatgtcgagattggtaaaatcaaacttcggcatcgttgtgttaattaagaaaggacaaaagtttcagatacgattttgctatatattcgtcgacaaattttctcccaaaaatttaacagatgtaattatagtataatcgtagtgtaattacactgtaacttgcatgtaattacactgtaactatagtgtaacttgtatataactttcaaaaatctctctgtaatatgttatttcggtaaaatagaggttgtgggaacaaattcttacacatgtgtgtgctgtgattttttttctccctcaccaaaacaaatcttgtaatagatttaacgattcaaaattacgtgaaacttttatacaagttacactgtagttacatgcaagttacagtgtaattacactataattgtattataattatatctgtcaaatttttagaacaaaatttgtcgccaaatgtataagtggtccctttgggatacaatgattagagcttgcaggtacttgagctctctggggagtagcttggcctacttcatccagaaatcgatccattgtggaggccgatgttatctgggcccatatgactgcggacacgtgcgagccacagcgttgtatgattggcctgacggaaagaacggcatgtacagtaaagtcgtagccaaatggcgaatctttctacagttatggcacaacatttagcagaggattaggcacgtgaagctatatgtttttttttttcgaaagcggaagaacaggattacattgtacccaaatcctcttctcttgcttgtcacacaaaaaaggttaagacccccagctcataatcaagaaccacattactacgtactaatcgtgttgttacttgctagcatgtctgcagcttaaagctgagacgacacatcaacaaggaatttacaaactaatctagccaggctaattaggagtatctttgcaagttccaaattaagatccgcgctgccgctaattatttctgtacacacgcgtggaatccatcttctttcgatcgttttacccggcccgtgtccatccatgattcttcggtgatcaaaagctcaaacccataatgtcgtccagatcgaagacaacctcgtcgttcttgaagaactccatgccggcgacggcgtcgtagctccagtgcagggaggacgtgacatcgccctggtccggcccgaagggacccgcgactccgccgccgccgccgccgccgcgcgccgcggagctgccgggcgtgaggctgctcagcacctcctcctggtcggacgagccgacgccgccctccaccttgagcggctgcagcagcgggcccggcgcggtgaccgtggtgatcgtgctggtcgtcggcgccgcggcagcgtctactggcgccgccggcgcggcgacgaagctgatgaggcgggaccccgcttggaggccgccgcagccgtcgtcgttgtcgccggcggcgacctggtggatgacgtgcgccgcgatgatgggggcggtggccgggtcccggcaggtgtgctcgccgatgtaggtgaccctgtagctcgccgggtcgtcgtcgcagcgctgcacctgccgctgcgccgtgcacagctggtcgtacttgtgcgtgcaccggaagtaggccctgtacacgtagcataccccaaacaactcctcgtcagcgcgcaacgcatccaactgtacagtctcgaacacattgttttttgtcgggacaagtctactcactttgggtgcttggagttttggatctccttctgcccgtacttgcgccatgcctggccgtcgtcgaggttcttgacgaccaccgaattcccggacgattgctgcgtcctgcaatacgtacacacaaatcttagtacattaaggtatcgttcgtttaggggtgatagggaaggtatcgttcgtttaggggtgataggggagattgg

SEQ ID NO: 22478 - DNA, 3305 bp, Oryza sativa
aggagaaggaaatagagaagattgggaatatacgcaaaacgaggtgaaccattagcgcatgattttatgattttgaaacttcaaaaatggattaatatgattttttaaagcaactttcctatagaaaatttatacgaaaaacgcaccgtatagtagtttgaaaagcgtgcgcgcggaaaacgagggacaatcccccctatcttccctgaaagaacgcagctaattacacacagatgatgctatgctttgtgatgagctatgctctggccttcgttctcacctcctgcggcagttggccttccggtcggcggcgggggctttcctcttcccgccggcgctggccccgcccccgcaggtgacctcgctctgcacctccgacccttctcctccggcggcggagaccgccgccttgtcgagcgcccgcatcgcccgggagaaggtgtggagaatctggtcgacgaagcggccggcctccggcgagtcgcggaggagcccctgcagctgcgccgccagctccttccccttctccatgtcctccatcacctgcgcgtacgccggcgccggcgccggcgacatcgatgacgtcatcctcaatccaagcaagcaagcgcacacccagtgactgacactacactgccgctgccgcgcactctcgcactctctcttcctcgcagctcagctggtgatggagctcaaagcagcaggaggcttggggtggaggcaggtcggtatttatggctactctgctcacctggagcggattgatccgtctccatttctgtagccgaaggagatgatgcgtaggcgcggtctaccgtcgatgacgcgtaccgtgtcaatgccaggtgggaccgtgcggctacgcccagtgagcggctcacgaggggtttccatggactggggcgctcgctgcgtgggcgatgggaaaaagggacgcggctcggcaccacgcgagaaccatagacccggttcaccgaattgtggcggcccacgcggtgactcgcggtgaacggcgcagttgaacctcatgaaccgagcgtacccaatcccccatgccggtgtgaatgcacgaggtgagtgggccagcggggggggggggggggcgggggcttcacacccggcccacgccacagtggacgtagcccaccgcggaaaccacgggagagatcacacggacatgtgggccagtcctggagggggtggcccggcgctcagtggaccgcggtacgaggaattcgggggagttttggtggtgggggccacgagagattattttaaaaaaataaaaaaacttgagttgcaagttccttcgttgggtgggcatgtgggagtacgggcaaggggggaagcatcgccgaaggagaggggggacgaggggacgacaaccggatgacgtcacgggggcgacgtcagcgaggtgatcgatgccgggttggggggcaaatgaggatgaggaggtggtggtgtggtggtgtgcgtccgcgtcatttgtggaaatttttatgcagccggatgggttggacggcggagggaggggagggaatcgtttgatcggattccctggtggaacgtgcgtgtgtgacaaccaacagttgagaaatcattggagtagaaaactggtactataaaatttaaacttcggaatcagatggcctttgcctccttgatgtcctcctaagggcttttacagtgggcagagatgtaagttcagccttaacaaagccgggtcggacattccatgccatgtctgctgttcttgttgtccccatgaagatcgtggagccaagttaaaccacaagttctttgtcaaattttaaaggactggcccacgctcgtgccctgtgccgctagagaagggagagggagaagaactcgtcggccatgggagggtgaccaggcgccgtgcttgtggagctcttgggttgtgccggcgacggcgatagctacggacaaagaggggcgcgagcttgacggggtggcggtgtccactacccatccgccgcaacagctcggcggcggccgccttgagccctcggcctatctatagctcgtggtcaccgtcttgtggatctagttgtcactgttgagtggtgaagaagaggaggggagagggatgctggtgggaaggggaggtggtgtacggggagcttgctttcggttaaattgtcctgctagattatattatctaaggcatctaccatcctgaaaaatgtataattgcttgattatttagactgcattgtttctcttcatactttgagatgtatcatccctagttgtgcttagaaccatgcaaactagcctgcaattaggcataataaggatagtatcgaggtttgagctgatcttacataatatgcatgtttcgttcttgtttcatgtatattcgccacttatatagacatatcattttatataagcatatgaagctttagtcagtatcggcaagatttgtacaccttcatgcttgatttctgttttatatgtttatatggatcaatctgtttatataagtttttactagagtgtttatataagtttgtactagagtattagctagtacgttatctttcttgctctaaatactgtcacatcggctactttcataatattgtcttaaatcaatatgttaaactccatagatagtattacagccgattgggcatgtttagggtttattattctttgatatatccagtccatagctgatttggtctaactccatcggccgagaccatcaacgatgcactatcggcctatcggccgatcggctatcggtcgactgatatgcttttattctttcttgctgattgcaggattaaatcagctagcacgcccttgacacactcgacactagctttggacctgcactagagttaagcatatctcccaggccgtcgtgttttcacaccaacaagtagcccagtcgtcgttgtcgcggtagccatcatcgtcgtcatggcagccgccgctggatccacctccttcaccaccgtggaggaccgcccgagcaccgctcgctgctggatctgccccaaccctctcaccaccttcgctgccctccccgctagccttccccgtcgtcgcggcagcagatccagccaccccgtcgtcgcggcggcggatccagccaccccgtcgtcgtggctgttgatatttcttaactttacagataaaatccgcaagcgcacggaaaataccgatgtagcacttcacccgggagtattcttaggtatcgattttccacaggaaacgtgtgtgttaactccagatcaggttcatccaaggacacgaacctaaggata

SEQ ID NO: 22479 - DNA, 641 bp, Oryza sativa
aatccatcttttgaacccatctcgtcgaaatcctgaagcaccaaaatccccttacctggcgcgccgctgtcgacgtttgatgtcgcaattctggtatttgcatggtatggggatcgtcggtgctaggatatacgcaagactgaggtaaaagggatggagacagggatttttatacaggttcgggcccctgaacggtcaggtaataaccctacatcctgttggccgaagtcgggattgctcttattcatgataatcacaccagtacaatatttggggtagcctatctaactgttgtcgacatgggggtctgacgatctgactcgtagtcgacaacagggtagccttcctcctcgaatccgtgcccaacgaggtcagagatagcgctttcatctcttctgacagtattcggagacaccgtagggtactagacgtgcttatccctgaagtcgatatccggcggcgtgtcttggcgtatgtaggcttctttgttgattgtgttgggtgttgatcgtgtcgggtgttgatcccgttgggtgttgattgtcttgtcccccttctcctcctagggggcctgtatttatacccataggtgtccacttgtccaagtagaactagagaaaccaatatggatacaatccaag

SEQ ID NO: 22480 - DNA, 1229 bp, Oryza sativa
cccaccgcccggccaaccgtggccacccggcaagctcctccccggtgcccagccggccgaggcatcccagcgagctccatccgcgcgtccaggcggccgcggcctcccggcgagctccatccgcgcgtccgagcggccgcgacctccctgcgagctcctcccccgcgctcggctggccgcgactacccagcaagctcttcccccgcgtccagccggccgcaacctcccggcgagcttctcccctacggccagccggccgcggcctcccggcgagctcctcccccaccgccgccgctcgagccaatggaaggcggctgtgagagatgagaagatgaaagagagaggggaggggtgataggtgggtcccacctaatttttttacagtgaatgccacctagatgccacgtggatgccacataagctaaaactggactcaatactgccttgggagtcgatttgcactggtttttggagatgagggagtcattatacctggttttgtggtggagggatgttattcgacaaagggcaagagatgagggagctaaaatggacttattccttttgcataaaataatggaaagagtacaccgaaggtccctcaacttgtcatcgaattacaaaatcatccttaaaccataaaaccggatacaacacgtcccccaacttacaaaaccactaaagactaggtccctcgacggttttgactctggttttgtccgacaatacaatattatgaaatttttcatctcacgaaatgacaacaaaattaacataatgataatatattagttaacaagaaaaccattgcaacgcacgggcattatgctcttttacaaaatgtaccaaacttatgatattatgacattatttcttgaggcaaattcaagcatgcaattttttttgttgtttttaaatttggctgtttgaaatggcatttggctcgagatagggacgaaaacggcttggaaacggacggagactatagtttccataacttttttcggaatcggaatcggagcaggaaacctcaaatatgaaaatggtattgaatatgaaaacatagcgaaaacggtaacggatatttatcataatagaaaacccctcactgaatttttcaaactaacgaagagtgtagctcattacttttctaaaataataaatcgacatttctatattttttttatcaattttaaatataatacgactagttgtacggttcacttacc

SEQ ID NO: 22481 - DNA, 7952 bp, Oryza sativa
tttgaaatgaaagatttgggagaggctgatgttattcttaacatcaaactacaaagaggagatgagggtgggattacacttgtgcaatcccactatgtggacaaggttttgagtcgctttggatatagtgactgcaagccagctcctactccttatgatcccaacgtgctattaaggaaaaaccgaagaatagcaagggatcagctgagatactctcaaatcattggttcattgatgtacttggctagcgcaacgaggcctgacatctcatttgctgtaagcaagctgagccggtttgtctcaaatccgggagatgatcattggcaggctctggaaagagtaatgcgctatctaaagggtactatgagctatggaattcactataccgggtatccaaaagtactagaagggtatagtgactcaaactggatatctgatgctgatgagataaaagccacaagtggatatgtgttcacacttggaggtggcgctgtttcctggaagtcttgcaagcagaccatcttaacgaggtcaacaatggaagcagaacttacagcactagatactgcgacagttgaggccgagtggcttcgtgaactcctgatggatttgccggtagttgaaaaaccagtgccagctatcctaatgaactgcgataatcaaacagtgattattaaagtgaacagttcaaaggacaacatgaagtcatctagacacatcaagagaagactgaaatctgtcagaaagcagaaaaactccggagtgatagcattggactatgtccaaacggctagaaatctggcagatcagtttaccaaggggctaccacgtaatgtgatagacagtgcatcgagggaaatgggcttgatacccacctaaggttgcataatagtggaaacctgtccattatgatcggagatcccgtgaatttggatggtgaaacaaactattgtgtgactgagagaagagacccttgaaaagggctcattttcatgatgtgcttctcttctttcctgcatggtaggatggcttatgtcttaatgtgatccgagtggcttttccaagcagagatgttgacctgcagaacatcttagaaggaacacacctatatgagttcgactgctagtcacagtctatgagatttgggtgatctctagatactcatgaaaggcctggagtatgacttataagctccaacccgagggaatactaatggttgcctagtatcacttatggaattgagtgaaacctaactgcacaagactgacaattcaaggcatagtccattgttcagttgtggtcaggtgtagctccttttctaggtgaaagttcaacttaacagtcttcaccgaaacactggtatataaaagctgctatggaatagagagcattctcatgagccttgaaatttggtggggattgttagatttaattgggtaattaatccatttaaatcaattaaatcaaataaattccaaggctcattatgctaggaattcatgtgaattcattcttctatgggatatcaatgggatgaagagttttgagaattaatccatttgattaaggaattggtaacttacatcaattactcttaattgattgttggttgatggttgtgtagtggaggatggttcatggctacttgatgacaattagttgctctattcctcttcctattccattggtaacttacatcaattactcttaattgattgttggttgatggttgtgtagtggaggatagttcatggctagttgatgacaattagttgctccattcctcttcctattccatgactcttactcttcatcttccattcctcttataaaatgggaattgatttgatctcccgcgagaaaaagaagacacactttcatccattttccaaagctgttgttgctacggtaatcccatcccgacgagtgtgtgcacacgcgttgggagagtaggcctccgaaaccacgcgttgctgcgacgtttgcacagacgggcgggcgatcaggtttttggggagcgcaaggcgcgactactcactgttcgtcaacatctacttcatcttcaccaacatgtcgaacactggagacaaggagaaggagactcccgtcaacaccaacggaggcaatactgcctcaaactccagcggaggaccattcttggggtataaccttattacattatttcaattagaagttttactgttaatgttcatcgcaatgtcaacattgtgtcattatgtgattgttgatgcttattcaacgttaagcatgctcatgttgattacattcaccactatcactggatcaaatcctattgtaaatatcatgtttattatcttgttattttggattaaaatatgccgaattatgaccaaatttccaacaatgtatacacgtcattttccgccgtaatgtatagtaagcacagtttccatgccagtacactgcaattttcacgtaaccggtaacttttttcaccgcccatttcctgttttacccccacgaccagggacgggcctcggattttaagattgggtattcgatatggaaagagggtaaatttttttttttacaacacgagcacaatatttggtacgtatgatcaatgatatggtattttagtactgcttattgaattagaacttgcgacaaggtttttagcaatttccttgatttactgtgatatactttgtaaaaaaacatatgcagtacaaacttgtcagggttatggataaggcatacctcatatcctacgacttatggaatatactgataaagtataccttcatgtatacggattgttcttgtaaatatcgcgtggagtccatttctaattatggaaaatatctctacgagtcaagtgatttacaaaatcctactcgaaagggatcgatagaatttatgttataccgttacaggtcctatatcctcaaacctttcttgggggtcaagatgatccacggtataaaagggaccccctgggaggggtttagggtatcgaattccatcaccaacgcacccaccaaagtttacgaagccgaagtacacggagccaagccgccgggagatcttgtcaaaaccttagactacgatctcgtcggtgtcatctgtttcgactactctctttgtaatctgttctcatcatcatcaatctcatataaactggactagaactgttacctgataaggggcctgaaccagtataatccttgtcttttgtctgcttgatgtcgtactatgtagggcctcgtttcaacgtacctcaatactctactcatccggtccgcgagtatcactcgtcgacaaatctaccaaccaagtatatatcatgtcatcacaacacggttaatgcacaaattaggcaaccatgcaaattaggttcgaatttgagggagccagcctgctaggcttttttgttgggcttcttttgatcaaaaacgttgttttctttatttctctgcgtacatacgaagtatataccttatatatgtattcttttttaaaaatcttaggtattttcatttgaatacccttgaattgagttggcccacccctgcccatgaccatgacaaatagagtaaggccctgtttagttcaggggtgaaaagtatttgtgtgttataacggatttacggacacatatttgaagtattaaacgtagactaataacaaaacaaattacagattctgtctgtaaactgcgagaagattttattaagcctaattaatccgtcattcgtaaatgtttactgtagcaccacattatcaaatcatgacgcaatcaggcttaaaagatttgtctcgcaatttacatgtaatctgtgtaattagttttttttttttgtctatatttaatactccatgcatgtgtccaaatattcaatgtgattggggaagctggagtaggtaaaacagtactcatcatagaattaattaacaatattgctaaagctcactggggctgggtgaaaattttttatttaggaactaaacagggcctaattaagctgtgtatagtaagcacaatttccacgccgacgcactgcaattttcacgcaactttcaccgcctatttccttcttttacccccacaaccacgaccacgacgacgaccagagtaaacaagtcttattataaccacccccctctccttttccatctacctcctccaacgaagccttccttcgcccttgtcgtccaaccctcctctcctcccctcctcgtcgcggggctagggttacgccccctcctcctcctcctcctcctcctactcgtgtgggggcatgcccgggagcgaggcggcggcggcgcaggaggcggagatggacccggacttctcgggcgggggcggtgggggccccagcttcgagttcgccttcaactcggtcaacttctccgaccgggtgctccggatcgaggtcgtcgcgggggacgacgacgacgacgacgaccacgcgcccggctccagccgggacggcggggccggctcgctctcggattgggcgcgccaccgcaagcgccgccgcgaggagctcctcaaggagaaaggtgcgttgttgaaaccgcccaaattaaacgcttgtttcgtcaattttctttttaattttcgaattgtggacgatcgttttacgaaaatttcggtgccttcgatcatatattaggtggtcaatgaaaagcgaccagggtaacggagaatggatgaaaggggattttatttttctccttccaatttttagatgctctcgtgtacttgtaatagataccttttcagaatttgatattttgttctaggccgttggataattggtgatgcaagggatacaattgtgcaacctagaaattttggaagaacctgtaatcttgtactaattgattatacctgtaggatgatatgggtaagaataattcttttcatgcattgtatggataggcatggtttatgcatggatccatgtagcatactcgcctcgggttgaggggacaatgtggtcaattgtttgagataaagtgaggttatctagagaattggttgttgcatagtatataaacgagggataacgcctttgtagttcatacttctggttgggtgcacgcactagaagtatggaactgattttgttgaaaatttgatcatgaatgttggaaattgtatcatgcaatgtggctattgtgggcatattattgaacaacccttggttatcttggttatatgtttgtagcttataatatagtgattagttttagttgattttcttagattgtgttccaatgttcccccattttgtgtatacctgtacttttaatgagtaccttatgtaataatgtgtgcatattcagttggttatcatgcttcttctggtgaccaaatcagttcccactgactgaaattttttggctagtttatgtgtcaaacaaatgggtcaacactctgtagaaagagctaaagtgactgtgacaacaagccaaatcctcttgatacctagagttctctctttattttttcgtaggtttctatgatgttttttatgaaattcggagacctgcataagtcctactgcacttatgcatcttgtgtgagggcattttgtgctacacagtccacaatgtatacaagatactttgcatgaaaaatgggtttaagggctatgtactgctttgcaaagtgattgttagttttctgtttctccttatggttatatttgaaaggggtatggtgggggttggggggtaaataatacatttttataatgaagggacgcgtgaaaatatgctttgcaaaataccgttagtttttgtgtttaatcttcagacttcagttgcttgttagctgtgccgatcatgatctcaatgcttgttttgtgcttcttaggtcatgctcaaaggtagagcccggtatgggctcttatgcaaacatgtcatttagaaactgcccccttacaagagttgaggcaacaaaggctctaaccattaaccctcctaaatagttttttttattactcttctttcttttccccaccctcatgcagcaaaattttgttttatagaggctaagagtcgatgttaagcttaacattgatgtttctctctcctctttctcttccatgtcagcaaatttgcctagttggcaatgctatgagccccctactagtgactgttgtacataccctaattgtaattatgaaagtccttgattaccaattactgccacaagtcatgacttgtattttcatgttaccttctgttttacaattttctattttcattagtgatggcttcatgctgtagctataactgtgattacttgctgttatctacaatgtgccttgtaccttgatgatctttttctttttctgatgctttttttttgttacatatgattgtctagtgctacttatgcatccatccttgttctttgtgatgggagacttattttactaccaattgctatctgcagagtctgaagcagtcatgccagaccagataaattgcaaagtagaaccagaagaatgtgatgcatatgaagaaaatcaagaagaacctgtagcaatgatggacgactctccacccagtgttggccctgatggtatgtactgatgcaagttctgctacctagggtcagtctgcagtgtcgttttcctaacatgttatgttgcactgtgatgtggaatctaattatttagaatctttagtaaggctgtgttcgctatgggttgttcccaacttggaacagtagcacggaaaacggagcaatccattagcgcgtgattaattaagtattagctattttttttttcaaaaatggattaatttgattttttttaagcaacttttgtatagaaactttttgcaaaaaacacaccgtttagcagtttgaaaagcgtgcgcgtggaaaacgagggagataggttgggaaaatggacgtccgaacacagcctaagacttttctgttagagccaaacaagaaacttagaactaaatgctactattatgcatgcatttgtaaatccatcacaatgctgtcggtatgatttgttcagattactagaagcacagatacaagaaggattcaatatttcatattgttttgttatcattccttctgatagcttgtcttgattttcctgataccctgctctattaattgtatgtaattaatctgcactcatagagaagtacagtgtgctccaagtgtttttaacaactaaaaacctgtctggtgatttgtccctgggttgtgcgccttttactaattctttattgttttcccccaatattgatccgtctgtggtattttacaggtgatgatggaccaagtatggactcaccttggagtggtggggtgagcacaccagttctaagagtaaagaacatttatatcagttcagcgattcttgcagcaaaaagtcctttctttttcaaggtattctggtcaccttatcaagtgaatttgcactgtactctactcagtttgctgtcagcttcctagttcctaaaaactgtaatttgttgttcttagcttttctcaaatggcatgaaagaatctgatgagaggcaggcaacccttagaattactgattcaggtaatgcgatacctctagttaactcaaactttcttcctaacttattataatttgtgttgcagttgtgctataattctgcgtaatattcctaatttatactatattgtaatgtaatattgattttaggttttatggtgaaggtggtttctgcttctcctctttttgtctttgatattatgattagtctctttttcttcattggcttcacatattaaatagatgttttgtcaatctatctgccttcatgcatgcacaacttccttgatcatttacggaagtcaaatgatcaataattttctcttgaactctttccatatgcctcattatcttcattttacttggaacagaggaaaatgcccttatggagctttt

SEQ ID NO: 22482 - DNA, 694 bp, Oryza sativa
aaaaacatatacagtacaaacttgtcagggttatggataagccatacctcatatcctacgacttatggaatatactgataaaagtataccttcatgtatacggattgttcttgtaaatatcgcgtggagtccatttctaattatggaaaatatctctacgagtcaagtgatttacaaaatcctactcgaaagggatcgatagaatttatgttataccgttacaggtcctatatcctcaaacctttcttgggggtcaagatgatccacggtataaaagggaccccctgggaggggtttagggtatcgaattccatcaccaacgcacccaccaaagtttacgaagccgaagtacacggagccaagccgccgggagatcttgtcaaaaccttagactacgatctcgtcggtgtcatctgtttcgactactctctttgtaatctgttctcatcatcatcaatctcatataaactggactagaactgttacctgataaggggcctgaaccagtataatccttgtcttttgtctgcttgatgtcgtactatgtagggcctcgtttcaacgtacctcaatactctactcatccggtccgcgagtatcactcgtcgacaaatctaccaaccaagtatatatcatgtcatcacaacacggttaatgcacaaattaggcaaccatgcaaattaggttcgaattt

SEQ ID NO: 22483 - DNA, 583 bp, Oryza sativa
tttgattttcctttcaagttggttttctacctcagctttatagattttaaagaaatgcaatgcctcatcctttgttttcaatagatacacatagcaaaatctagtgcaatcatctatcagtgtcatgaaatatttctttccccctttagtcaacacgccgttcatttcgcacaaatcggaatgaacaagttctagaggtgccaaatttctcgcctcagatgccttgtgaggcttgcgaggttgtttcgattgaacacaagtatggcacttggaaccttttaccaaagtgaattttggaattaaactcatgttagctaagcgcgtcatacaaccgaaattcacatgacagagtcgcgaatgccacacattagactcatcattctcgctaatatgggtcacagcattatgattattacacatgtcattcaaagaaaagcggaacaagccttcgctgtcataaccttttccaacaaaaggtccatatttagatacgacacatttattggactcaaacacaagtctaaaaccttctctacacaataaaagagccgcttactagattcttctttattgaagggacatg

SEQ ID NO: 22484 - DNA, 512 bp, Oryza sativa
ctcgcacgacaacctcagatggtcgaggtacgactacagcaataacgcagcggtcctcgcaccacgacttcaaatgatcgagagacacctactcactggttctcaaccagtcaatcatagcgatctctcgtacatttacttctagtggttgagttacgactactacctggttctcgaccagcggggtagcgattctcccactatttccacttcaagtggtcgagtttagactactgcctggttctcgaccagcggtgtagcgattctcccactacttccactttaagtggtcgagttacaactattgcatggtcctcgaccagcgatgtagcgattctcccattcccctgctttaacaaagttgatatcaggtgcacaagatcgccaagtgttttacccagagatcccttacccagatgacacctagcgttgaaacctatactactgtccctttacgccggcttgacaaggcctccgaggaacctgagggaacttcagctggggacggccag

SEQ ID NO: 22485 - DNA, 788 bp, Oryza sativa
tagcctatctaactgttgtcgatatggcggtctgacgatctgactcgtagtcgacaacagggtagccttcctcctcgaatccgtgcccggcgagatcagagatagcgctttcgtctctcctgacagtatccggagacaccgtagggtactagccgtgcttatccctgaagtgatatccgacggcgtgtcttgacgtatgtaggcttctatgttgattgtgttgggtgttgatcctgtcgggtgttgatcccgttgggtgttgattgtcttgtccccccctctcctcctagggggccctatatttatacccataggtgtccccttctccaagtagaactagggaaaccaatatggatacaatccgagtagtccttatcgtttccatgtagaactctagttatctttccttatccggaactccctcgaggtcagtttccgtataagacatggtatgtagtggatcctgccgagatttagtcaactactattaggtatgtggtatccataaccctgacagtagcccccgacttcgatgcaaatgaacgagttcatattctcaaccgcagactttggaggaactgttatcgagctcacgtgaccgttctcggtgagtttagagataacgttagacttcctttatcagcctcgtgcgggcaccgaaagggtttgtctaagtcaatctctgatgtcgaccgagaaagtacagagcgtacgactaagtctcccgtcttgctgcaatcgagaatttggattgaagtcatgaaattttatctcagcgggtacaccat

SEQ ID NO: 22486 - DNA, 532 bp, Oryza sativa
tttcacaaagtgtctggttagcatacctctgaggggccaaataagcacactttcaagttgccatcagccaatagtcgtaatctattgcaaccagcacaaaaatgctctgtcatcgatgtaataaacgaaattgttccagcatgaccatcaatcttgaaattctttgcggtctctgacggatgatcttgaagtctctctacacctttaaaacgttggcgctgatccccaaagttgcaagtaagaaaaattacttgtagcttccataataataataataaaaccacatgtacataaaatggctaggatgctagatgcaggcggaagaaagaaaggtaaaatgtataagggaagtgaacttttcagaggtgtaccttaccactttatccatcatctctgcataaggaaccaactttttgacattccaaacattaccatcaaacggcataaactctataaatctgacattgacaggcttttctctcgtcatttcaacaaaatcacagatctcgtcatcattcatttcacgcatgac

SEQ ID NO: 22487 - DNA, 1017 bp, Oryza sativa
caatcaacaacaggacaaaatgtcctgaaggaaccagaagcagcaaagcaatctgacgtttctggtgaatatgagtcagtacttgttggtaagcaaaatgaatccgctaacaatctgacaggagattctgcgaaagaagagccccctcttgtgggactgggaatggaagctgatactcatgaaagtgctcctagagaattgaaggatgaacctattttgccagagacggagagaagtgaattatcatgtgaacatggtgacatcacaggacatgaggattccgaaatgtatgcgccaccggaatgcgaaaccgatgtgcagaaagagagttgctgcgttgataggcgtcgtgcggacatgcaggtgccaaaggaagttgaatgcgatgagctgggagatgataatccgaaggaagatgctagtgttcagacagagaacatggcatctgaagaagcttccttggcttctgcaactcctgatggtatgaaagatgagaacaaggttgctgaagaaactacttcagattatgcgactccttatagttcaaagagtgacaatgagaacaaacttgctgaagaaaaccagaagctgaaagagatgctgcaaaaccttcttgcatctggcagcgatcagatgggagttatcacggaactgagcgagaaggtcaagacgcttgagcgtaagctggcgcgcaagaagaggccaaaggtaagggtacacagaccaaccaggcaagcaacggccaaagtccactgaagatgatctctgaagttttgagtttgtgtttatggattccatgtagctgtttgtaaccatgcctgtatgaatgtactacttgtaatgtacacatgagtgttgtggtactatgcattggagaatgtaagatcatgcctgtgttgggtccttgtaatgctcatgtagcctagtttaacacggagtatcaatgtcataagggagttgaatattttccttgtgtgctatttttctggttaagaaagctgctgctgctccatacat

SEQ ID NO: 22488 - DNA, 1058 bp, Oryza sativa
agttcgtgatttcacataaatatcttatcaagaactttccgataagttttgtgtagcctgcatatataagcttcgttccttttctaactaaaattactcctctgatgcaaagcttccaatcccatagaacccatacgttggcttatgtggctggcatttttagtattgttttcccagaaattctcacttctggataatgctgatgtgcagataatattaaccaaggtattactggtatcaactagagacaaggcttacattggcatgccagtggtgaccaatgctgctgttcatgcagtggttgaggaacaggtatgtcctctgtatgttgtcgggttaatcatggatattcaaaattacttgaccctgatgtctccccaatatttttatatcagggacgggatgataaagtgatagtcttcaaatataagaagaagaagaagtaccagaggaaacttggtcacagacaggtaagtttttccaattaccttcttcaagaaaggtagaattttattgataaatactgattcagtttttacagcgaagcaattagagttcttttagattaaaaatctctgttgttttgcagccaaacacaaggttaagaattaccggcataagtggatacgaggacttccctgctgacccgatacttgagtatgttccagcttaagagcaattgtaagttctgtagttacaaacaactggtagtacattagaatacgagtgctaccttttcttgtctgaaagaacagtttttgaacaaaatttgctttgttcatgtgttcgagtgctgccagtcatccagttgttccatcctttgtttattccaccatctgttttgttcattctgatattgtgtatcctagccaactgtattattttcactgtgcttaaaaaaagagagagcattttaccacgatacggatgttttagctttggtttgtgtaactttatacagtttttgtgactactgatgctaatttcactgtttttggcatctgtaccaatggtgcttagtttattgaacgggctatgtcctaatattttgggatcag

SEQ ID NO: 22489 - DNA, 3812 bp, Oryza sativa
cattgttgacctcgttaagatggtctgctgcaagacttccaggaacaagcgccacctccaagtgtgaacacatatccacttgtggcttttatctcatcagcatcagatatccagtttgagtcactatacccttctagtactttggatacccggtatagtgaattccatagctcatagtaccctttagatagcgcattactctttccagagcctgccaatgatcatctcccggatttgagacaaaccggctcagcttgcttacagcaaatgagatgtcaggcctcgttgcgctagccaagtacatcaatgaaccaatgatttgagagtatctcagctgatcccttgctattcttcggtttttccttaatagcacgttgggatcataaggagtaggagctggcttgcagtcactatatccaaagcgactcaaaaccttgtccacatagtgggattgcacaagtgtaatcccaccctcatctcctctttgtagtttgatgttaagaataacatcagcctctcccaaatctttcatttcaaaactcttggacagatagtctttgacctcctcaatcacattacggctggtcccaaagatcagtatgtcatcgacatataagcacaagatcaccccttctcccccaccatagcgatagtatacacatttgtcagcttcgttcacaacaaagcctgcagatgtaagcgtggtgtcaaacttctcatgccattgcttaggtgcttgcttgaggccatacaaggatttcaatagtttacacaccattccctcctgaccttctagtacatacccgtctggttgatccatatagatctcctcctccagctctccgtttaggaaagctgtcttaacgtccatctgatggacgagaagaccatgagaggctgccagagcaagtagtactcgaatcgtggtcaagcgagcaactggtgagtatgtgtcgaagaagtcctcgccttccttttgggtataacccttggccacaagccttgccttgtacttttcgattgtaccatcaggcctaagctttttcttgaaaacccatttgcatcctacgggcttgcacccatatggacgctcaacgacttcccaagtaccattagacataatcgagtccatttcactgcgtactgcttccttccagtagtcagcgtcaggagatgaatatgcctcttctatggttcttggggtgtcatccacgaggtatacaatgtagtcatctccaaaggattttgcaaccctttgtctcttactcttgcgagtatctacaatgttgtcctcctcaggattttcctcaggcgtttgatcattgtgttctatcggtgcaaagtgctcatggggcatgacagtttctttactagaagtgctaggtgtatatttcataggaaattcattctcaaagaatgtagcatctctggactcaagaattgtaccaacatgcatgtcgggtactccagagtttactattaagaatctataacccacactgtggatagcataaccaagaaacacacaatcaacagtttttggtccaagtttccgctttttggctataggtacatttaccttggccaaacagccccatgttcgtaggtatgagagatttaatttcttcctttcccattcctcgaatggtgttacttccttatgctttattggaattttattcaggacatgacacgcagtcaaaactgcctcaccccaccattccttggaaagccccgcagtgtctaacatggcattcaccatctcagttagagtacggttctttcttttggccaccctatttgattggggtgaatagggaggcgtcatctcatgaataattccaaactcttcgcaaaaggatgtaaactcattggaaaaatactccccacctctatcagacttcaaccgtttgattttcctttcaagttggttttctacctcagctttatagattttaaagaaatgcaatgcctcatcctttgttttcaatagatacacatagcaaaatctagtgcaatcatctatcagtgtcatgaaatatttctttccccctttagtcaacacgccgttcatttcgcacaaatcggaatgaacaagttctagaggtgccaaatttctcgcctcagatgccttgtgaggcttgcgaggttgtttcgattgaacacaagtatggcacttggaaccttttaccaaagtgaattttggaattaaactcatgttagctaagcgcgtcatacaaccgaaattcacatgacagagtcgcgaatgccacacattagactcatcattctcgctaatatggttcacagcattatgattattacacatgtcattcaaagaaaagcggaacaagcctccgctgtcataaccttttccaacaaaagtcccatatttagatacgacacatttattggactcaaacacaagtctaaaaccttctctacacaatagagagccgctaactagattcttctttattgaagggacatgctgcacgttcttcagctgcacggtctttcccgaagtaaacttcagatcgaccgtaccaacaccatgaacagccgcaagcgacccgtttcccatcaacaaggaggaacctctcccgacctgataagaagaaaatagagaaatgtcagcacatacatgaatattagcaccagtgtccacccaccaatcaggtgaatgaaaaacagagagaactgtaggtaatattttaccgtaccccgatgttcccccgccctcgctaatgatcatgttggcagacttcctgtctttgcgctcaggacagtccttggtccaatgcccagacttgccacacacaaagcagtctccctttgcctttcccttgcttttcttcttaaaattggttgcagccttgagtttgacatcaggcttgactttcttgttgttgtgggatgcatgagggttcttcttctgtaccatattggcactagaacctccctcaacctttttgccccggacgtcctttgccctcgccttctcctcaacacccaaagagccaatgagatcaggaacactgaactcttgtctcttgtgctttagagaagtggcaaagtccgaccaagaaggtggtagtttggcaataatgccacctgccacaaacttgtccggcaactcacagttgttgttctcaagttccttagccagcatctgaatctcatgagcttgttcaactacagaacggtcatcgaccatcttgtagtcatagaactgctccataacatacagctcactgccggcgtcagaaactccgaacttggcctcaagtgcattccacatgtcttcccagaaggcatgtgcatgtacacgtccactatgttgtcagcgagtacactgatcaatgctccacggaacaggcaatccgaagcctcgaacttagcctcttcctcaggagaaagaggtggttcacttcgtttgccccgtgaaacatagaagcactgcatcgctgtcaaccacaatagtgcacgtgctttccatctcttatagtttgaaccatcaaaggcatgtggtttcagtgcagcagcaaagccaactaccgagaatgacctatcaggtttttggattggtggaaatttggtcataattcggcatattttaatcccaaataacaagataataaacatgatatttacaataggatttgatccagtgatagtggtgaatgtaatcaacatgagcatgcttaacgttgaataagcatcaacaatcacataatgacacaatgttgacattgcgatgaacattaacagtaaaacttcttatttgaaataatgtaataagggtatacccc

SEQ ID NO: 22490 - DNA, 10175 bp, Oryza sativa
accctcaaccaacaatcaattaagagtaattgatgtaagttaccaattccttaatcaaatggattaattctcaaaactcttcatcccattgatatcccatagaagaatgaattcacatgaattcctagcataaggagccttggaatttatttgatttaattgatttaaatggattaattacccaattaaatctaacatacattacatagttatataatctgaatttacttgtgcgttaaaattatgtgaagattcccctttttataataggttttatcgttttatgttatgcataacttaatcgatgatacactttttgttattaagcttcatcaacttataagttataacaaaaaatttaatttttgagttagtttttacgttttatttatcatagtttattatacaatattaaattttaagtcatcaattagtgctacggcttataatgacccgttaacaaaacaatgagatactctgtatacactcaacttaatctatttgaagcggtgtatatttcacattacaaaacacaatttattccaaaaacgtttatattcagattatacggtaatcatgaatgctaaaaaaacaaacgtcacgttaggaagtttgtatcataacgactagattaagctgtgaccatgaccgtgaggatggaaaacacggaagtgctactgctttctctgtgaaactacaaacacgatccattctgttgttggcccatttcgcttattactctactcatcgtggtcgtgggggtaaaatatataggaaatgggcggtgaaaaaacgtcaccatttgcgtgaaaattgcaatgtaccggtgtggaaagcttactatacaaggttacggcggaggaaggtgtctatgtatcgtaaatatataatctaaattacttgcacattaaaatttgtataacttcatcgatccacgacacaacttcaccgtttgttcttcggctctaaaattttaactttaaaacataattttaagagttgactttcatgttttttatcatagtttattttacaaaattaaatttttagtcgtcaatcattgctacagtttataatcaaccattgacagaacaatgatatactcaacttaatacatttaaagctgtgtacatttgacattacaaaacacaatttactcagacaacatttagattcaaactatacgaacagtgaccatgaagactcctgaaaacaaacgccatgttacgaactttgtatcacgacgactcggttaagctctaaccgcgacggtgactatgaagactcctgaaaacaaacgcgatgttacgaacttcatatcacgatgactcgattaagctctaactgcgaccctgaggatggaaaacatggaagtgttgttgttttctctataaaactacaaacacaatccattctgtggttgtcccatttcgcttaattactctgctcatcttggtcatggggggtaaaacaagaaatgggcggtgaaaaaacattgccgattgcgtgaaaattgcagtgtgccaacatggaaaccatgcttactatacacggttacggcggagaaaggtgtgtatgtattatacatactagcggatatcgcacgcactgcagcgggaaatttagaaatacttcaaagaaaaattaaaggaaacaatatgtaaatcgtgtattcgtaatatctaaatggacaatatttgttctatagtagttaatgtgaaattacaattctatatgacgcttggatgcttatgtatcaaatataagagggatccaatggctattagttttctaggtgtcatggttcaatgcgcatggaacttttattggctatgctcatatttaaattcagaagttgattttctagaatagagtaggtaatctaatagaaagacaactatttatgactccaatatatactccatttgttttccagcactcgtcaattcacgctatccatgtttaaattttaaccgtttgtctttataaaagaaattataaatacaaaaaataccatacatcaaagtatgttacatccttttgttcgttgtagtctagccatcttaaaaacttggatacctgcgccttgcaacaagaaatttagaaatactcaaaggaaacttgaaggaaacaatatataaatcgtgtactcgaaatatctaaatgaacaatatttattctacagcagttgatgtgaaattgcaattctatatgacgcttggatgcttatgtatcaaatatgagaggggtctaatggttattagttttctaggtgtcatggttcaatgctggtacgacccaagtaggggtgttgttccgatcttcacaacgtaggatcaagaactcaagataactagctacaagaagccaagataacagtgcaacctaacaatcatacttgaagccaaccaccgtctctattacgacaacctgaattgagggttcgtctaaccacactctaagttaccaaccaacacaacctggaattaatcaaggaaaaatcctcaaagggaccaggagcaccaattggagggcgtcgaatgccgcttctgtaatcccacaaggaaatcacaagagcaaaggggtagagatctctctccgaatttgtgagcacgcagctaaacaaagggggttcatattctcattgttaaaagtcttccaaatgataaagcataggagatatttatactaggaacaaccctcatagatgagaatgaaaggtcttgggagtttactggacataggttagctcaaaggtcacaataagtgaattcccaagaagactctcgcgtttgtttggcttcttagcagtcctcaatgatttgtccattactccttattgggaagttgaaatgacgaaccgtttattggaggtgaaactataattgattatatttccaaccatatatattaagcatggagaaagttgactggatgggtcacacatcccttggaagttggagcaaatgtttggagacagtgtgctccaaaatcagcatgacgtaaatggtcgtcgtctttacgtaacccatcatcattttgatattctagctcgtcgtcaatgcccagcgagtcttttgcatgtgtaaacctaagtaatagcaaagtacttgatttaggtagtatataattctcgtcaatattgaaatatgtttcagctaggagcgagttcacttcttgttgtagtttctttgcgcggctacatgttatcagtccttgaaatggtgtaacggattggctctcattagcaacttagtcacatgattgtcttgtgtgttcatgtgacgggggctagggcatatcaaatgcacatggagctttatagctataactacacttagtgtgttgtaaatgcatatgacaaatggatggtcaagatcaaagcatgaaagggatccaaatgctactattttctagttctagatgatgttgctcaatacatatcaagcttttggttccaactatataggtatatagatataatccaaatttagttgcatgttacaattacgtagagaaatcccattttataatagatattatcatttcatcttatcttatgtataactttatcgtttgactatacaacttcactatttattcttcagcttataagtcataactaaaattttaattttaaaacttaattttgagagttgattttaaatttttatcatagtttattttacaatattaaattttaagtcgtcaatcagtgctacgacttgtaggaatcaactgttgacagaacgatgagatactcaacttaatgtatttgaagtggtgtacatttgacattacaaaacacatttacttggacaaattttagattcaaactatacggtgaccatgaaaactcctgaaaacaagcgttgcaaagttcgtatcacgacaactcgctaaaacacggaagtgccgctgctttctctgcgaaactacaaacacgacccattctgtggctagcccattttgcttaattactctgctcatcaaggtctggaggtaaaacaagaaatggacggtgaaaaaatgttgccggttacgtgaaaattgtatagtgtgccagtgtggaaaccgtgcttactatacatggttacgacggaggaaggtgtgtacttaatccgtcccaaaatgttgctacttaggatgggaatggatgtagtattataaatagggactatataggtatcatttgacaagaaaatcccccgtagacatcttgtatattttagaccatccgattgtttaaagattcatgaaggataatcaaaccctaaaaccccttccatcttcctccccccgacaccccctcttgcaacctccactcaacagtgcccgatctgcaccgcctccgccactgccgccccagcacgccacttggctcaccagctagtcagaaggggtcaacggcactagtgaggcctcctagtagtactattgttttatcttattatataattgtatggatcaattatacagctctatcattcacttcttagcttatgagtttcaggcaaaattttaattatagaacttaattttagagtttcttttgatgctttgttttgtcgtagtttatttttcagcattagatctaagtcactaaaaatacatatataaaaattactcataaattaggttttgattgttaacaagtgttaaagcttataattagttctggacgaaacaatgagataaatatatatactcatttttatttttatttttatttttgcgattcaaaattacgtacatttgatattaaacaaactcaatttacttggacaacttaagttttagattcagacgataaggcaaccatgaagacttatgaaatcaaacgttacgatgtttgtatcacgatggctcggtcaagctctgaccgcgaggatggaaaacacggaggaggagctgctgctgctttctctatgaaacacgacccgttctgtggttggctcatttcgcttaattaattgccgttctgagagttgcagcgtttttcttgtgctacaacttttgatatatattatataatagtagctgagcaatctgcatgcttcggcaaaccaacctactgcagccagtttacatgaaattcacgtgcaaatagcatgaaggatgctggaaagttcatgcatacgcaaaatttttcaccttgcgaggcagaaaaaaaaactaattacacagattgcatgtaaaattgcgagacgaaacttttaaggctaattgctccatgatcgacaatgtgatgctacagtaaacatttgctaatgatatattaattaggtttaataaattcatctcatagtttacaagcgaaatttgtaatttattttgttattagtctatgtttaatatttcaaatgggtatccgtatatccgatgtgacacaccaaaacttttcacctatggataaacacagcctacataccaagggttcagagacattctggtaatcacgaattctgttctgcaagtgtgtaacgttgcagctgcaatccaattcaattccggttcacatatgttgtacttatccaacctattgtttcgttcattcatatacctatccgaaccgcttattaacaaataaaagattatttatgaataaaacttttatatacatatatttttagcaacttcaaagaaaatcctataaaataaactacgataaaaaaaaagaaaagatcaaaattcagtagaaaatttaaatttaacttataagtataagcgtaagcgaaaaaattagtcgacgaatcattaatcacatcaggggcacgaagagatatcagttgatgcatcaaatcaacccgccccttgccatggtccatgcaagatcagataataaatatacaaatggcagaaacaaaatccttctgaggaagtcgagttcttgaactctaccgtcctggataactagccgtccagatttacaaacgagctcacacagatgcaactaagatttcaacacactgtgcagcttgcaatgtacatggttgttactgagggggtgtttggatccctgccacacattgcctcgccaaacatgcggctgccacgacagtttgactgatgtttggttaatacgtgagttgtggcagccacactttttgctagttcatttgcatgcttatttccgccacagctgtggcgattatttctctcgccacaatctctggcgacgccacaacttgatggctggtttgggctgtgaaccaaaaatcaacacgacgggagaaaatgctgcagctacatgagccatcttatattacacctttgctttgctgagtgggcgtcgagtagcagaaattacaacagattggcagcagcactctcattttctcctgctggttaccgaacctcctgacgccttcaaccgggcatgccgcccctcaagccttgcttgaagcagttttgccttcagggtgttctccttcatgcctactagaagccctgttgagcattcacctatgtcatggcccaatgatgcggacggataatcaagctgtcgcgatggactgtgtggattgcataaatcccccgaagtagttccatcacaaaatagactagctcgcgagtaatgatcaagggattcctgccccagacagtcggcatgagcccccaggttgttcttcgatgttgtgccattgtgatatccttgagaaatatgggggcaagggatctcattctgctcgtctgctggaacagttctagcgctggcctgtgagtcgatttcttgagttctagtggcatgccatggtctgctgctactggaccttgctttgttacactgtgaataaatttgcacgtcagacatatgtgaactctcaccaactacactatgcgagtattctgttcttctcttaggtgcatccatgttgcctgtgtagcttctgcgaggccctgtatggtcatgcatctgaatgctacttccatgcatgttgagctcaaagcaatgcaaatcactagcaacagaatcatcatcatcatcttcagctagctggggagcactagtggctccattaaaatggacagactcaagagattgccgacgtaaccgagcatttggcctactatcatgcatgtagttgtcattattcttaaagctaaccgatcttttggcaagaagaaaagcctcgatttcacttcttagcctctctgtaattgttgatttcttcagtgagtcttccttgacatcagtattttgcatttgcattctctcatcaagccatgcttctgatacatgaagcactgatttatcaaactggtattcgtaatttacatgcctttgtttcaatgccctgacttcctcttcatagtctcggattcccattgcgaattggtcacaaaggtcctctaacaggttctttgttttcttctctttctcaaggtccttaactgccttgacaaatgctgattttatctcagataactccttgccaaacttcctgtggaggtcttcagaatgtctcctaaggcgtctctcatcctccagttcatcttgcagggaatgaatgtctgctgcaatcttctctttgtctttatttttccggacaagtttgtcctcagagagttgcctcaccagtgaagcaacatcatggcgatatcctcttctctcacacttaagttcttgaatgtgttcctgtgcatgctgtaattccaattttagtccattaatcgctgacatatcagctgtatgttgttcttccaggctccagattcgatttagaaccttcaagagttctgttgatgtcttaaggttataatcagcccccctgaatctacccttgatatccaaagagcgagctggactgatcgcttgatttatactggaatcctgtaaaatacaagaaaaaagaaacattcttttgagaatgtgcttgttgtgctggttgttacatctgggaaacatatttagttgcatcaagaaatatagagaagtttcaagttatctacaatagacagcaggcaaaatactatgggactgacttcattgttctttctttttcctagcaaataaattcatacttctgtttatctaaataaagaatgagcagacaaaacgatgcacaaatgtattatttaattactatcaatcattcatgattatttttagtcgagaagcattagctagactgctaggctactcaatgacttgtcttgataaagcatactgttacactcccaaaacttctccatcagacacaaacatgtgtaatgaaaaacgcaacagaatcacaagatagaaaatcttacccctactaacacacattaccatatagtaccataagattttgttatatgcccacaaaccaaaatattaaagcagccaagaggatcacagcagataagaatatggatcacagcagataagaatatatacaaacataccccaactgagcttctgtaacttccaggagaaaaaggttgtgctgtacaattccttgcttgatttaacttctgatgattcgttgatgaatctgcaatatgcctaccaaagccacctgaattctgaggttgaatgtaacgaaaaaatatttagcatagaacaaatacaaaataaaataatcgtgttactatatatggtgcaataattatattcagcaatcaagactatgggaaatggtaaaacaccttttgtgcatttgctagataaatctcttcaaagtttaaatatgtctgatatattgttaacagctgtatgcttgaatattacatctcaacaccacatatgaggtcaaaagttaatatacagaacatgtgtgcaaacattgtagaaaggagaacatgcacacagacagagctaacatcatgtaaaggcagcttaacgtaaatgatgcctaatgtggattacacgagttgtaaatagctcacattccatgacatgccaaacacactccctaggaacattccgcaaactgaagaactagcatgttggtcagttagtacattgcaaagcaaaaggattcaccttttttccaattccaaggaacaaagtgtaaaaccctgatgtattcttcaaagcacaaaagatgagtactgagacaacattacaagtcagaagattggttgcaaagttagcagttcgaaaccttcaagaaaggttgtgtttacttttaataaaaacttgtaaccccgtccaatcaataagcaacaatttttactcaactctcaagcactgacagtgcaaattgtactgatagaataacagatagaacagatccatagttcatactagccagcaagcaaatgctggattgagagttgagaacagtagcggcattaataaaatcaatttagtgaagacgaccaagctctactatcaaaaaaaaatgcccactactaatggaagaaacagtcgaaacaaacaaaaagcagaacatcacaccaggaaacaggcaaaaacatggaaagacagtaaatcgagcgctgcaaatgtcttggttttgggctacatttcatcagtgctagtgcatccatttgctatgtttaagtaaataaatcatctactactagcagtaatcagtctccttcctcttgttgctgcgggccaacgaattacaattcagttgatgttacttttgccacatgaggaggaggttttgggctagttcgaaggaagacacctattaattaacccctcacctgatgcagctcgccgccggcggaggcgagcggcctcccgctcctgcgcctccgcgacccgccgccgcgcccctcccgcatgacgtcgtggatctcccacaggctggctcccagctgccgcgccgaggcggaagccgacgcggagctccgcctggcgggcgccaccgccgggtgcaccggagccagttcccccgccgccacctccacctcctccccctccagcttccacgacggcgacggcgtgcagggcccagcccgcctcctcgcggccctcccgagccgcacccgcagcggcacctcctcctccccgcggcagtcaccctcaccccgacgagcagctaccgccgcggcggcggaggtggaggcaccctcctgccccgcgaccttgccaagaaccgggcccgctgctcctgctcctgctcccgacgctgctgatgatgatggctgggcagcagcgggttgttccatggctatggcggcacgctgcgcgaggggggggcgctaggggcgcgtgagacaggggaatcccatgg

SEQ ID NO: 22491 - DNA, 48566 bp, Oryza sativa
ttgggaatggtgggggagctagggcctagggggggtttgaggtgaggtggagaaaaaggggggagggaaaggtgtctgcggcgtgggcagcagggtgtactgtaccccttttgtttcgttttgtttcccggtttgttgagtttggaactttttttggattggggaagaaagccatgccatatgtctctcttcccatccaaactcgtttccaaatcttatttgccgtgattttagcgtacagccgtttcatcgacgagctagtgtaaagcattcaagtttcgtcatttcaacgaattgaacaacccactagtagtattacatctgtcccaaaaaattttcgtttttcacacatcccacacgtcccaataaaaaaaacactcataccttatcgaatcacaatataattatttctcactttatctttgtccaacacaatttcttctactttcacaaactctaatgcaatgattactttaaaaataaacttattctagaacaaatatattgcagacaatatttattaaacgcctataaagtcaccgtgaataactttttactcccaaattcatattcaactatatgagtataaaagttttactctgatgacggagataaatatcatatgaccattttttaacctagatatttttaaagacttcactacatatttaaaatgttaggctgtgttcgggaggtgatgttgagaactcatctcctgtgcaagtaaaatggagcaatgcattttcttatgattaattaagtacttattattttttaaaaaatagattaatatgatttttctaaagcaactaacatatagaaacttttttaaaaaaacacaccatttagcagtttgaaaagcgtgttcacagaaaacaaaagaggtgagttgcgaaagttggggaaagaactcagtcttagtggtggtggtatccaatatgccgcaccacccctaccactaatatttaggcaaaattggttatatagtatcaaaagttcacatttttttgttttatagcaccgaaagataccggttcactttaatattacccaaaattcaccacattcccatttttaacacttccgttaattctcgatcttttccgtacaccttgatcgctatttacccagccacgcacataatatgacgtttctacccctcattatcatgcatcctacttgtacttgtgaggggtagaaacatcatatagtgtacgtggctgggtcaatagcgattaaggcggacgaaaaataaccgagaattgacggaagtgttaaaaatgggaacaaggtgaactttgggtgctattaaagtgttaaaataggaacggggtgaatgttgaattctcttatatgatcaatttgggaatgagggagtattgttctagcataaattttggcctcggccctctttacaactagaggatgccccgcgcattgctgcgggacttggttaacatcaatttgttagattggaggtacaatctcaagaagaaacggaagaaacaaatagctttcttggagaaattcttttcaacagccctatccaaaatttgtaaataatttaggtagcacatgtcaactaaagaggcgttcagccataaagctcttttatacagattgacgggctgaatacatatagatgtgtgtggagatggaccaatgtgttcatgtgggccgcatttggcatgaggaggcaaagagactcactgtggagatgcatgggccaatgtgttcatgtgggttgcatttggcactgaggaggcgaagagactcacctagtgactgatgggttaggctctatgctgtatttcatccaacgtctgagaagcgatctaatgcattcatccaatggttcacaatttgatgatgacgtggaagcatgaggtttgagtttttggccttaactttatggaaagaagggatttcggaaaggggcacggaattttcccgaccaaccctgaataagggatacgacaccagatggaaacgcgcatgtaatcatttggatgaaacaaatcatgaactttttttaatgatcaacaagatgattcattgaatagagtagaaaaaaaattacaaagctaatgccttgaaatgcaatagccaggaaagaaaaaaattttccacacaccgacaacatctacatatagccaaacacaaacagaaggctagtaccggactagtaccggaccagccatcgttaaacatgaccgatcaccgctagatcatcaaggaagctatagccgagaccgttcaaagccaagccttatcagttgagcaccgggcgtaactctagccacgtcttttggattgagggagagagggcaagggagaaatcaagaattctttttttttatttacggggagagaaatcaagaattaaatagcatgccaccagagaaggcatgtaattaatcgtttgtacgtgcgtattcacgatactatcaccctctgggcagtgtgaccctcgacaaagcgatcctcgcaatcaaaaacggatcgtgcaatgccagtgcctgcgcaaagactttggccccgttcttttctacgacaagaattgaatgaagattaaaattttcgtggcacgtttttcaaactactaaatgttgcgtttcgtgcgaaaactttatatgaaagttactctaaaatatcatattaatctactttttaagtttgtaataattaaaactcaattaatcatacgttaataccacatcgttttgagtaaaaaaacttaatcttcattttcaagaaaaaagaacaccacctttgtcgtgcattaccgatgcatatgagacatttaactccatgccacttttaagatgtggtaattaattatttaccacccgctgtctattacacgtgggcctctttacaatgcgtgagcggtacacggcaacgacaattgtattgtatctccatccaacggctataatctatccgtggaccgcgcgtggccacgtatgccgtaacggcacggtagcaggagtaggagcatccaacggctactttcagtcccagctacagcctaccgtgtacagtaaaagcacgctgagttctgcatggaaaggttccacctttcggaacgacgaagaatttttttatgggaattaaaaataattaataaaaatcatgtaaaatgcctgcatttcaaaggaatatgtagaaatggttaaggggccataattaggacatgcaagtcattttccattgtcatatctggtgtctaggtccctatggcacacgaagaaattgtttagaagagtttccagtagctgcaggctacaacttctcttacaattatccagtttttcttttaagctaagaagataggccatgcatatgcctgagcaccttgtttaatattgctttaattttcattattaatgttcatgttacgatggtattcttgaaatattctgacttcatttgaaacatgttttggttttggatattggttataattttcttctaattacccttgtgttaacaaccaaatttagtaattcaagtatcggaggtgaaggtaaaaccgaagcggaatccaagaaggagatcgttccgaaaacagagcaagaatcggctaaagtccgaatcggccgcgatcaggattggcagagtgcgagtcggacaaggttagccgattccgacaatatgacttgttacacgacatcgggttaagttaaagtgcttcatatggattgccatgcatggattgagtcctgaaaaggcaattgtatctattaattaggatattttatgtaatttccttaaagataagtttggacaaaagtctgccgcaaagacttatggtatcttagagtttgttagagataagagtcgtgtccaacatggacatattttgtaatctcgagtataaatagaccccgagccccatgtaatcaatctaacacacgttcaatacaatctcggcgcatcgccaccctttactttcgttttgtttcaacgagttcttgctttcgagttgagctgcatcggtttcgatcttcaactagaggtaaaacttgttatggcggcttgcgttctcgggattagtgcttccatctttatgatactctaatattgtttatgtaattcgtcaagttatcatatattttatataatctccggcaatattgttatttaaccctcagtcggctaacatctattgtgggaaggcagccgattaggttaaataccaacattgacttagattatataggatatccaccactctatgaaacatccaactgcttgattgtctagatattgttcttcttttcatacttaatgttgcatcagttaagtttgatctattaagtcgtgcttagaatctcaatctctagcctgcttttggttgctgattaaggtagtgtcggggtttcagccgatcatacctgatttagctttatatcttacatgcttaattgatatgctagatctgccctttatgttaagatcttactacaacaaagtatattaggcttctgtttgatatattttacttgctttaatatcttaatatagagtggtatcggagtattaaccgatacatgctagatctatctgatcggctatgctataaatatttataatcttcttgttaatatatatttcgatctaagtgatttatactgtctcggcatggcgaccgatctatcccaatcacttgatttaagtatatatcgataaaagtattatataccattgatatctacagccgatcgaatagatttagtttgatcgattcatatatgacatcggctcaaagataaatgatacgtcattggcagctagctgatcggctatcgtttatggatttaactgctatttttctgtctttatttcttgttgattgcaggattaaatcgactagtacgctcacgaacctaaaagcaagattttttggacctgcactgaagttaagcagatcttccaggcctcatgtttttcgcatcaacaccttgtaacatataaattctatcctaaaattacttgaaatcatacaaccttaaatttatgataatggagttgattcatatatacttgtactatgtgtgattcttttttggaatataagtttccaaactgttagtaacatttttttcttatatgctatagatgacttaatgaattttatgatatatcaatgaaagatattttccattaaaatgtagctaatagactacttcatctaataaagataaacttatattacttatactccctccgtcacataaattcgaggagtcaaattttatcccaaaacaatagggggatttatatgtaaccatgacaaaatcatttttataaatactaccacgataatgtccaaagtactatattattatttatattttcaaaaatatctatagtttaatgtctggtttaatacatattgttcaaaatgacatgagatacgaatgcattttttttcaaacttattcacaataactaattcatgttagtatacttatagcccatgtcagtgtggcatatgacaatacctctatcaattatgcctaacatgttagaattttccaactataagaaaacatatcatgagtagtttattacgcatgttacttgattgttcgtttgttgttaaaactattcagcaaaggaaaaaaacatacaattatatatttgtcatgcatatttcatgtttcaattgtacggagtacttttttctttcatgaccaacagttatatatttgtcatgtataacgaatagtacatgagaaagatattacttttttttaataatagatctaatctaatggtctaaaatattggtaatttaagtgaaaatcgacggtaagattagatattactccctccgtcccaatatattgcaacctaggatgagattagacccatcctagaactatgaaacagtttcatagtgggacggagggagtaccatatagtggcctatgagcggttgtagagtgtcacatgtcaatttaagagcgtctataataagcttaatggatttttagtatataataaatagattttaagaaattgaaattgcagaatcctaaaaataaagaaggtgattttcctaacttttcgatattctcgtcagctgaattcttaccggctgcatttagaatctgaagcaaacctgatgagagactgtaattccaccaactaatattcagtcaaagtcaaaaagtgccttgtgagatgcagtacgacttcatttaacttaattaatcctagattgcactttaagcctcctagctatagtagctgcacatggcaccgtggatcatcacttattactacaagggtttcttttgtgggaataagagcaagtttaatagtatagctaaatattagctccgaattatcaatagctaatctaatagccattcatataatagcccatttatataatagttatctataaaaatatactataccgttaatacccggacctacctctcatccacacacgacgtgttgaagtccgtgttgcagctggctataaatatgtagcctgctttcttttctcttcccttttcttctcgatatgtggttatagctggcttatagcctgctattgtacttgctctaagcgaaaacaaggtagaggtagttgagatcaccttctaggaggtcatgaactaagtaaggataagtgttatggtagatgtgactaccacctctaaatttatctatatcattcactattaaattaagaggcaattcatacaatatgttacatatagtacacaaacaccaatatctctaatactctcacaccagtcttgaattttgtgtggaggttgcctcttgatttagagcaagtttaatactacagctcgctactagctccaaatcatttataccaatgtaatagccaattcatacaatagttgtttactacgctattaatacttggtcccacctgtcatacacacattacgtcttggagtccgtgctgcagctggctacagatctgtagcccgcttctcttctctctcttcctttatctctttaaaatatgtttatagctggcttatagcctactattgtacttgctcttaggggtggctcatcatctctctcctcacttctctcctccatctcatcactcaatccaatgtggtacttttaggggcaaaatatgtagcattataggccctgtttggatccaggtgctaaattttagtccctgttacattggatgttgagacactacatagaagtattaaacgtagactaatgacaaaacccatttgataacccttgactaattcgcgagacgcatctattgagtctaattaatccatgattacttatgtgatgctacagtaaacatgtgctaattatggattacttaggcttaaaaaatttgtttctcgaattagctttcatttatgtaattagttttgtaattagtctgtgcttaatactccaaattagtgtccaaacattctatgtgacaggggttaaagtttagtcgctaaatccaaacaccaccgtagtgcttgccctaagcagctagaaaccgattctacccatgacataaataaaaccttttgcatgttcagcctttgcttaattgtgacgtgcatgctagctagtggcatagaacactggtactacctctctaaaagaaaaaaaaataatgcgtgcagcgagttcttaactcatcgatataaagctttaactattaattttttaaaacaatatattagtatatatcaagaactacgaaccaactttatgtaaaaagcattttcaaatatgagtctaacagtatcacaaggcacttcatgtaaatcagaatatctttttttcatgtagtatcatgtttcgaaaggttgggccataaggcctcctctaacaagggtgagtcagctagctcataaatctccacatcagcttttatatgatgtggaagagaaaaaagataaggagagagaatgcattatctcttcttcaagagctaagctcctaaagaaaatgtgagaggaattgtggaacccaaaatattataaacaatatgctatgagacaatcttagagaggtagactttttttctatcttttgtatgaggtggacaagcatagaaggaggcctaagctcttgcccagcccagttccaaggaaaacaaatactgcactgagcccaaacaaagccctatccagctcagttactcctctcgtgaaaaaaaaaatcagagagaaaaaaaggaaaccaccggaggcggacatctcgcgccgccgcgccgccgtcggcatggccgtctccgcccttctcccgcctattgcggctgcgccgcctctcgccggaagcacacgtacgtgagtctcctcctcccactgcatcctctcgctcgttcgaactgtctaagctgcgtggtgcactgcgtcacagcgtgtggcgccgaatgcagccgccatgggctagggcttgtggtatagctgaggcgctagtcgcggccgcgaccgccgcgtagggtccggcgagatatggggcagcacggggaggcggcgcagcaaagggaggcgggaggtggctagacacagcagcaggccaatccacaaagcagctgtgcattcttctgatttctgttcttctgatttctgaacaagtagagattaaactcgatccatccatccattcggcgagccagccaacgcattcatatgtatgatgacttggtcttcgatctagtgatatccatcttgtctaattagctatcgaactactccatatttaaccaactgacaatggaattagcatgtgcaagatgatgggaagaacaattcagtgagctactgtaattgttatctaatctaccggactacccctgtatactcgtctttgagcttattggccaattgtgtttagcagtatgcacacacatgcacgttgctgattaatttggtttataagtttagtttgtgaagcaacactaataatccgtcagctgcaatagatgcctgtaaacattaattgggacgttgctgacctgcttatatatatgtatgtaatctggctagttcgatgtaggaaattgtagttgatgatctctctagtgccatataatttcattgtgttaaaacaactttgtgtgttctttcatcattacgcctcatcttttttgtcctccgccctctctgtttgtgttattgaagtttcctgcattccttacatcaactgactggagttctcgcccctctttatttttcttggtttttcatttatagtttccttcggtgttccctaccagaacaagagaaggatcctaacgatgcgagtctactgcgctgctgatgaaggttagtctaatggtaactgtagattggcaagttgtagaagcggtcaaatgttttattttaggggcaaatgcaaatttgccactactttaaatcgttattgcaaaactgccactagaaaattgcaaaaatgccactagaactgtcattcgagtggcatccttgcaatattgaaaaaaccggtggcattgcaaatgccctattttacagttttttattctggagtgaaatttcttgtacccaggctcagatcttgaggtggttataaacttttgatgtatcttacactagggactactatttcaactcttttcttctttttttttttaaaaaaataagtagaagtatttatgtcctttctaggctaagcattgcacaccacatttactttcaaggtacaagagtgtgtgtaagttttgaactttcacacactgcgaatggctgtgcataatgtctacaaaatgtgctgcataagttcataatgagtcatcacagaactcagtttaggaaaatgtacatagcctgctatggaatattatggcacaaatttcccaatccatgcatctcgtacgtaagtaaaggactaagtctaagcaattcattatgggattaggagattgcagattgggctttattttaatggaagacaaacttgtgttttttttctgagtaaaactatagaactgatcgatacgagtgcattttgtgtttttgtgattttaagaagaggaagtcaatgacttgggagtcaacgtggcactatccatgctaaaattttacaaaagtgagttcattcttgctgttttcatcttaaacccttgtatttatgtgcagcaatcattggccttgcgcccttgccttttgatatcaactatatctctatagcttgctctcctttatgtgaacaggagaaatatcacccttactaccctcaagctgccgttatgtgccaacttgcagtgagtactctatgcaagcatacaaaaaatacggtgttgcaaagggtacaatcttgacagcttggcgtctatgccgctgtaatcctcttggtatgtaggttttttcgttggttcatagttcttttgatttcttcgacagtcgcagtctgcacctgcatcatatcatatttattaaatttcttttacaataaacaaacaggtggtcatggatatgatcccccaaggtggtttgatgaggaagagctaccaaagcaatgacagcctggtaattactagagaacgtgtatgcatgccctatggtcattttgcatacaattaagtgtgatatgagacaatgtagttccaggatcttttaatcgcaagcaaacatgcacaaatttctttaaacgcgaattagttgctattatggattgggtggccatcctttactccacttaattaaaacgaaatttttcaaaagatagatagtacataattgagtgtgttattaaagtgacaccaaacttcaaacggacaaattttatgtaattaattgttcatgaaaacctataaacattattcagctggtcaataacaaaagcattcgatgtgccatactaattaaaaatatgaccacaaaggttaatagcataatcacaaacagtttataaataattacacacttgttaacatagttgttctctaattgaatgaccaaaccccaaacttgaaatgagtaaactaattgatcatagaaacttatatacataacagggtttattaagaaggaagtatagctattaactgctgctagactgctagcaaaatctatttttggaagacatccatctagcattgttgcccctcatctcagggaagagtgttggcttttatctgttgtctcccagaggaaaagcagaaccaaataggttccttcttgtgggtggtctggtcagctagaaacgaggccaatgcaggggaccatgcgaaaatcagtgaggaaatttgctgtatatgaccagctgcaagaccatgtaacaaagctaagagcttgcctgatgttgctaaatttaagatgtacaacagatgcaagcttttggtagttgtcttgggctatcttctgaaggctttcgatgtgaaagatcctctgaaagacaattgaacattaagtttcaatgcaaatataagaatcaataacagggaagcatttcttaccatttttgtgcttcttacaggtgaaaaagttggacttgtatgcagctctgaagaatataacatgcatctttgccaactatccaccaaggacaactgcagttgtaaaattttcagccaacttccagctgtcaggtattggagaaggctttactcgatgcttagatatagtcattatggtacctgtttgtggtggaaaatggttggagtgaaaatcaagaaaatgaactacttagtactgaagtattatgagatatagtaggtatggagggaacaaggatatcatataccatcattcagaaattgtaacgatcagaaccataaatggcgtgaaatcaaactcccaaataagagcaagcagcataaaccaaattgtcaagagagcagtaaatatgcattattcgctaactaaaacgtaaagttgatagacattgtttcacatcatataggggatcatcagaattaatttgggaaaaaacatattatgcacgggaaccatttaatacttagttctgttaacttgtgcttatttctgattgacctgcaggtaaactatatagaagaaccatcaactatttatttaccaattgagcgaaaccgttcttaaacggataagcaaaacacatagctttcaaatatataatttaaagagtaaagtccatcaccggtccctaaacttgtaccgttgtgtcatcctggtctctaaactcgcaaatcgaccgttcagttcctcaaacttgttcgattgtgttattccggtccctaaacttgcaaatcactcgtttaggtcctccaacttgttcagttgtgtcaccccggtccctaaataggacggtctaaaaattttatatcaaaaaataattcataactttttcatgtgaattctaatgaagacaaactttatatcaaaattgaaaactttatatcataactttgtagttgaaaagtttttgaattaaaactgtttagggtcccaaaatattgttgcatgtttatagattttgaaattttaattttaatattatatttttggacaaaaaatgacttaaaataacaaaaaattcaactacaaagttgtagatcgtgtcgagggctacaagtttgatataaagtttgtcttcattagagttcacatgaaaaagttatgaattatttttaaatataaagtctttagaccgtcctatttgatctagatattcaaatccaagttaaggaccggggtgacacaactgaataagttggtggacctaaacgactgatctgcaagtttagggaccgggatgacacaatcgaacaagtttgaggacctgaacgatcgatttgcgagtttagggaccgggataacatagcggtacaagtttagggaccggtgatggactttactctaatttaaattctaatttaaattctaatgaccggatgattgacgaatccacattttagccattgcaaacaaacggataagcaaaacacatatctttcaaatattccttctttttgccgtgtcccctgcttgtcatcgtcgtcagaatcagatcctgcagctttgtttgccgcatcagtgccagcctcatctttcttctcgtaatcctatcagaaaataccaatccacttgtcaaatatctccacacagggcagccaaacttgctgcgtaggagataaatcttataccaatctgtttgtctactgtataccttggcggcagcagaggaatccttgaaggtgaacttgtcgaagatgttcttgaagttggcgaggaggccgtacattcttttattttagatggaagaaaagtttcttctatcttaaataaaagatttttgctgatttatttatttatatatccaatttatatccaatttatagaattgatacaccatttaattcatgtacttcatctgtattttaatgtatgataccgttgactttttaaccaacgtttgaccactcgtcttattcaaaatttatatgcaaatataaaaatagaacatttgatgataaattaagtcacaataaaataaattatatttacataaattttttgaataagacaaaaggtcaaacgtttgttaaaaagtcaacggcgtcatacattaaagtacggaggaagtgtcatttagcattcaggtccgcttgctcgtgatgtaccccacctccacctgcggcgagcacggttcctaggtcagaacaaacaagaggggggaggggggggggggttcactatttccccttgatctccctttgccgactactgtgttatctgctaaagtaaccatggaaagttcatgcattccgtggtttatcaggatgagattgttccgaaggaggccggcgatgctcatgaggatgcttaattgctaatagatatttcattttatgtgcacacttaatcttcatccgagcgacaacctaaaattatgtcctatttttttaaaaaaaaacatctctaaggagaattttaagaaaatttctctaaaaaaacttttgactttaatgtgatttttacacaactttctataagaaaatttcttacaatattactacctttgccccaaaataaatttatgtttagatcttagaatgcaaattaagatagagcgaatactcattataataatataaatctggacagaggatctgtccaacatccgattctaggttgttatattctactttctccgtttcatattataaatcgtttgacttttttcctagtcaaaatttattaagtttgatcaagtttataaaaaagtttagcaacatctaaaatatcaaattaattttattaaatctaacactaactatatattttggtaatatgttttttttatgttgaaaatagtactatatttctctataaagtttgacttgagaaaaagtaaaatgacttataatatgataaagaggaagtagtgttggtgatgagtaatcaagggtattgaagattttgtggaccagggtaggtagaaggaagataactgaacttattttgggacagatgcaatatttagagagatatagaacggagagaaaaagaccttgctgtccctcagtgagggatggatatgtaaagaagtggctgggtaaagataagaagaaattaacgtgatatgattaaggtggcactaatattctttaatgcttatatttatagataaactataaaagatgccggtgtgttgcaatgggtagagccatttagatttgtacatatgtccccgtggataaataaacacatcccattgtatcgtttattcatgtgcttatccgaataacttattaccaaataaaagaatatttatgtgtaaatattttatatacatgtttttagtgactcaaaagcaaatgttgtaaaataaaattcgataacaaactaaaaggtccaattcaaaataaagttctaaaatttaaaatttgtcttataagaataagcataagccaaacaatgaggccttcaaacacgagctcgatttatcgtctagctttatctcaagttgggcaggaattgatgacagacgaaatcagcaatgtcgattatcctttattttcagttggcatgttcttttcaaaagtaaaactgattgttatggattattataatggtatccatagtagtatgtatgagcatgtgtgaagattgatttgaaatcatgctaacatgacataggaatcgtgacgtataatacgaatagaattggatgatctaggcaacgacatacatgatattcacacggactctgtgagtttcatttacttggtatccacatcactcgtgaatcatgactctgcaatgaatgctacgcgtgacaggaatcagatacagacgacgtatcatagtttcaacaataacaccttcaattttaaaatcgtgagcgaggacgacgcagtcccgatcggacatgtggcaagggcaaattgcgcctgcgagggcgtcgcgggcccaatcacggcgccacacaaaggcatgtatggaaacagactcgggcgcgggcccgatcgttgcgtgtggcaaggggtacgtgaaaaggtgtaggtccaattaattcgcgcgcctctcggataagagggatactctggcgtaagaaaaaaaagagaaaaggatgtggcataaacataaaattaaaaccgattcaaacatggataacgtatcaaaattctaacggaagcatctttatttttttataatagtagagatattaaatgcttagaaaaattatattcatgaacacagctgatagcatcatcacttcacttgtggtgaacactcccggaggatgaagagggacacagatcatgctttagcggtgagtgacaggtggaaccggtctcacatatcagcgacagttgctgcaatactgcagacaatctgcactggatgaagagagctttcggttcaatagtagtaggcatacccatacccaacccaacaggattgagatcctctacggttaaatacacggtgcttttgtcactgacatatgagcccaataatcatcggacccacgtattagtgatagagtcacacgactttgactgcataggaggctgatcctacccaacaagctgtgcattgcaaagaagccatatggaaacacgagcccccaggcagaagcaaaacccaagaaggccagcaagctacaggcaggcagcagcaacttcacaacactagtgtcactcactcgtcacaggagtactagtagcacaggagtgtaacatctcgtcatggcgccccatcaccgtcaccaccactgcctctgcggcctctgccactcccccaccagctgagagctgagagacgatctcgcattgaaatctcgcggcggagtagccaacaaaagtcttcttcttgggcttcttctttcttcctcctcgcagcgagctccattggcatggcattgatggagacgtcgtgcatggttgccgatgcagcgcacgagatgggagaagtcgtcgtcgcagcagcagcagcagcagaaccaaagcaatgtgcagacaggtgcagcagagaaggggggagtgactagtgagagcaagagtcttcagagttgccactttgccagccagggccgttgaaaatgaattttatttcagagttctgattcagcaatggaaaagtgttagcagcagtagattgtcaaatgtgtttgtttggtggtgttggtattcaatctctgtacttgctgatgcttagtatattatggttttattaattgatctgaacattgcataattttatctttttgagaactagcattgcatgcttgatgcttcaccaatgcattggaacctacaaaagcaaaatatatttatcaggcccttcttggacgaataatgaatagtaagcgctcttggaaagtatactagtatttcaatggttttatttgatttgatatttgggcttttcctgctcaaattgataagaatagagtatatataatatgatgtagtaataactttataaattatgaagtagtactgtgtagtatcatgacatccattcctatggcatccatcttgttgcagagaatccaatcctcagcagtcgcagctgcatggagtattgcacattgcgtttgcaaggatggatagatggatggatggatggatggatatggacagaggagggacaagaagaggacaagtattactcctcctcgtcgacatcacaaactgcaacgccgcagaaaccaacgacttgtgtacccccgctcactaaacaacaaacactcgtgtcctgcctcccacttctcccccccataacctaacagcacacgattatctcatggtttttaccctccctctctctctcaacattatctctgatcaaactgctacaatgcaaagctggaagaggtacagtacccccaacccgcttatctccgttcatctctggtcgtcccaaatcagtgcttaggacctttagggcccatttgaattgcagggtagaaaaaacagaggaataggaaaaacataggattctgatagaaattgaagtgtaaaatagaggattgcaaaacacaggaatggtcgtttgattggagcgcaggaaaaacgtaggaatcggatgagagagagactcaaaggaaattttccaagaggttagagctcttgctaaatttcctctaaaatctacatgtaatgtgtcattccataggaatttcataggatttggaaagcttcaatcctttgaatcaaaggggcaaataggaaatcctataaaattcctacataaatcctttgattcaaaggggcccttaagattatagtaataagcagccgaggtggctggtctagattagtgagaatgtgaaaagttgagcttctactgctagtttattttctagattgtatgattaaagtttcttacaatccatataacaatatgaactatttacgaggctaaagattttgaaaaaaccaataattgttagaagctccctcggatatgtttttgtgtttacggcttacttatttgtttaaggtgtaattaattttaaattttagactttccaatgaagtgccctagctgttctgaaatttatgcgggtgcatcatctaggtctctcaacttttttttttattccctgaacttatcttaggcgttagatatgtccaaacatgctctaactcgtttagtgcacgctgacgtttttgagggttaattagcaacggtagtaatagctgactactaacagattatgacaaaatgaagatgtcaaaccagacagatgcatttgctccaacttctaaccacaagaattaacaaagactgggcaggtgaatcttgttttgtttctttaaaaatatgattctactcctatcagtagtatactagtatgtgtgatgtgtctgttctggcttggagaaacagctccctgccatagatttcatgtttacctctttttatactatgttgcaaagagacaaaaacactggcattctccaagtacattagctaagcactgatcatgttcaagttgtgggatatcctttgacagaacaccatgctttctgctaataaaaatcactatagcacaaagctcaacaagttcaggtacagcattggacaatacttgcacagcaaatgcatttggaggacacctttgcaaagtgacaattacatacacacccacatttactaccttttctagtagtataacagactggtagaaactgtccccaagatatcatacaccacccttcaacatcaatatatatgctcatcagaagaaattgccccatgcttgcaacaatgcaaccctgctggtaccacatcactgagctcacctgctggctggctgaaagggtctctttctgattctctgaaggcatacacaacatacatcattgacagctggacatctgaaacaatatgtgtccttcacttgcagagcagagggtgtggctttacaggctttaagcaacatttgggagcagtgacagcaggcaagaaaatataaaaagggagatgctgctttttaggattggtggtactatcaagcaagtacagagagttcaggcatgaggaaaatagtgttaacgtatccatccaaaaccaaagagagactctgagtccgggagtccctgatgcagcatgcatgctcctttacctgtctttgcacaatcacatgccattgctatgtagtatgacacagatgctgcatcagaagcaggcaaggattctggcactacatgaacagcacaatgctgtatgagtaattgggataaagtatggtacagtttagcagttagtagtttagtactataggacataagtagaagaacattatggataaacatgagcttcaaatagcatcaaaggaacttgacagaggagataagtataagaacattagggataaacaatgagtacagtaaaaccagagatcaccaaatgtttgcctaatatttcaataaaccagctcttcgcgatttacatggcatggtttgatatccatgtttttattttcagttaactatctgcatttccaaaaattctgattatgtaagtgctaataagagtgatggacagattgattttgtgcattggactaaaagagaaggcaaccttaacagctctgctgtccatcaatggttatacggcaagcagagcaaggactctgcttcaagtactgactcaacaacaaaggactctgcttcaagttcagatgtttgcatgtagtggtgtcgtaataaaacaaaacataaatcagtagcagcggggaccccaaacgcaaatgactactataaatcaagaaagtaacaatcttttaggtttgggacatctgaagtggcactttgtttgcaggcaacataagaataaagaaaacacaattcagcaagaattgttcttgtgtatggcatcatccctccctctattatccaaccatcaaatcaacaaaaatgaaacagggaagtttagacgccctttcaattagaagatatactcagcaataaatagaatagatctataaaacctgaaacactttctcgaatggcttccaatgacatcatctcttcacttggtaactccaaaccaggcaaataatgcaagaattcccgtggaagtgaaacaaaataaaactaggaagcaatgtccagcctaggctcaaaagagaaaccagtaaacagctgcagaggaaacctcttcgtcacagggctcttcagtgaccatttccacagcttctggtttaattcaaatgtgaggagggccggtgacccatagctctgaatatagataaggtcatccgccccacagcttgcaaaaacatcatcgaactcgccaaatccttggaaaaacttgtgaggcattcgagcaacctcatgccactccttgttccggagctcccagatgccaattcccttgatgataccaggcctatcttgcttgccaatgcccccaaccaagacaagcctctcattgaggttcatcaaacggccacatgtaagagggcacggcactggtatagccatgctcatcaaagaagtgtgagtaggcctggtagataggtcatacatgagaagacaatggcgatgctcgttgttattcaccaaaactcctgttgagtacaccagatagtagaggaccccatcacagatcacgcactcatcacctcctcgccatccaatcaatagttcagtgaagggagacacccatgtatttatctctgactcgtacaaatggatggtgaactcccattgataatactctgatggcacctggttgcaccttgcaacagccaccatgtactgatgagaggtcctggtcacagaaatggcgagagcactgtaatcagccgacttgccaccaggagcatcaacaagcctcttccagtccttagttattgggttgcacacgatgatgcggctcctatcctcactgtccatcagacacaccaacccggacgatgaggaaatcgaccaggtggtcttctcaatgcaagggaagtcgaatccataccacttacgcaggctcgggtcataggtgaaccccgagaccgcttcctcgctgcaggtaaacatgaagtaccaaggcttctgaggcaccattttgctccatgtctgcctccgggcatgcacaatctcatgccatctcttgcaaacagatccagatcttatgacacttgcaacaggcaagaaggagaggaccttttctaaaagatcatcagggagaacggcgtccatcgacacggccaagtctccactctgatcatcatccatgtctccagaaacatgcccataatctatgacctgagcaccaatgaaggaagatggatacaactcccactcctctgaccccattgccagcatccagcgaacagcacagtaactaacgcaagatcctgcatgtgcaagtgatgaaattaaatgttcatgcatcagccacatggtaacatctaatctagataccagagttactcaatattcaacacaacatcaatttttcagagcgttgagtatatatacatcttatacattgcctccatgagctcaaggaagcagaatgtaaatgccagataggtgaaagggatagcctatggtttttatagcagtaaattaatttcaactgcatccactccactaagcagtaaacaaatccgcaagaaactggaaaaactggaatgcccgttgattcggattaggttgcttacagaaagaagaacccccaaaagagaactctcaatccaagcaaaggtttattggcaagaaaacgtatcaatccatgtcaggatggatattcgccggagagcaagaacccaatcgccgccgccgctgtcgtcagtgatgaaaaaaaaaaaagagaaagggaatgcggacggacagcgaaaaaaagtagtattctttagaagaaaaaggattattgtgatgatcgtctgatttcttggcgggttcactaatcgcaaaaaataaaataaataaaaaataaatgaatttcacaagaaaacttcgagagtgacaacaccaaacctgaacacaagtttcttgaaaagggcagcgaaaccgaacaaaatgcgtcatttctcccatgaaacaaactcctactggctcaaagagaaagaaatccaaaccaaacgacaagaaacaaattggagggaagaaagaaccaatccaggtccggtccggacgggatctcccatctgcgccccggccgccccacgaaccggaggcggaggaggaggacgagagagagagatagctacagtgtagaagaagaatggataccttcaatccgattccggccaagattgggggggctcgctccgctggacggagcaccgcccgctcccccgccgtccgggcgaggaggcggcggcggtggcctccgaggctgctcgctggccgcgcgctggaggaggaggaggaggcttggcagccgcagccgcgcctccgggctccggctctgcagatcagagagagagagagagagagagagaggggagagagagatggagggagctgagagggaaagagggggaggaggtgagggaagaagaagagaaggaaggggcattttggtccctagacaattttcttttcagcttcttatgctcaaaaaataaaataatttttttctgtttgaaaatagagcattcaacatattactgtattggaaaatatatttaaaaatgaagtagacgttttttttggaaaaaaaatgttttctaggaagtggataaaataatgcacgacaataattcagtgaagtagcttgaaagaataaggactaagtcgagacttctaacgagtagaaaggttttttacactaagttaaaagtccatgcattaccacggatgtacaagagatgaaagaaaaataaaaagtataagtttatagcatacttagtcgattaggcatataatgaaagtcgcaacgttcacatatattgtaagaaccttatacctgtagccttacatgtcagtatatgttgtttaaccactactactatcatttaaagtaatatagaaataggtcatcaaaattttttctacattagtgataaatataaatagactacaacatgttagattttagcctttagtgacatttttattaaatatagaaaaaaatgcatgttacttttgatatacgctccccatgcatgtatgatgtatgcattatgtaatacgcgatatcttctttgggttgctaagagtctatgccctctaaaattattcctgtggtgagatgaaaaatctgaaaactcgacgctattgctcaaaatgatgaagataaccagttattgccaaaaactagggaggtcatgtagcagttgttcatgtgtttgaaccaacaggtttagatccgaggaatatatactgtgcactgaaatttttcgtgcatactctgtgaatataaattagtaaatatcacgaaaaattctaaaaaaaataaatatatacttctaatagtataacacatatctacaaagtctcattcatattcaagttgattatatgatattattctaacaataaacttattttgggacaaatgaaaggagataaaaataaacttattacgagatggagggagtagagaacttaaaaaatagattaatatatttttttaaagcaactttcctatatatttttaagaaacctccaccatttaacagttcgggaaacacgtccgtggaaagtgagaggttcgaagatgggaaatttctgcacgcttatggtttagggttagttattcctttttaccatttacaggaataactaagacatgtaaaatttcaagagtctaactaaggtgtgttcttttctcccccttttcaacttctatgctctctttttcacacgcgcgctttccaaactactaaatggtgtcttttaaaaaatatatatagccaagtcatattaattcatttttgactttttaactagtacatatatgctaatccactgtttcattttacatgtctaggagaagggttcctaaccccttaaaagaacacagagtcaagggagaagtgccgaatgcgacaacatcatggccctaggatagatgaaaaaaaaaccacattgttaccctagggaagatgtctcgtctatatgccaaggagaaaaatataccgatggacttgtaccacaaaactttggggattaagctataatcatgagttgtgtctccaatcaaattttctctcaggaactctcatcaacacttaaaacaaataaatatcataaaacgtgacgttttatgatcaatatttcctaaaaccccaaatgtattatgtcttgtggcacatacctataagttttattgtgaaaatgcttcataaaatctcacctttattaaaattccaattggtttcaacatgtttgagacaatatttttttaaagtagtaaagacttaaaccaacgaccttaatgaagaattcaacaactacaagtttcatatacactgtaattttaaaatattaagtaaatatttactgaacgtttgcaaaactttagaaccacaataaaatagggttatttgtcaccatcctaatatctaaggttttatgcaacttcaattgtatttaaaatacgaggcattatcgatacattcgtagttgggtagtagattgtttttatatatttaaatctaactaagattttcaggaatataaaaatattttattcaaaacttctctaagttatctttaccaattaatttattttaatatgctatatctctataaaattcctactacacatactctcggatatagtataataaattagattcatcggaactaaagaaataaaaaagacgcgaatattagggatgacctaatatcaaataattagaagttgtgaggtttcaaacccaggccgactagctcatcaccttgtggaactagccagaaaatcgattggcgtttctcagaattaaagaaataggactgttcatataattataggatggtacttaaaaaaacccaaaagacgtccctgaaattttctttaagaaaaaacttctgccgggcctgatatgtcgagtatcctaacgatcgatttggaacagggagggggtgctatgcatggatttgatgttccaaaggcctacaactacaaagatatgatcgagcagaccaaccaaacaaacaatggcgcaatcgtgactagtggtgttggatgaggcctattttatgattggtggagcaagcatgcacgcatggggcctcacctacctaaccagcaaccatctctatgtctatgtctctgtgtgtgtgtgtgtctggctgtgcatcactcacccacaggtcgcaacaaattaaaattgtttgtatatatctcatgacccatccctatccgatgcacgctttgctctgcctttgctgcttcggctgcctttgttggaaggtcatgatggaaggtgtgcagtagtatagctgctactacctctcctcttctctcctccatcgtcgttggcatttatccgtgacgtttgatcattttttttattattagaaagaattatgtacatataatttattttgttgtgatttttcattagtaaatatttgaatataacatgttttcatagttacgattgtcagggttatggataccacatatctaatagtagttaactaaatctcggcaggatccactacataccatgtcttatacggaaactgacctcgagggagttccggataaggaaagacaaccagagttctacatggaaacgacaaggactacttggattgtatccatattggtttctctagttctacttggacaagtggacacctatgggtataaatacaggccccctaggaggagaagggggacaagacaatcaacacccaacgggatcaacacccgacacgatcaacacccaacacaatcaacaaagaagcctacatacgccaagacacgccgccggatatcgacttcagggataagcacggctagtaccctacggtgtctccggatactgtcaggagagatgaaagcgctatctctgacctcgctgggcacggattcgaggaggaaggctaccctgttgtcgactacgagtcagatcgtcagaccgccatgtcgacaacagttagataggctaccccaaatattgtactggtgtgattatcatgaataagagcaataccgacttcggccaacaggatgtagggttattacctgaccgttcaggggcccgaacctgtataaaaatccctgtctccatcccttttacctcagtcttgcgtatatcctagcaccgacgatccccataccatgcaaataccagaattgcgacatcaaacgtcgacagcggcgcgccaggtaaggggattttggtgcttcaggatttcgacgagatgggttcaaaagatggattctcgaacaacaagctactcgacgacttcagctgcgggaagatccaacccgaccggagtatgtctcccgacgagatcggaaccaccgtcgctaaaaattcaatctgtcgagatcgtccaagtctcaagaccttcgttgccgtgtaaattctactctcaagacagacaaccatggtgcagcacgccgaccatcccgacgatctatggcagaggaactagatgtcagggtcaaccgattccggttgtcatcaggacacataccaagctgtattttttggtctaattcctactcggaccagaaacagagctctgatcggcaattgttgacggcaaaactgcacgtgtcagagctggatcaaagggagttttttcacgtgtacaggagtatcttatacaggacgactgtatggattggttcaaaatctactacatgtacataccggcaacaaaagttaattagtagattaattttttaaattagtctactaattccgtagatatatccggcatatacgcaatattttatatacaatttattgtacctatttttcagacttatacagtattgtcagatcaataatttgttatgtttacctagagcatgttttttatacaatatctgttgcgcgggtgtccccgatgttaaatcgactacgatctaacactgggggctcgctctgtcttcttctatataaatcatgcttgtttacggtctacataatatctgatatttacatctgctcgttatgtccagtacatactcgatattatctactatatgtctttgtcttctagaaaatatttttcaggaacaattgagcactcgagaaggttgtggtcgagtacactctattatcgagaacattctcgacaaatgcggagttatcgcacccgacctaccaacgaagaccgacgacctatctcatagcaccggccatggctggactactcgagaaaaggttgttaacggataattcctcgcgaacaccgtcggcttgatcacccgacatgattgcgaacggacatccggatatgctacaagttgggtgtgtgagtcatgctggccatatgagatgcacataaaccaactctagcgcctccattggtgttcgagagataattctacacgttcgctggttctccaaccagcacgtagcaatctctcgcacgacaacctcagatggtcgaggtacgactacagcaataacgcagcggtcctcgcaccacgacttcaaatgatcgagagacacctactcactggttctcaaccagtcaatcatagcgatctctcgtacatttacttctagtggttgagttacgactactacctggttctcgaccagcggtgtagcgattctcccactatttccacttcaagtggtcgagtttagactactgcctggttctcgaccagcggtgtagcgattctcccactacttccactttaagtggtcgagttacaactattgcatggtcctcgaccagcgatgtagcgattctcccattcccctgcttcaacaaagttgatatcaggtgcacaagatcgccaagtgttttacccagagatcccttacccagatgacacctagcgttgaaacctatcctactgtccctttacgccgtcttgacaaggcctccgaggaacctgagggaacttcagctggggacgcccagagccgataaggccttgtcggatccttcagagatgaaagaccatgtaagatctggtcgtgtaagagttctcgccgtacgtattaaccaagccgtgtaatcggaaatggattttccaacttcacagctgggggctaggataagtgcttgttcaaccgaggcaggtcaaaggtccaagagccttatcttctgagaacgattctccaacgacaaggctgggggctagggagagtgtatgactctacaaactgactgatcgtagttggtaagagagaagacgctcatatacaaagcactggtctgtacattcaattcactagtctgtcatattatagcatgtcaccctttgagcattcgctcgggggctatttctatctaatattcttttctgagtattgatttcaggaaaattctattcgacattatcgaagactccatgtctctatggttctacaccaagatcgactaaggcgagtatgacaaatgtcgacaaggctccgtcgcagactctacgccttctcgatcactcgagaacggttgctggatttcgacaaggaatacggaatgaagagatggtgtacccgctgagataaaatttcatgacttcaatccaaattctcgattgcagcaagacgggagacttagtcgtacgctctgtactttctcggtcgacatcagagattgacttagacaaaccctttcggtgcccgcacgaggctgataaaggaagtctaacgttatctctaaactcaccgagaacggtcacgtgagctcgataacagttcctccaaagtctgcggttgagaatatgaactcgttcatttgcatcgaagtcgggggctactgtcagggttatggataccacatacctaatagtagttgactaaatctcggcaggatccactacataccatgtcttatacggaaactgacctcgagggagttccggataaggaaagataactagagttctacatggaaacgataaggactactcggattgtatccatattggtttccctagttctacttggagaaggggacacctatgggtataaatatagggccccctaggaggagagggggggacaagacaatcaacacccaacgggatcaacacccgacaggatcaacacccaacacaatcaacatagaagcctacatacgtcaagacacgccgtcggatatcacttcagggataagcacggctagtaccctacggtgtctccggatactgtcaggagagacgaaagcgctatctctgatctcgccgggcacggattcgaggaggaaggctaccctgttgtcgactacgagtcagatcgtcagaccgccatatcgacaacagttagataggctacctcaaatattgtactggtgtgattatcatgaataagagcaataccggcttcggccaacaggatgtagggttattacctgaccgttcaggggcccgaacctgtataaaaatccctgtctccatcccttttacctcagtcttgcgtatatcctagcaccgacgattcccataccatgcaaataccagaattgcgatatcaaacgtcgacaacgataattttttaaataagatgaacgatcaaaccacatgacaggtaagagtcaacgacatcgtatatttagaaatggagaaagtgcagggtgatcactcatacatgcatgcttaattaattgtggagagcaactttgttgctgtccatgtgggcgatgctaaaggaaaccattggcttgctaataatgtccattaaagtgccttttcgtgattagtgaacttcttgtttgggattattgtattgtgattcagccaaggtctttaaactggttcgacggtataagaaatcgagaaaggtcggtgggcaagtggctatgggtttgttgatcactgttcttcgataaactagcaaaatacccatacatgctttgatatgggtaaaataataagagtaaattgtgtttagggccaccttttatcactaaagttttactttgaactaccctttaaaccatcttttcactttggactagattaatttgcctttgtttcattttgaaccacccaaaaactttttcgagcacataaatgactttaaccacatcggcacccataaaccgataatcttcccgacttacatgtagactattcttcgcaagattagatggtagatacaactagaaaagtaacttggggtggtccaaaccgtaacaaaggtaattttacctagtctaaagtgacaatattagttagagggtggctcaaagtgaaactttggtaataaaaggtgaaccaaagtacaattaactcaataataataataataataataataataataataataataataataagttgttatagacatgtttgcttatttgaatatacataatatgtccatttgattcaaataaatattagactattgtataatatttaaaaataacaaagactaattttaaaaagaaaatacaaatagtgatggtgacagaataaccaccactactaatatcttttataggagtatagatactcccaatagttccaaatgtaagtcgtttaagttgttttaaaatttatacgtaattctacagagcctcttttttgtttgcccttgctaaataaatgctaccccttttatgaataaataattctttttatgtagtataaacgaagggtaactaagtctactgttggaatcaaagtgagtgcaccatatctcattatgatatgtgtacatgtttggtttactactatttttagtcataatagatacagtatttggcactaccaaaatttgacaagataatagacaacatgtctcaaatactttttttaccaactttggaaattctagaaattaactttctcaactgaaacaacatgaaatctatctatctatctatctatctatctatctatctatctatctatctatctatctatctatctatctatctatctattatatactaaaagtccattaaacttcctagaaacgctcttaaactgccacatagcgtttctacaaatactcctagaccgccacatggcactgtttaatctcaccgtcgatttttatttaaattggtgacccaatattatagaccattagattagatgtccttttttaaaaaagtactttcacatctatattgtgggccggacaaagaaacaaaacgtaagtaatccgatacttacgtacgtacggagaagaaacaatgaatcttatctccccgttcaccggaataaaggaaaacatgtataccaacttagataaaagcgattaataagtaaaaaaaacataattaaagtaggtacgtagtgccactgaaaagaaatcgatgctccataaaatatgatattctactattttaaaataaaatatattactctataaacttatgcaaatatacatcattaaactagatcgtttacaatataaaaataaaatatcctatcaatgctctttaaacatcctatctataaattattttaaaatcatatatctaatttgtgatccagttggaccctccaattaaataaactattgatgtctatgttcataaatacatcataacacatgaggtcgacatataataaataatgttataataatatttgaaaaaataatgaattatcccttgaactattacggtagaccgaattaccctcataaacccgaaaaccagacatatttcaccctcaactattaataccggacgaattaaccctccccctaccccgactcaacgcggagtggttttgatcctgcgtggcaattcagttagcattttcttaaaaaaaatagtgggacccatatatcatatctcttcctcaccccttcatcatctctctctttcttctccctccacatctatcaatcggcaagtctaggggcaacgagcggcggaggcggctcctcctcgcccaccgccggtgggcgcctccttgacggtcgcgtggcttctcctcgacctgcaccagtgcgtgaataggatgacagcggcggggcaagggagctcaagcggcggaggcggttcctcctcggctgtctcggtagccacatgcgcattccagcggaggttgtcatctccatcatttccgttgcatatcgtcgtcgcgtgatgagagttgcagctgccgaaggcgagcacctgtgctggtcctcaatggccaggttcggctatgcccccgccatcaagaactcgcccaacaaatgcggcggcagctctatgtaccatagcgtgccgtcccaccacggttcttaatcaatccccaccaccaatgcctctctcccgacgagacaacgaggtggatcaatcaagcaagcaagagctggggaatggacgaaggaggagaggaagagcagcgggcgacggcgtgcttgccggccggccccagcagcaatgggaggaagaagagtgaggctggggaatgggattgaagaagagagggagagagagaggtgagagaggagggattgagagggtagagagtgtgacaagtgggccccacatattttatttttaaaatgcagactggactaccacgtaggaccaaaaccacttcggcttgattttttttttgggaggggggggggggtaattcatccggtattaataattgagggtgaaaaatgtctagttttcgggtttatgcggtaattcggtcgaccgtaatagttagggggtaattcgtacttttcctattttaaataattttacatcatattttaggtgtcaaataacacttgatgataatataatgctaatttaaagctacatatgtaaaataattgaaaacaatacaaattagttgtgtatttttaagtagatatatgatttaatttaatatgtttgagattaatattttttttgaatttttagaactatatgataattgggcaacataaatgttacataaatgtaaaaaaataattatgacaatatttcaagccaatgatcttgctataaaacaaccatttagtccatcatgagatttatggtcatatatgtatgtttttctctttgtcaaatagttttcataacaaatgaacaatcaaataacatacgcaatatactactcatgatatattttcttatagttgaggaattccaacatatcaggcataatttgatgattgtatgtcatgcactctattgatgtgacaatgaagtatacttcaatcaattagttattataaataagtttgggaaaatagattcattctccaaattaattagtaaaggtgtcttctgtcattatgaagaataggcgttgaaaaacacaagccgcaaaattatagatatttgtcaaaatataaccaacaatatggtatattgttcctttggagattttatcgtagtggtatttaaaaaaaatactttattcaggttaaaaaaaatcacatatagtacaaatagatatgaaagaactacattattccattattgttttattttttttgactagaaaaactgccagttctttgcccagcagtgtaattttatataactcaaaaaatatttacaaagttagagtaagaaaccaaacaaaaatataaagtttgtaaccaatcagaaacaatttgttttaagggatcctttattctgcacatatgcagaagaatttccttcacaaaaagagatctccaacttggaaggagggctgaatgttctggaagattaaaccattccactgcttccaaatgtgccatgctgccaaaaagaaaacctccaggaagcccctctgagcaaacttgagtttttctagggtgatcatctgaaagaactccaaattatgatccactgaattcctaagtgttgctagcatctgacactgaaaggtcaagtgaagaaaagatgaagccttatttctctgtgatgtgcattgcacaaaagacatgtgagatcatcatcttctttggcatagtgccttctatcgagcatatctcttattgttttattatcgtgacacatgttgttctcataaattcatataataaattcaaggttgtatggtttaatgtaatatgtcataattagataataactaaagcatgtttaaaatagagtgaagatctattttgaaaatataatctgcatataaacatttataataaaaagattaagcaatattaaataagtacccgcgcatatgcgcgggctaccttcctagtttctataaaaatcatataaaaacactatcgtgtacctctaccatctcaaattttggttatgtttgacatcaaacaaaatatgccatagatattgatcatattacatgactcggctcaatttgaaagagattattgagtggattattgctacggattatctacataatagtagagatatattaaatattttgataaacaaaattaacaatacttaataccagtgttctaaacaatatacaattaatataataaattttatttttgaaaaaaatattttttaatgcatggaacaaataatacatttcaataatctggtgaataatatacaaaataaataaaccacgttttaattatgaggctgcttgtctttgttctgggtagaaataaacgctttataactgaacagctagatggcatgcatgttgcttaattataaagcttgtagaaggccagaaaactatatacactcaagcataattaacacatctataccgcgataatcttgtacgtgctgtcacaataattcgctgtctaatctgcataataaatatataaacctattggcagtattgagagtttgtgactggtcgacaatgacaacacttcagaatgcttattattggactaccttgtcaatctttatgctatgtgcgtgcttattttgttgatcgccatgtttaggcaataggtacagctgccttacaaggatacgtacattacagtttaccacatagttatgttcgtttttttagttaggaactctacgcacggaaaacagagcgacatattttcttattattaattaattatttacttttttaaaaaatatatattaatatgattttttaaaataactttcatatataaactttttttaaaaaaagcatcgtttagcattaagaaaagtgtgcacgcggaacacgagagaagtgagttggaaaaactggggaagaaaccatggcttttaaatgaaaacgaaccaataatcgtctataatcaatcatttgatcttcggctaattagccaaaaaaacacaataaaaaataatttatgagttacacttttataagggtgttgttagtaatttaaaagccaataatacttaaaaacaacgaaaaaattaaactcaacttaaaattaagttctaaaatttaaattttgatagtagataagccaataggcatacgataagaagctataaccgttaaatcattgaacggaccgttaaccttaaaaatcgtttgagattaaacaaatcattaaagagctcatattaaccatatgaaatgaccttctaatatataatcaattgtttctaatggtttgttcaatcgtgtgacgaaacggttgtggcccatttgatagtagtagaaagttgtaagccaagagcccctacttcaggctcaagttcagatcaaattgatatcgcacattcacacctcaatcatttttaagataatcatagaaagcaaataaggttgtcaccacgctcataaactcaacttttgtgtgcggttaaattaggctctagaatggcatttagttgagctgaatccaacgctccaactacagaaatagttggatgataccgatatattaatgtgggtgatttgtactatatcttttttgacatgacaagagatgcatatctattgggaaaagcatatccagtgaccaaattgtgtttggttttggggatgaactaaagagatgagccacaagcagtttgtattcttgcaggtgtattccttgaattccctgcacgcacaccttgatgcggtggatgcaaaacaaagagacaaaataggtgcctttggagagttgcatagttataacagtcttggatgagtatagatatgtcaagatgttgtctaaacttttgcatactttttttggttgaaaaaaatattttaagaatgattgcaccaaaactatttcaaaaataaaacacgatttcagcgccagacatgatgacgctaaggttcgtctcgttgctagtggtatgagtataggtatgtcacgatgctgtctaaacttttgcatacttattttggttgaaaaaaatattttaagaatgattgcaccaaaactattttaaaaataaaacacgatttcagcgtcaaacatgatgacgctaaggtccgtttcgttgctagtggtggtgtggacacccttgcggccatggaacaatatagaagtgaaaggaggtcaacactaggagatgattgttgaccgttggtactaaggtatacacatgattttggtacaaaagataataaacatgtattttttatataggttcgggctttaacttataggtaataatgctactcttattgaccgaagctggtgctgtctttatatatcaatatctcacgagtactacaatatagaggatgacctaatctagtcataaagctctcacatgtgatcgacgaccagcgtagtctgctttggagcagtattgtattggattgtttagatatgtcttagcgtgtcttcgtatatcccctctcctcctagggtcttgtatttatactcttaagcgtcccttttcaagtagaactagggagccaagtatgaatacgatccgagtataccttgcagtgactaagtaagattttgtttctcttttcttatccggaacaccttccgtatatgaagctttttttttataggacttgtattaggtgggccccactgagtctaacacaaaagtattagagattggtttggttcgtggcttaacttgaccttaccaatttttgtcaatgccaaattttcacaagtttttgcatgtttactcttggcaagacaaagttctatttagattgaagccaaaatagcctaaattaactattgaaatggcctatttttctaggcttttgtcaaaatttggcttcaaaccaaatagacactaaacactattaaaattaccaaatattggtaagaccaatttaggctgcaaaccaaactagccctagatatgccttatccaagcaagtaacaatcatctcccaatctaaacacccatggatctggcagcaaggaagggacctcgaccaggagctcaacgagggcggccattgtccagatcatgtggtgccactgccgcctcaagtgctagcgccgtcgtattcctaacgcctaccaactcattggtcttccacatcactgtcgtccttgtcaatcttcatcaactccaatgccgttgcggcctcatcaagctctagagtttctggtcacaagtggaagagacgtccctctaactttacgtcgaagctcctctcattcctggtcaagtcccctattttagagaatcttttaccactatgttgaaagatcaataccaacgtgtcagcactgacctcttgttgatatcggcctccaactctcactctaggcaccacggcctctagctataagacattagacctctacgtcatttggcaattcatttttctaaataagttttttgcacgagccgttgttaaaatacgtcttttttttaaagggtgaaatcgtcaatatatcagacactccagacacgtttgtgacattcccaaactcctggtgaatacaacctgtccccatgtgctagcacacttgcctactaacatagagtctagcaaaaccacgatatatcaactcgtttgtagctgctacttctcctctcatgtcactattccacatgtctaaactctagaaaggggatactatgttggatggattgttgaccacctatgaggtttgctgctcattcctatttgagattgcttgtagatgcggcaaatgtacatgtagccctgtcaaatcctttgcttatccttgtttttggagtaagagttgactgtttgtataggggcaccacacgtacttgccgcagtattgaaattcactacggcactcatgttttcaatgcccatcttgaccaaatttctttttcaatctctcaggttttcaatgccatcttgacaaaagcttcttatttattcgtgtacgtcgggccgataaaaggacaaaagtacatggtttggtaaattaattttatttgttaataactgatataatttttactcatagtttgattgttgaaaaaatatattaaaaaatacttagtagttttctcgtagcaaaacacagaaaattacctaattactctcatgtttaagaactgaatcaacctggcagcagtgcagcgttgttcttgtggtggcaaacaagtaggatatcaactgtgccccagaataatcaaaggcatgctagtgcactaatgagaatggccactaataaattaatgcccactacaatgtatatgtgccatgtgccagaatgcacataccacctttcgtttttgtgtttcatgagaaagctaacatggtgctttttcagtttttttagcttgcatgtgagtcagatcagatgtagaccagacctaaaatgtcagaccatgagaactgtaaatctctttcaagaggaatcgagtcatcaaccaaaaaagaagaacaatgcaacggccaagaatgcatagaaccgcacatttttgtaagtggtggctcctccgctggcaaaagaacctaatgaaattagcccattctttcacccaaataacctacgtggaaagaaaaaatgtaaggtatgcattaagccattaagcgcggaaatttcctgtgctaatgggtaaagtacaaacacgcaataaataattttaaaaatattttatttttcgcatggaagaaattcctggcaaacattttccttttggttggcatggcataatccactcactagtcattgacaccacatgctttaattttgcgatgtctcaaccatcagccagtttcaatcctatgaaaaagggaatggggaaataaattgtagggttttttttttaatggcaacagttgtgaaattggccatcaagaacacttccattagttccgtaaggagaggctcatggacaaagagttaaatggatatctatatcaacttgaagtcactgtcctcatgtcattgtctcgagtgacactaatcttagccatataggatcctcctcttgcttcggcttctaaagcgatgttgagacttgtgagactgactagtcatcacatttttgtatgaatgaagtatatttaccatgccttttaggattccttgttaaattcatggatcagactgctatggaaggttcgggtagttcctacagtatatgatagaaagggtatggttgggagtttttctggtagttgtagctttttcccaaaatcaataactctctcaaacaatttagattttaagaaggtatagttatagaatccacgagtccacaaaatgaactagaagctaggaccagcttctcacttcctagattcctaccagctgcttctctccaaacatgcccaaagtcattcctgactatatatcagaagtgtgcaatttcaaatttgtatttttaagtagcatgcgccttattatttctagcagatataggaatagcagtaatttaaggctagtatggtttgtggcctaaactgtccttatcaacatttagcaatttatactatctatatagtttatgtccacgaacttttaaaactcaacatgcaggtgcgccacatcatcatccactagcaattattatctagattattttaaatcacatacaagtgcgtcacatcatcactcactagcaattattatctagagtattttaaatattatgatatatcatttacaattttattgtatctttagaactcaatatgcaagcagtgtgccaatgccaaatcattatctccacattatttcacattttttacaacatatacatctatcatttctataatgtataacatgcattcatcaacacatcccacggcgaaacacgtgatatcaactagtttcaatagtgtttagtgtctatatagtttgaagccaaattttgccaatcctaaaaaaataggccattccaatagttaacttaggttattttagcttcaatccaaacacaattttaccttgtcaagattagccatgctaaaacttgctaaaaattggcatcaacataagttggtaaggtcaagttaggccacaaaccaaaccagcccttacaaacatcaggatcaattgacacttcctggaaacttcatgttagttgttgtactaacatgtagcaaagtgggctatccaacatgatctagcaaagattagcactagagcaagatgcataaatatagacaaatattcagatggatagatcatggccaatcattttgtttaagacactggcatgctctgctaatggaggccctccatgcttaccggaatctcgagtggtccagagtgtttcatagctcacatttgcagcaaaagagcatgggaggcgtggcatcaagtgctgacaatataggagtgtattccagtaacaggctatcttatgatgtttgccatgctctctcatatttttattttattcccctctgtattgtcatagagaacaacctacttgccatttgtctaagaaacaagatgagtgcaataaccatgatttggttcattggcaaagacatcatgttccagggaagaaagtaagatagcataacgcaatactattcgggactgtaccttgttttaccttctactatcttgcatgtctgaaaacttttcgaagacctgactgggtcctattgttatcatgatactgcgccgttccaagtcgaaacctgaaaaggtggatatgccttttcatgattaactccagaatccagattcatgactaactgcagtcttacaatttactggacaagaatgttacatctcccaccaaaaaaatatatatattatataatcaagcgagcaacagttcggcatttttacgctattccgatgtcatgtgagcaatacctcccatccgattctctttactacttatttcttttcttaagctatattattagagctaactcacttgtcccaaattacttttcacaagttgagatatataatcagatcacagctcgatcaggcagcttatagataaaaaaagcatggcaaaatactggatgcagagcaatcacctgcatgcgttgcacaaagttcagctcccactcccctgccacatgtcctgcatcaaaagcaacagacaaattggagtgagaaaggacacatgaagccagcacatgacgaacttttggtttcagatcatacctggccttagtggaaatagcagaaatgataatgtgcatatggtatgtatggagcagcagcagctttcttaaccagaaaaatagcacacaaggaaaatattcaactcccttatgacattgatactccgtgttaaactaggctacatgagcattacaaggacccaacacaggcatgatcttacattctccaatgcatagtaccacaacactcatgtgtacattacaagtagtacattcatacaggcatggttacaaacagctacatggaatccataaacacaaactcaaaacttcagagatcatcttcagtggactttggccgttgcttgcctggttggtctgtgtacccttacctttggcctcttcttgcgcgccagcttacgctcaagcgtcttgaccttctcgctcagttccgtgataactcccatctgatcgctgccagatgcaagaaggttttgcagcatctctttcagcttctggttttcttcagcaagtttgttctcattgtcactctttgaactataaggagtcgcataatctgaagtagtttcttcagcaaccttgttctcatctttcataccatcaggagttgcagaagccaaggaagcttcttcagatgccatgttctctgtctgaacactagcatcttccttcggattatcatctcccagctcatcgcattcaacttcctttggcacctgcatgtccgcacgacgcctatcaacgcagcaactctctttctgcacatcggtttcgcattccggtggcgcatacatttcggaatcctcatgtcctgtgatgtcaccatgttcacatgataattcacttctctccgtctctggcaaaataggttcatccttcaattctctaggagcactttcatgagtatcagcttccattcccagtcccacaagagggggctcttctttcgcagaatctcctgtcagattgttagcggattcattttgcttaccaacaagtactgactcatattcaccagaaacgtcagattgctttgctgcttctggttccttcaggacattttgtcctgttgttgattgcaattttgatgttgtttgcagcaagggagactgcacataattttctgtgtctgcataggtaacatcaaccataccaatctctggtgtagcatcagattcttcggttgcatcttgtgtggtatccacattttcaacttgttgctgcatgttcacatcgctagcttcttctggctgctcggctgaattggacataatagaggatcctgaaggagcttgatcatgatcctgcagctcttcattcttcaaggatactgatgagtcccccgaatcaacaattgtagtgtttggttcttcacactgatctttttccacaggagcatgctcaactgcagcttctgtcacctgaccttcaactgggctgacctgtattcatggcatacaacattgatattttacaaattcaatactgttgtatgggtaaagttcaccatcaaagaaataagtacaagcaacttactttatcagctgacacactactttcaacagatgttgcagccatagtaatcatactgttgtcagcggcagcaggagaaatcattgaacttgatctctcactagttgtgcactgttgcagctcattggagttctctgataaagcttcatcatgtaacggttccatgtggtcccctgatggtatttcctgtcctccaacggggggtacatctttttcctattgacatgaagagtcaaattagttcatgccaaaatattgtgtgttaattaaaggactgcatttgccttgctaattagttttttactaagaaagtagattgaaatgcaacttactctttcacacgatttgtccattgaaatggcatttgattcttctatttgttgcttctgctcagtggaatgtcccaacaaagctgcatcacccatcacatccattgatggttctccttgacagtcacactgtgttgcaactttcccctattgaagatgagttacgtcagataccccacgagtaaatcaaatcaatctgttacatatcaatttgcaattaggccctccaaaggaacagatagaaattaacttactccattattaggcgcttcttccttagtagtatttgactcttctatatgatcactaggatctgcatcttgtgtcgtatacattgaaactactgatgaaactgcatcaggcatcaacagcttggagttgattgtggacaggccttgttcttcatccactcctgcagctttttcctgctggcaaatatttgttgaaattacattgtaaattagcatgttgtcatcatgtaaacagtaacaaaattaaggctccattcgaatctaccactctaactaaactactcccttgtctaccatgagcacatttcccgaaccgttaaacggtgtgttttttctaaatactttcaatatgtaagtttctttaaaaaatcaaataaatctatttatcaagcttgtaataattaatactacctccattttaggttataaaacgttttgactttggtcaaagtcaaaatgctttaagtttgattaagtttgtagaaaaaaataataacattttcaacccaagacaaatttattatgaaaatatattaaattaattatttaatgaaactaatttggtattataaatattactatatttgtttataaacttagtcaaacttaaagtagtttgactttgaccaaagtcaaaacgtcttataacctgaaacggatggagtacttaattaataatgtgctaacgacgtctcgtttcacgtgccgctgaaattatcagccaagatgcaaaaatgaacgcagcctaagttatagaatgctatgaagggagaagtgagacttactttctcagatgcttctattgctgagactggatctgtattttgaaaattattctccattgcctctggtttctctttttcaccatttgtgtgaatagactcgccagatgattgcttgcataaacaatcaagtttctcctgcagactaattagctctcgagcaacagacttcctagcctcccttacagttggatgcaagccctgtatcaacgattagcatcaccaaggtgaacaaccaaccaacatgcaattgtccataaaattgtaccacagtaatttaatcagaaacataaaatcaatctgaacagaaaaaggtggtacctgaatggtgtcaagcttcaggagtaaattcatgatagtctcattgatagccacttgctctttaacagtcagttgcttggaagaagcttcaatgccttgcaactgctccttcagatctttcatctgttcatttacattcttgatcatccggagtttctccaaaggttgccatcttcgcacattatatccccggtatgcagactgaatacaaactgctgcatctacttctgagaaattaatgctgggagttgtatcatagtcttttgcaggctcaccttgaattttcgcctcaccctctgtgtttttgtcagatccctgcaaattcttctcaccaacattttcctgagcatcaaaatttactccagtagcttgcaccttctggtcagccagactcatgggaaattgttcctcctgcatttgtttcacagaagcagcttgcacggtttcattgccatatgccctccctttattcatttcatcatgtgctttttctttagcttcagatacagttctctccttctttggatctgactgtttagcgtcctgtttttgcatatggatctctttaacatccttcttggctatatctgcatccttcctggttggtggactgggagaccttgaagaaccacttccagatttcttcctgggcaaaggatccacccgcaaacatacaggaggcaattttgaattctttgcttttgatgattcttcattgcttcttttaccattttcttcttccatctcagtgctgctggccttcttttcatctctctgcacacttgcctcaggcttcttgtcatcgctttctttcacaggcataacaggaataatcctgtaattaccaccagcgggtttgttttcttcattgtctttcctaggcatcactggaattgtcttgtaattttccctggcgggcatcttctcttcgctttctttcttgggcataagtggaatattcttcatttccctgccatcttgatgctcagtacctgcagactgcttcttcactgttgatctttcattatgatgagattcatccttcacagatggcttctgatcattgtgaccattttcaaaccatgacaagggaataatcttgatcttgggcgatggaggagcttcttcagaaacctttggactttcatccacctccttcagttcttttgcttcttgccttttctcattatatcctgctggcatccaaaatattggccactgaaattgtttagccttctgatcatcctgatcttgttgcttcacatccccaacccacttaccactcacaggaatccaaccattgtagaactgaggtggcaattccatgctttttttgttctccttatcattcatgttgccagaaggaagccatatagcctggttttggtaatttggatgtcgaactatatcagaaccgctggcatccctctgctcagtgtcgggattgacttcaggcctctcttcttcaattttaatattgctcctctcgccgccatggcaactatggtttgggcatccacagcaatggctcttgaacttgtcatagccgtatgctgtctgatcaacaggatacggcggtggacgtgcaaagtaagaagggtaggcattcgggtgttgtggaaaaggaccatggtaatacagatgaggtggtggaatttcttgaggggatggtagcctgaaactgtagtaaccaggaggatatgtgtggttgcagcagctatgaaactctggaggatgcaggtggttcatgttaggccaaggtccatagctcggcggtcgacaggacgagtccattgccatccgtggatgactaacttcccaacacccagaaggaggataatgtgcgtaaggagcgtgatttctgtaatgtgaatagtatggatccatgtactggtttgcaggatacatcactaactaatttagtatatactagtttgataaatacctagacctgccgaacaggttctagggctgatacctgaaaaaatacataagaaatatattactaccatgctgtgtagccatgaaggacctaaattcgcattatcaaaagctattagttgaaaaggatgttttactttctgaccataaataagaactagcgaaactacattcttaagcaccttctgatcagattttaaattaaaacacactatatgctatccaagctatcagtcgattattcactattctctctcgtgcggatttattggtctgtaactatcgcagtttttatgtcatttgttggtacacaatactattgtcttgtgcaagatggtttagaaaaaaatgtccctaaaattatcgagaaacatcatgcacaaaatagaaacatggaaaagcgattccacagaacaaattagcattaaactagtgtatagtaccaaattagtttcatttcacctagtactctataagaagtttatcacaaataccaagaacaatattatcagttgctcctatcatgtgtggttactggtcatgtaaacatcagtcatcagggagcattcggtctgtcaaacttcaaataattaccagagcactcccccatcacttatctacaagattctgctaccttcttccattttttttaaaaaaaaaaacaccaaaaaccaatgttctgtcacgggaatgccagaatttcagaaaaaaaaaatctgggctaatcgcagagaaatccttttgaacgcgttcgattccatcaatcacccggttttctcgtccccaaaatgcacaccgatgccaattgccatccatcgtaatcagtcacacactagtactaatcagaaacaacagatcgtttggctcatgatactacctaccaactcacgcgataaagcacaacaaccaaaattacgcaaaaaaataataataataatgcgacgcgaagcaaaaaggatcggaggggactcacagagcagagctgcccccgatgtgcggtgcggccagaagataatccgagacgaacaaccaccaccaaaaaaccttttggatctccacggggccgagtgaggtcagctaccggcgcgcgatgcggtccgcttttccctagttcgtcgtcgtcgtcgtcgttggcgagcgcgttgcttcttcttctgtatgaggaggaagacgagcggatccgccatttatgcggcgcgggcggcgggcggagggcgatcgggagatggagaggagagcgttcgcgagtgttcgcgaggaaggtgacgactcgtcgttggcgctcgttctggacgcttccaccaccgtctccctcgactcgaggaagatgaccgacctgtggggccgggccgatacctgggcctggactgcaggaatttcatggggcaggcctaacacgtttatttaatgggccggtaaataggagcttaaggttttgcataggaataagtccattttgcctccctcatctcttgcgcttggttgaatcgcatccctcaaccgcaaaaccgggtgtaatatatcccccaactcccaaaaccgttgcaaatcgacttcccgggcggtttcggaggcggtttttgtcccacgtggcatctttgaccccgttgaatggctgagtcatcaggtgggacccacatgtcagccagccggctgctggtgctgcgtggcgacagggtggccttttcctcctcgtcatcgtcgttctcgcccgacgccgaactcgagctggcggcggcgggctggcggccacgttccgcatcccgccgcagctagagtgcacgcaacaggctgggagggggctagcggcggcgttctgcatctggtcctcttcgtcgctgtcctttcccgcctccccaatcaacgccgcctggtccgcacggtggcgagcaacgatgacggcaggaaccccatgggtgtcaacacggggtcctcgatggtctagcgatcgtcgtggaggcagtgtgcggaggcgatgatgtacgtgccggagatggagaactgtgccaccttgacgctgagcgggctggcgacgtcgacggtccacgctgtgccaccttgacgcccagc

SEQ ID NO: 22492 - DNA, 12961 bp, Oryza sativa
ttttgactctggttttgtccgacaatacaatattatgaaatttttcatctcacgaaatgacaacaaaattaacataatgataatatattagttaacaagaaaaccattgcaacgcacgggcattatgctcttttacaaaatgtaccaaacttatgatattatgacattatttcttgaggcaaattcaagcatgcaattttttttgttgtttttaaatttggctgtttgaaatggcatttggctcgagatagggacgaaaacggcttggaaacggacggagactatagtttccataacttttttcggaatcggaatcggagcaggaaacctcaaatatgaaaatggtattgaatatgaaaacatagcgaaaacggtaacggatatttatcataatagaaaacccctcactgaatttttcaaactaacgaagagtgtagctcattacttttctaaaataataaatcgacatttctatattttttttatcaattttaaatataatacgactagttgtacggttcacttaccataagaaccaaagctatattcatctatacctgtaattagtatggcatggccaaataatgaaacagtaactaggcaaaagaaaaaacatctaaagtaccgtactaaaatcaaaatcttcattcaactaaccacctcaatactatgaaaaatctgaacatagagtagagaaggctaaagctaatcaactgtatatgaaaagttttcgtttccagaaagtttccaaaattgtttccggaaagtttacgatgccggtttcctacgaatagtagccttactgtatttgtttttatttccaagaaaaaaagttccgaattcatttccgttttcgaaaattttcgaaaaaaaatgtccgactgacactttccattttcgaaaacatgtccggaaaatgagaaactttccaaaccgtagctcgagagaaccaaaataatcttctaacaaatttcgagcatataattcaaaacagctacgcaaataatagaagacattgcacaaagaaggctgctccatgttcgtttactaatgtctcatccagttattttgaaacgggaagtagctttttttttttaagaaaacgggaagtagcttttagaacttaactagccactttgtcgcgcgttgcgcgactttggtggccctataaagccctgtatgtatggatcgtaatgtatgagattgtacaatgatgtctaacactcttaatgttatgttgccatttagaaagaggttacataagtgtgatcctccatgttgctttattcctcaaacagaggcactgaaggtgccattcctaggtgagtggaagtggggagtgtctcagatgttgtgaacgctgcttagaaaattgccatcactttgaaccaccaaattggcacaagatcactgttggatgcaaaaagaaaacatgttatcttataaaggaattaacatgatgagcttggtggtgaaactttagtatttaggagattgacgccacaaatgatcgagaaaggtgccatggccgagttttcatgtacaaaatgttatgttgttgaattgtttacatctaacagatggtaaagaatctagagttcactgccctgtttataaacatatgtacaatagaaaactgaaattcatgattgcctgttgttattataaattattctaaataacttgccttctatattttggacagactattaaccatggcacgtatgactctatttacctgtctagccaatcattgagcctaaaacatcctaccatattcattttatggtgttaaaatgcagctctggaagaaaaaagatcaattcaacttgtctctataccaagttgctgcttattatagaaaagtttattagtgtgttctgggaataagctgatctggtattgcaaagtgcaaacgttgttggttatagccaaaaaagaaaggcaccgagtcgatattgcgaattgtaatggcatttttctaatatgacatatttgtaatggcatgactcaaattaacccaaaaaaggaatgtatcacacaacctcaaatgtgcttctaccttaaatatgctccttcaccatacctgtgagtggtttctccaatctgtctgagtcatcacacaagcaacaattaatcatcaattcagtaagagaacaaatcaaattcaatagaacacgtaagcacacaacatggagctacacaggcaagaatacttcggctgaggaccggtacaggtaatgagctgatggaataaattcgaaatgacttctgtacaatctaattgatacacaagtgctaggcctggaccacaatattatcgctagaaatcaagtaatgaatgccagcaataagattttcagtctaaatgtggaactatgtactggcatggcatgtatttttagaatcttgatgaaatccttgatgactcacaaccttaaaagggtataaatgaataaattgtttttgttttatatgcctgagcagtacttggaccatatttcagaactttttatcagaatcaactcaagagaagaagtagaaaatgtatttaaatatgtgtattcagattttttaatggactacttcatgatgtagataattagacagtaaattaagatatatcaataatgttttttaacttgagtagagttgcttaaatactgcctgcatgcataccgttgaattctgtatctcgagagatcctttgctcatggcagtctgaagactatatataaattgaatcgtacatgacatttcaaggttaaaacaaaatagggggtgcgtttgatcaggaccttcagttaccttgtttcctaactccatgagatccaagaggcaggacttttccttaaagtatctcttaatgatttctgtgggcatgacacttgagctgatatggagtacaccatcacttatagcagacaaatcacaaaccaacctgacattgtcaaccagctgaacatttcagctatcattcccaagacaggatccagcgctaccatgaagaaaagtaagtaatggacgaagagctcgcaccgttttacctcccttgcttctgcactgacgcatcactgcctctgctgttgattgagggctccacgcggcactcgaccatgccctgtatatctcattctgcttcagcggtcgcttgccttcttcttccgattctcctcttcttgattccataggtcaagctatggtcagatcgaatcaggaatattggaggctggtggctagatggagggcccgataacctcctcctacctatgctctccctagccgcagggattaggaggaggcagcggagatcgggaggaggcgacgcagctacagtgctgttggggaggagaacagctacgaccttagcaggcggaggcagggccgctaaccggctacgaagacgaggatgagagtaggcaagcggcgccccagtctcgccggagtgcgggcgaaggtggacggggagaaggaactgaggtggcggcggcgaggggcgacgagaattggaggcggctttggcaggccggcgtccacggtaggatgtagggggcaaaatgaaaatagcgtaagtacccagggacgtggaaggactagaagtagatagaagtttcctaaaggatcaataagatatttcgccaatcaaaggatcctacggtctgtatcatccggaagcgaaatcgggcggcccgcatttattggatgacgtggcgcagtaatttgcaagaaagcttgttgctttcactattttagatcttttctgtgtttacaaagaaaacacctttcgtgtataatagccccttaacataaacctcccacaagttgtaggcccctagctcgtggctagcctcttctccttaatataagagtttagggtatggtttagggtttagggtttagggtttaatatatattgttagtatattgtaccgtaaaagttctctaatatgggcatagctcctgtttcaggaaaaatggtaggctttggatacccaactcagcatgcactaatttgtattctatagtcaaacacaccatcctgttttatatgaacacacatgatgatattgcaatgacctgtcctaaataaaatagatgtcttagttacgatatccagctcctaattaattaatttacacattatttgtagctcaaaccagaagcatatgcacatgatcggctgccacggttttatacggtttatgatattattaccactgttatagattaacaaatggtcaagtatgtcgttggcaagaagaaaggaatacatgattatttagttggttttgtctagaggtggagacggaagacagtaggtgcattggcatccctcaggagtgcacttgccagtagatattgcagcgacttgcgcgtggcagtaaggcacaacattggaaaacaggggccaggtgtgatggtgaacttgcatgagtcttttggggttctgtcatcgactaatgccttcatcgacatatctgcaagcaagtgaaataaccaaatatttatgtgaaattcacattcaacgctcatgcctttaggcaataaaaaggaatttgtctatgtaattaatttttttggggcattatgtcatgcgaatcttttaaccgtaggattcaaactgaaccatctagatctttgctgcattctcttcttatcccgttattttcttcctaggtcaaccgctagatagaatcaaggtcgttaccggacacaaggtgcgtgctatttccatcctccccactccctccaccctgcaccccaccactctgtaccctatcggtgtcacctttgtagccatcaaactacagcaccccctccctatcgccatattctccttacaaccttgtttcatcttgatatcgctgttggatccatcgcagtcaatgaccgccagcgaacctcttctttgtggatgccccctacccctggcctcttcccccaacacagctttgtcagcgcaacaatcacctctcatcgtcatcacctattggttgtcctgcatcaccctgaacaaccaaccccctcccccctttaaagtagggaactcctcccaccatccctcatcccccgctgccaacaccacccactccctccttcaccctaaccccttaccttgaccacttgtgaggttgtcaaagtttatgggagcctgttggaagattaatccggatctaggtagtgcaggtatcatagagcaaatcgcaaggtaaaaaaaaaatcatgattttgaccccaaatttttgccaaatgtaatatagcaaatccgtaaagaaaaaagactatctccacccatgtagatttgtcatcctagttatggaatacaatagatgaacaatagggaagtttacatgaatagtgtgctacgagggaaagggctagtagcaacatgtagaatagcttcatcatcctatgcacagaatgtgatgaggtgttgacggcgagtgagctagcgattgcaatccggcgatgatggggtactgttgggctaatcgcggttgtgaaggtgattgctatctaatcgattcggcgtgtcttttgtagcttatctttttattattatggaaacatactacacagtttcttaataatttggaatagctgtgattgcaaattataaaagtttgttctttatgttgtaattaatatcttacatatataggctaatcatggttgtgaaggtgattgctatttaacttctatagctgatttattattattattattattattattattattattattattattattattattattattattattattattttggtagcataatttggaaaaagttatggttgcgaatgataaaaggccataaattatggcataataaacatcttctatataagctatggtatttaatcgattcagcatcgattgtcatggcctttaaagtgatattcttttatgttggaaatcgtactgcacagtttcttaataatttagaaaacttatcattgcaaataataaaaaggttgtcctttgtactcttgtttttaaagacaaacttagataacagtctcacagtttatcaatgttgtttgatagcctttgatgcgcttgcatgggctgcagcatatagcaacaggccaagcaatagtgcgctataccttgcattggctacggctacacagtcgaagcaatgccatagaaatgtgactactgaacatgtcaatgttcattgttgatagaactgggagtacggaagatagtctctttaagatggctaggtcaaaatataagcaaaggaggactcaacaagatttgaaaaaaaaaacaacaatcaggtcctcctctgtcttatgcccacattggtggtgactggtgacatacttgatggcagtgggtgctacatggacacggcgagctacagaagatgttgccttgacgcattcccaaatagggtttcacaacaatagaggttaaggccatgacaattcatgaaaaggttcatcaataccatagatgagtacatccagagctaaatgagattgttcttggagcagaaccatcaaggtcgacaacctaatcgttgatattggtgatagagacaaagatttcatggcaagttgcataaaaaagcaccaagaagcttaccttattagggcctccatagcctaaggttgaggaatccaagcatatagcaaacaaaactcaactgcttcttgaaggtttgccaccaataaagaggaagaaaactatcatccttgcgaaaagcctgctggagaaaagaaagataacttgcctaacttcccttaactaggtctagctttctcctaactcacggtgatagagaattacccggtgttttagagggataccactagagaagaaacttcgattgccttctccatgaaacctaggactagaaggccaacatcgccgaccttcacgctcaaactaaaagaaaaacccaactaaattgattgacctacaaagagagagtttgtcggacttctctccctcacctcgccggcggcaaggtcacccgagcctgtgaggaagaggggtcgaggaggcgtagtagttcagtttggctctttcgtccgagagttcacgagagttctcatcactcgtgttaattcgcatattctttatggtctaatcaacacattcgatccaactcttttataatctttaactgattaaatcaaacgattctaaactttagaaaggagaaacaaaatgagtacgtgcagtatcgctaaaaaactagtagggcatagtttcatgtttttcatgggtatctaatctgagccgttgatctccaatcgaacggctcagggtaacctccctatccacaatattatccctcttctttctttccgatacgatagcccacactctcatccacactgctcttcccccccgcgcgccggccatggccaccgcgacgctgcccctccgcctcctcgcctccaaaaccctagccttcccctccgccccgtccctcccggcctcgcgatgctccctccccgtcgccgcgtccgcgccccgccgctgctggcggctcctcgcttccgccgaggagccggcgcccgcacccgtggaggccgaggccgaggcggaggtggtagaggaggaggaggttgaagaagaggaggctgcggtgccggagcctgtggaggcgcagatcgcagccgcgggcgccgggaaggacgccgacatcttcgccgttgtcatggtggggctagcttgcccttgccgccaatatttcagatttagtcctgctcggctcactgcaaacaaacaaaaaaagaatcacatttgttcatgctacattacctcgaattctttaaataatatcattacacaggcatttggcgctagttgcgttgcttcttgcggtgaagtgagcatttgatttcaggcttgtgttgcttactctatgctgcataagaagcttaggattcacgcgccaataggaatgcgcgcacgccgattattagtatgtacaggacacaccattaagaaaacggcgcagagaattacagtgttttcgaatgatacaatactagtcttacagagaattgttcggatgcatttctgaaatatgcaggagtgcatctgaggagggtttctctgtgttttgttttgtatgagcgctgtgaataataacgagggagctattttgattatttttcttctgtcgcagattgggtcgagacagtacattgtgatgcctggaaggtatatatacacgcagaggctgaaaggcgccaatgtcaatgatcaggtctggtgcttccactttagaggatgcaggaggatacttgttacaccctaactagaaatttggcctatttttgctagttagttggtttgtattaatccataaatttaaaaggtatatgatgctgaggtggcttctagataaggtgattgtaaattaggaaaaggcaaatatatagtattggttatttggttattattctttttcatccatgagatgcaataacaaacttcaaaacaacgaggaaggttgtacattctgaaattatggaaagtggtagtgacctacttcattttagaagtaaaagagtcacttccctgtaattataacacttcaatcccagttcctgatttcacataaatatcttattcagaacttttcgataagttttgtgtagcctgcatatattagcttcgttccttttctaactaaaattactcctctgatgcaaagcttccaatcccataggacccatacgttggcttatgttgctggcatttttagtattgttttcccagaaattctcacttctggataatgctgatgtgcagataatattaaacaaggtattactggtatcaactagagacaaggcttacattggcatgccagtggtgaccaatgctgctgttcatgcagtggttgaggaacaggtatgtcctctgtatgttgtcgggttaatcatggatattcaaaattacttgaccctgatgtctccccaatatttttatatcagggacgggatgataaagtgatagtcttcaaatataagaagaagaagaagtaccagaggaaacttggtcacagacaggtaagtttttccaattaccttcttcaagaaaggtagaattttattgataaatactgattcagtttttacagcgaagcaattagagttcttttagattaaaaatctctgttgttttgcagccaaacacaaggttaagaattaccggcataagtggatacgaggacttccctgctgacccgatacttgagtatgttccagcttaagagcaattgtaagttctgtagttacaaacaactggtagtacattagaatacgagtgctaccttttcttgtctggaagaacagtttttgaacaaaatttgctttgttcatgtgttcgagtgctgccagtcatccagttgttccatcctttgtttattccaccatctgttttgttcattctgatattgtgtatcctagccaactgtattattttcactgtgcttaaaaaaagagagagcattttaccacgatacggatgttttagctttggtttgtgtaactttatacagtttttgtgactactgatgctaatttcactgtttttggcatctgtaccaatggtgcttagtttattgaacgggctatgtcctaatattttgggatcagttacagtactatgttcaatgcagttctggtcatgatttattcgagtgttctaagagaagttctgcaaggccatatataaggtgtttgtgtgcaaccttgtactgcttagggcacataagcagctggttaggacttaggccatataagcatctacaaggcaggtggctgcatggattctgcttaccactttttagaaccttggttcatgaagaactgcagaagttttgcccttttgaatccttaccaaagataaccagtggcataaggcgtataatcttttggcaaactatgactgtttcagtagtccttcacccctaattgcatattacagttctgaattatagtggttttcagacatcttttgcctaattgaaacccttgttgaagtaaaaatttgaccactgtaaaggttcataaactaaatataatcacactaatttgttatatgctagccaattttcttgatatataagacttgttaattgtcaacatggttgtatgatgctatagtagattgttgaacaacggaaaaaaggtcgtctcttcgcggtgcttccaggtgtaaggaagtatcaaattcaggtgcaaggcatgggtgttaaggcaaggtaaggtgaccccagcacgccttatgccttaaggcgtcgcttcgccttacgcagatagaaaaataggaaatgaagggctttttcattatatttatggagtccaatcactaaatggaagccatatatctattgatccatccccatccccaatcccatcggtgcccgtttctcaaccacctactcgcctctgctccaccgccgccgacggtgagtgagagtgagacccttgcttgggccgctacctccgtccctcttcccctgctgccgggcggtgctggctgtcaagggaggtggttctggctttgtcggtggtcaaggacgacggtgatggtgatgtaggccactcccccttcctctgctgccactgctttatccccttgtttttccctttatcctctagttttttcctgtaaggttgcttgattccttggcaactgtttctataattatgattttatgatcatttgatgcatgatcaaaaatgctggaattgcaccattagcaaaaggtgctttcttttttattccccaagaaacagaaatactggcaacattgataccatagcgtctagtacaacatcagcatccactgctcgctgctacgtcacaagttccatatgttaatccactggctccatacatgtattttactagagagctagctggagaagatatgaaattacttcacggtcaattgctggtcttgcagggcattatcatcatcattagtttttatcttttacaaagtcctgcagattcagtacgctgtcaatttattttttgcccgagctgctgtggcaaagtgcaggtgatgacggcagctcaattggccatacatcgtttggcgtcaaaccaatgcaagtgttgaatcatttccaacatgcaggtaatctttaaagatctgtgacagcaacagaaaactgctaggattttatcagcttgtttggacccttgtagcatcataccatgtgctgttaaacccggtcaaactatgcagcctaattcctcaatacttcagtaactactgctccctccacgttttgattttgttcaaagtcaaactacttaaagtttggctgactctataaaaaaatattaatatttacaacaccagcatagtttcattaaatctataattgaataaattttcataatatattagttttgggttaaaaatattctactttttttttataaaattagtcaaatttagagtagtttgacttggactaaagtcaaaacgtcttataacataaaacgaaggaaataagttattagcctgggatgagtgtatcccgtagttgctaggtatatatgctaatataaaaaaatgaagttaatttgagtaggtatgtcaacttaggaatcatcccaaatactccctctattccaaaatatgaacctaggatcgaatgggatattgtttagattcatagtgttagagcagtttatccagattcatagtaagtattaggaaatgtcttatctgattttaggtttttatattttcggacggaagaagtacatagataagtacagtgatggatccataaaattggcatgctgatcatactcaaaccgtgtgatatcttctatgtatatataaacagtctagtgatgtgcacatttattccttccgtcctataattttacttacactttgaccactcgtcttattaaaaaaatttgtgcaaatataaaaaacgaaaaattgtgcttaaaatactttggataataaagtaagtaaaaaaataaataataattccaaaattttttgaataaaacgtgtggtcaaacagtgcaaataaaaactcaaaatcctttgtattatgggacggagggagtaccatagatccgaaataagccaaataacacgatggacagaagtttggatgaagtaaaaagaaaagaaaaagatttattggcagcatgccttacatagatatgttggaggggactacggatcggtcgcccgatccaaatgtgcaaaaatcggcgccacgcatgtgtgcaaaactactttaaaatagattttctcttaaattatttatccaaatcatgatccgattgcacaattaaatttgttgtaattaaatcttcaaaacaagaccacacatgtttatattttgacggaatttttttaccctattattgaattatttttaaatattgcacgatgttccaccaagtatattagaattgtttcactaagtagatcgaaaatgtttcaatcgtttaaatcggatgttatttcaccttatgtaaaaacaatgtttcagtaaatagcggaagcatgtttcagttcactgcaacattagatctatacatagtgaaacattgtgagtacactaggtgaaacatttttggtggaaaaaaaatgaaacgaaatcccttagagggcttccaaaatatgtgggttatttattgcaatggagttttgtgtgtggacaagtggcaggtgggggcagggggcacgtgggtgggcctaggggcgcgcgcgtcttggagggagggagcgcccgatttcggctccctcccctgagcgctcgatggcgagcattttcgagatatggtaaaacagtttttgagaagaatttgaaaatgaaaatacactttcacactactagaaaaagtattttcgcaggcggacaaaagtgatttttgcaggcggagggtcggaccgcttgtagcacaacgacagtgaaaa

SEQ ID NO: 22493 - DNA, 7857 bp, Oryza sativa
  unsure (1)..(7857): unsure at all n locations
gtcactccccttccggtgattgggaaagaagaaggggtaaggggaggaaagaaggcgttaggggaaagaagaaggcgtgaggtgtgaaaagggaaaaggccgcccgtgggtggagacttagaaaaaatcaacctctaccaagtttatttatatttaagtctattttcgtaggcggaccgaccatttcaccctaatttatatttttgtaggcggtcatttggctttaagagtcnnnnnnnnnnnnnnnnnnnnnnnnnnnnnnttgagaaaaatactttttctagtagtgtcagatacaccacagagcctttttctctctcttggcaacgaacgtatgacaccaaaatagcacaagattaagctgtgtgagcatgggtttttccccctaacttgggtagagatggagatggagataaactgaccaatataactatagatctttgcgatagatgcagccagtgatgcaccgtgagtagattccacgtagagcaggaaaacgacgctcagtttgggatctcgaggtgtatattctatcctgcctccgacatgaatctttgctttcttgtcccttgttttctgcatcttgcttatgctaattactcaattggccctgtttggatccaagggctattttttagccctccctcaaatagcctaaatagccccaaaagatccaaaagggtgagctatttgagggctatttggaaatagcccacccaaaaaaactatcccatctaagcggtactaattggagctatttcgggtgggactcactaaaaaggtgtcttttctctctcccacaggcgcacgggatcctcctcccctccccatccggtcgcgcgcgctcgcccccaatattcgccgccgccgtccccacgattcataggtcaccggcggcgccgcccccacaaatcgccggcactgcggccgtcacccgtgtcgccgcctcctcctcctcttcttccctcgttggcccggtcgaaacggcggtgagccggcgccggtgaaggcggggtagcatccggcgcgagtctgcgctgacctgggtgaccgactatgagacgagtgattttctcccccaccaagaaccgaatcgacgaactcgaagcagagaaagagagacagaagacagtagatggctcgtcgactcaatctaatcttgccgctctctaggctcacagtttcttgatttccccaaaccttccattcttttttcgtttctaaagtttgttgttgttcttcttgttgatttcttcctctgcgaattgaattccacactgttgaagcacaagtcgatttgttgtcataaaattttctctttttttgtttgttcgtttgctgcgttatcacctctccttggctcttttttttgcttaaatctgatgcccgcggaggaggagctcctgcaccggcaggtgctggccatggccatccaccagcacctcgacaccggcggctccatgtcctgccgcatcagccacaccaaggacacaagtgcacaagatccagtggaaagagagagttgagtggtagtttgattggaaaagtgccaaataacccttggatccaaacagctcaagggctattttattggagagctattccttatgctaaaaaatagctcttaaaataaccctcggttacttctccaaataaggccaatgttgatttgataattattccatttgttccctggtcgatcgggcaagtgcgacaattaattgatcggttttttccttggtactgactggaacttttaattgaacactacagttttattttattacaaaactggaccaggcaaatcatctatagccaggtcccaggttgtttgacaaattcagggatctgatttggcatacctggcagccccggacttcaattagcccagctggccagctccatgatgcatgagtcactagggtaatgtggagtaatccctccatgcacccacgaccactattgatttcctttgtttttgctttggtagcttctttgaaacgcatgattaaaaaaaaagaaaaacacattattttgatacaaatgtcagcgcaaaagagagaattacaaaacacaaaaacataggagtgatcatttgattaggccgtccgcaggaattggatgagaaagacatactcgaaggaaaattttaaagaggttggagctcttgctttcattcaaaatatctacaggattatctattccataggattttcaatggaaaaggatataattcaatcatttatgtaaaagtccttcatatgaatctttaatatataattggaatatttgtttttcctggaccttatcgttcaagttaagattttgtcgaacttttaaaattttaaaaacaagtgtattgttccatacattttgctatcttctttatgctaattggatgatctcctataaattgcagcgttaattttaggaggccaagaaatttagaaatgactccattactcagacaaaaggttagaagttccaatgttaagaaaaaaaaatgtcactcaaccatctatcacattgtacgtcgttgatagtaattatgaataatttaatatatctcatttgtatatccattatcaaaatgggaaaaaaaatataaccttgaactttaattcgtgggtaattttattatcctttagaaaatcctaagtggtatcatagggcctgttcggcgtgcctagatggcagccagcagctacagtaacaacgtacaatttctacgtagttgctgctgctgcagcagcagcgctgcacagccgctgcagttgggcagccgaacacacccatatttactagtgtaatatttaatacctgaaggtatcagataccttatgataccgtaaaggttctcttgactctaagtctaaaaacaatcttggacttgtcaactatataatgttgaatcataactatcaaagccgatcaagcttaaaaagatatcagtttaaaagttctggaacacaagattctaatcgcacgaatagaaaaaagaagcaggattggaatatcgtgccatgttgaaccctgtggaaaataaaatcataggattgctcaaaacatgtgtttggatggctcaccggaaaaatataagaattttgagattatgtagtggtacttagattgagtaagagaagagagatgttgctttgaaattctcatagaaaatgtttaaaatcatttggaattgggccatatgaatgaatttcaaaggaattttgtgagcccaaatcaaacaacctttttaggaaaaaaaaactaaggattcaaatccttcacatttcctttgaaaatcgaagccctcaacgttgttttctagacttggttgaatccaaccttgtggttgtaggatgaggctttctttggtagaactcgatccaactcctaaatttaattttaggagtttggtttggagtggagttgttgagcggtctaaacatagctctacctctctagtttattttgtgaggacacttcaaccagctctacttttattttaggtggagctgaaactgtttggctaagctcctactccagaagcggtgaagttagagttgaagtcgtgccaaatagatcctaagtaaactttgtccaacagtacatgaatacaaaaaaagcataaactatcaagaatcaaccaaggccctgtttggttccatgggctaacgtttagccctcaccttttagcctcaaattagccctcaaggacccaaacaggtgggctaattttgggctaatatgaattagcccccctcaaaacattagcccctctaaggggtgctaatggggctaattttgtgtggggaccatcaaaagtcagctctctctctcctctcccctctctttctactatctctccaccttttagccttgaattagcccatggatccaaacatgccaccctaggctaatgtttagcctaccaattcataactaaacattagctctcaaaattagccccgggctaatcttctaaacagggcccctgcccgtagcaacggtcagtggcaacgtctaggtgcaatgaaccggccaccactcgatccccacaggtgcaggcatttgtcactacgcactaattcttccaagcattttccatgctgtgtccatacgattaaaagcaacctagcttagcttctggaaaacacgtagccactgagatcagaaaggatcaaaagagcactttgttttttccttcttttttttttctttttagatgaaccaagagtactttcttacctctccttgatcgatcggcgaattagtagagaaagtgtccaaaaaaaatatttagtaactcatgcacataagtgcgatcttatgtggactagtcgagacctcacaattggaaactattattttccagaacacgcaaaagattttgttacattattccattacaaaagcacgttacaagccgttcatgcatgcttaattggtgtcaaccttataaggccagagtttgttgtcaacgtcacctcccaattatactttattaattctcatcatgttaatgtcatgtcctcggttatctttgaaaagtgtgaggaaagttacgtacttcctcagtttcatattataagattttctaacattattcatatttatatatatgttaataaatctagacgtatatgtatgcctagattcattaacatctatatgaatgtggacaatgctggaaagtcttataacctggaacggagggagtaaaagaacacacaaaaaaaacccaacgaggacattaaaatacgctccggtgttgttgaacaagcaatcgattccaacaatgacaaagaaaaggatttagcggtgttttattgtgtctgaaagaaacgatacttttctatagcatgcaagcacagtaaaacatatcaataacttataattatattataattaaccaaagagtattgaacattgtattgtttttgtttacgtaatatttagtggcacttctgttagtaacaaattaaggccttatgtgcatttgaaaaaagtaaaaaagaaaaatctcgaatgaaaggatgaaggaaataattgtttgccgctggcaggtgagcaggagctttgacctcctccatggttttaaatttttgtgctgaattcactatagcttcagcaaaatttaagtgtatctgacttatgactgatcgttgtgattgatgttaattcctcatgctccaaataaaactatctagggcatgtgcgtgcctttcgccctccgaagctccaacactactgcacattattttcctgccctcaaaattcatataacaatttaacaatcagatcttatttgtcatgcctccatatcccagatccttgctgaattttataagttaaattatagtattctgaaattttgtattttctattaaatattaataaaatgattcacctctgtaaggtttaacagttagaaatatccaattaaaaaatttggtccggacctgtgccaaactgaggtttagttttttctctacaagtgaacaaccaaacataggcaaataaatttcataaaatcctatagtttaaccagtagtatacctctcgcaaaatttactcatcatgaaacaattcaaatatgtttggtgataacccacatcctcctcccgtgtcacctctctcggcgacccacgaggcgaaacccgcccaccccctccaacctcccaagcacgaccactggccttgctgccgccgcctacggtggtggtcggcagtagcggcagcgcacccctcctccctcctttttcttccctctctcttcctttctccttcttcctttctctctttttcccttccacccttttcttcttcctttctctctttttcccttccacccttttcctctagatttgaggtgactgtcgtggcccttcctgcagtcagcctaagcctcttttcctttcctcttcttccttctctccattttccccttccgttttctccaaatctggggattcaccggtcatctcctccggtgctggcggcctgcctccccgcatctggcgttggctcttccatcccgggttggtggcggcgttgtggcatcggccagtggtggtggtgcaagggggacggctagatctggctcctcttggtctagatacggggcatcctcagttgatgaaccctaagttcctctcgacactcaaggctgttgttggcccgatctttcggtgagttgtaggtaactacgatttgagagaaacgttggtgatccgactacaaccgtacaagacgttgtgttgcgccttagcgatcgatacacctctccgtgggttgttgatcttgccggtgcagatcaaccttattcctgcaagcaaatcgaagaaacaagcaagaacaagatagaagcaatctgaattgcaaataggaatgaatacacaagataagttggggttccgaagaacaagcagatggacggtctagccgacacgcgcgctgcaaggaagtagcaatggctaaactttcatctaaacaaaacccaagaaactctaaaggggtacctaactatttaaggaggtgggaggacgacctaaggggaccctagggtcgtgctccacctggttggggcgcaccccacatgggccccacttgggccggggttccagacgaagttacaagcccataggcccattataggtgacgcagcaccttctttttgtgatttcggccgactgggatggaatttggcgatgaagctggatccattggaaagatgactctgagagctttccatcaagtactcatggacctaaaatggagctcgcatgcatatttggtggccgtttgaagtcgacactgtagcaggtggccgaactagattgcagaacttggacggcttgatcttgatgtggacgacggttgtatctatagtagccatggtcacatcatcagtcggtgttgagtgtggctgggcccgacgtcgaggttactcaatgaagcttgggcagcctgtgtggtcgtcggatggcgccgtcagtcttgctccgccgctcggtggagtccggtcattgtgcagatggtgtgaatagtgcaagtaccttcggtgtgcaggtggcatttggtggcttccgctgtggttgctatggttgaaggggactccgaggtgaaagccttgctcggcttgccggtgctagcaacggcaacaccctcgggtgtcgttcacattcttgaaggcattgctattggagttctcattcaactccacatcaagggaattcagcaggtgaaaactttagattcttttggattggacgatgtcgccctgttcttagtttcagtatgccaatgtcaaggttttcatcggttttttgtaaattaaccgtgtcgttctagatttctgggtccggtttttcttataaagtgaatcaacttttacactgaaattgtaggaactccatacatgttccctcgaaaaagaaacaattcaaatatgtttgtagctaatctgaggtgaggttagacctaacaaccggatcgaatatcccgtgacccttttggaatcgttcgtgcatgagaattaaggtcaatcaagtaaatataaaaggtaggtatcttcatgttaattaagcgtcaacttaagacgaaagctagtcatccacggcactaattcattacgattatgtaaacatcgctgtgtcatcttcttcttcgatcgaaaagtgtaagctatatttatatttgtaaaatcatgtacaccaagcaaggactgaaaagaaaaagatgcgatttctcatagatgaatatagccgcgagcacaagacactatacttttgtgctttcttttattaaaaaatggatcgcaatgtcaaattgtcaatgatcttttacaagtgatactcg

SEQ ID NO: 22494 - DNA, 37660 bp, Oryza sativa
ggcgtcgtcgtcgtttctgccgccgggctacaggccaggcgatttcttcttcttttcccccgcaatttccttcttcctctttttttttttccgcgcgaattcattgtttttcctgtcgcggtggcgcgcgcttccccctctatttaaccgcgagggaggccgcgaattaagccttccgactccggtcccgtgctccgaaggtggggtgcaaggtttgtgcccctgcgtgctctcgctgatgtttctagtgcaaattcgttggggcctggctaggttgcttttttagtgaattcgttatggtatttgctgaatcttcatcgtgttctggggagagtttctttggagaagagactagttgcgattgattctccatgttgacagatgcgcggcgagacgaattggaacgctttcttcttttagatggtggtgggcgtgcttagaaatttgtttgttgttagtgagttcggtttttgtttgcgttgacagtatcttctgttctagttggtggactgttctgattttgtttggggaaaaaaaggagatctttgtgcgggtttgagccttggtttggaggagcatggatccagctgttgaaatactatacgcagattttgcggttttatgagcaaaaagtcggaatagtctctgaattcattatagtagtgaactcatattcttggatcagttttgaactgatgtgctgtgcaaaagtatgatactgtttttaccttgattactttcttctctggagagaactttacagcgttgaggttgagataccgtcctggttactctccttttcttttttttttctttttggatataagaagattctggtgtttgaaggaatggtagactcttagatttgctatatcacttacagttgttttcattaaatcttcaaatcatcctccctctttctcagaactttgaaagtgatcagggcattgattgagcatacataattcaactattagagagttttagagcagattgatggtctagctccttgtttttgaaagatgcacaaagatgttttagtaattgtacattttctacatttgagggtattatctggataataatgaaaccaaattcaaattgcaacaatgatagaaatgaattttgaattatggtatctatgcagtataatattgcagccctattgatcctttgatggcatatttgctactttttatcctcttgaatttgttaggacctgctaatattccccttcctcgtataaagctgtaagctttggtatgcatgattggaattttaagcacacatttctgtagcagaatatatgctctatcactgtcttcttgaaagttttgcttcttttttatttgagctgtgccaaatctctttgtttttttggaatataggagtgttggatactaaaatttagctactccccccccccccccccaaattgtagtgatagaatcatagccgttacagatgactagcagtgttctaagagtgtcttttaggtatataaaagtgacagattcccctacttgttgccatgctattgctagttaggccacattactgggtgggtttcaccgaataattacagctgtggtgaccatatgggtgattggataaatgttggttatctatattagaacttgattactagtatttacttatttggttgctcacatagtcacaatccatgttgatcagtctctaatattgacttctattttcagtttgctgagcacagttgctgaattttagggttatctgcttcaagcataagtgggccattgcttctggcttttactggtaataaacataggcttcaacttcaagttactctatcttaaggaattaatagttcatatataagtgcattatcgagcttgaattggcctgttatcattgccgtaacaaaggatcagggtattttttttgtttgtagctatttcacttcaattgatgaaattttactttagatttgttgatgcaaccagacttcctatattttgttaatacacttgctatacagtaagtttgaatcctgtttttatcatctgaattttagacaaaattttggagtactctcttttttaagagtacaacgaaaagccacacaaacatatgcccctcaaatgcatgagaggcatgtagagatcctgctatcatatgaacttttgtatcttctcttcatgtgtgtagcagcatataacatcctaattttctttatatgtgtttgttgtcctcttttttttttgtgtgtatgagttgtattatcatgatcattgatcatatctttgtccttttgttatctgcagaacgtaactcacttggccaaatgaaatccatggtagttggttattctgaagcatagaattgttactgctttgtgaacgaataacatctatctatctagagcactggaagatggatcatagagatacttctgggtttgtcagtggaggttgcaaagaatcaacgaactgcatcaccctaggatttctaactttttagctttgttaaccattatttaatctggaagtgaggttatctggtacttggcaaaaaaattggctgtgttttgtctcctgagaaattctctagcaatggaccccagacttgggcggtcagcgtttataaatttctcaaatccaaatgcctatgtgggcaagttccctgtcatctccacagtcagccatcctacagcttctagtcaaattgatgtgctagctcattgcagttcatacaacctgcctagagggaccaagagaaagtttgatggcttgtcactagggctgggcaactcatcaagctcagaatctagcaagcaaagcatgggtactggctgcaccatatcttctgctaagggtagtgatgatggttcttctattgatttggatttgaatcattttactctgggcaatgaaggtacttccaggcttgataagcgggcctgtgattctaggagggctttggataagcctgaattgaatcttgagctgtctttgtcatcccagtctgctattactggtgcagacttcactgcagcgactgaatataatagcccaagtctgcagccatactatatggacttagtgccaacagttgatgaaggatctacatctgctcgccgaccatctggttgtcaggtactgtctttccttaataagactgcaaagatgagtgaattttctccaagggaggttttcccaggtagctctaaccagagtcaaggtccggctccaatgccaacattgcttcaactgccaaaaagtccagtagcctgtacttccggtttatctcgtccacaacagcgcagcagtagcacaaaaaactgtacatacccaggatgtatgaaaggagccagaggttcttcagggcgttgcattgctcatggtgggggtagaaggtgccaaaaagatggttgtgacaagggggctgagggcaagacaatattttgtaaggcccatggtgggggaaggcgctgcgaacaccttggatgcaccaagagtgctgaaggtcgtactgacttctgcatagctcacggtggtggccgtcgttgtagccatgaagaatgcaaaagagcagcaagagggaaatctggtcgctgtattaaacatggtggtggcaaaaggtgtcaacatgcaggctgtacaaagagtgcagaagggcgctcaggcttgtgcattgctcatggaggtgggcgccgctgtcagcaagatggttgcggaaaaggagctcagggaagtaccaacttttgcaaggcgcatggtggtgggaagagatgcacacaccctgattgtaaaaagggtgccgagggaagtacagcgttttgcaagggacatggaggaggcaaacgttgttcagctgaaggttgtactaagagtgtgcatggcggaaccctttgctgtgttgcccatggaggtgggaagaggtgtgtggtagaaggatgcacaaagagtgcaagaggccgtactgaccgctgtgttggccatggcgggggcaagagatgccaatcttctggatgtgataagagtgcacagggaagcactaacttttgcaaggcacatggaggcggcaagcgttgcttgtggggtcacgaaggatctgaccatggagctggtgacactccttgtgagcgccttgcaagaggcaagaatggcctgtgtgtttatcacaatccgcaggtggatgaaaatcgtgtccatgggggtttcagcgttgtcagcgatgcactttctcagggagatcgaccttcaaacactgaaacaagcaggtgcagcattttctcgcatcctatggaggctcctcgtcgtgtggcagctccagctgacgagggtcgggtgcatggtggcaacatcctgtcaatgtttgcaaatggcatgagtttggggaagcatcccgccaaccaagcagaggctagcacctctgcacctcgcaactcgaaatccaccaatggcatggtgaccggtaactctgcggtgcggggcagctggctgtagagccttgaaccgccttctgctctctccatttcagtaagcatatgcttcgaaccatctgacaagtgccttctcttcttaatccttcgggtgtgaaaactatggtgtgattgtgtgaactgttgtgtcctgatttgtttagcagtgttgtgaacttgtgatatattattaatcgtttgtgctttgtaaaatgtaataatcacctgtgtgagataaataaaagggggaaggttacacattagatgctgaatttcaggtcttgtactgaaggtctgctgtcacctccaaaatttgtcctgtgatagtcatgttctaataaatctatgtgactgacatgtttgaaattatcatgctcttgctgctgcggtacacgacagttgttgcgtccccacttcattttctgatcttaatgaaacaaaatctcagaacctaaaagatatttcctgcatagtcagactatttggagatcaggatactcatgttatgtatgctctggcctgagcaggcttttgagaattcagatgcacatcaggatcggccaggcaccttagatgcagatgcagcacatctctgcttccatagcagtagatcagtttcctctcactgcaaacaaacatgccaggaccccccacaaacagcaggacaatgcagtgccaagaaaacagatgattcagcaacagtgatgacaataagattttaggcatatctagctaaaagatagtactatttcctgcatattcagactattgctaaaagatactaataatactattgttctgccaataatgcctccgaatgatttgcctgtcaattatgcggttgctgaaacctgttgttcttctgatctcaaacacctgacctagccatcataagattgaattcgaccgctttgataagtgtcatcaaatactacaagaaacaattatggttattattaactctgcaacacgctgctggctcgccacatctgcatgagccagccaccaactgtgtgatgatgcattatgctgtcttcgtcagtgcgacatggctgtccgttcaatgaaacaaacaacaaatcgatttggcatctgaacaatttagagccacacgtttcatgcaactttctccccctttttttttgcagtgtactgtttggggagaatctgttagtgatatgtcctagaggcaatcatagagatgattgtatcacatactatgtttacatatttatccgatattgttcttgaaatagataactccttattagttaatgaatatgtgatactttcatgagactctttatgttgtttgttactatttctaaaggatccctgatcaaatatcatatgtggaacaaatatatttatataatcagcacatgtattaattgatgatcatgtctcatggatcatggtatagagataccaaattaataatgtggacacatgttgttggatagacccaacatgagacactgcaagagccatatgtgttgtgtcatcagtgatctcattaagtgttggtgttgaatccttagacctgagattgctaaacgctactccgtaattgggtagttataaaagtagttttcgggtatgctatgaaacatgtagtggaatatgaataatcaagatgggatttgcccctcctatggagagatatctctaggcccctcgatgttgtagattatggaagtgcatggccatgccaaaggtgattgaggagtcaatcacaagttatataatctatcaacaggttcgagtgaatgattgagctattagaggatggcacatatctatccttgagcttaatcgatatagtgaggcaaaggggttcatacaagtatacactagaggttcagccgatatgatctttatgtatgtccggtgggtcaatacgttctgctaggggccgctgttgacgcgtggaccgaaaaggagttttcgggttacagccgagtatatatgaacctatagggtcgcacgcttaatgggccggaataagggaattggatagagatccaatatgagcttaattcggataaggatccgaataggagtcctacgggccttggaggcccgagtgatggatcctatatattcgtgaggggtgtgaccggcggaggtattgcatcacgtgagaaaccctagccgttacttccctccccgagcaaaaccctagccgcgcgcgggtgctagcacatctgcgcgtggcgttccgtctctgtacgtgtggataccggtagaggcgccgctggtttgcggtgctgatcggtgcgagagtacggcgaggagaacgcacgaggaggagaaggtcgagccggtgcgatcgacgcgcgctacttcgcgagagttccttcgacttctcaacgtctttttccgctgcacagcgcgtcgagtggtagtgatctatgatctaatacttgcatggttcccggtttacgcgatagaaaattttgatttatgctatcatagcctacgcgtatcccaacagaaatgttacagcagcatggattcatgcagcatgaatttctgtcaaaaattgatcggcagggagtaaatttctcgaacagcttttgtaccaacttgaagaaaacactactacagtagtagaacaccacaaaactactatagatgctggaaatgctagaaccggcacctataacgtttttcctgtcctcctaaactctcagaggagtcaaaaataaaaatcggcacctataccggtttataaaaaaaccaacacatataatgtaagcgctggttttttaaaagacgacacaaataaaaatactatgagtgttgggttttttatttacccgctccaaatttagagccccacaagcacgcaaaaaaatcagcatggagaaaaaaaaaatcatgtttgacccatgccgtgctaccctgcccattaatctctatcccttatctcctcgttcgccccacccccgccatccctctcttccacgtctctctcgattcctccatctccctcctttccatcgcggcgagaaggaagcgacccacctctcctagccaacccaacgatagcggcgacgaacaagctgtccggtctgactcctgccgcagttgaccatggcctcggctctctttgctagatttgtcggcgacagttgtatatacgccagatcccaattcggtgtgcatcctggtgtacctatatggattgcacatggaagtcttgaaaaatgctggccaactaaaattgatcaaacatagtatatttgacttaggataaaactaaaacaacagaaatatttaatttatgataaaactaaaacgataagaaaaattgaaagcacatttctatcgtttcgcatatgtttatttgtactgcttattagcaataataataataataataataataataataataataataataataataataataataatttgtgaataaaacttttttttccaaataagtttattttttattatctcttttggctcatcttttaccgatcccacacataccaataataaaaaaaagaacactaaaacactctcactttatcgtatcttaatataattattgtctactttatctacttctgacgtatattttttatctacttccacaagctcttctaatgtaatgattatagacaaaataaacttatttgggacaaacgggtgaagagaaaaaaaatgaaattattctggaatagaaggagtataagagaattttggataatcataaaatgatgacacggtggggtcccacatccacgtcgggtggctgctaccgaccttgacctgccccagctcctcgggagtcgggaaggcaactccgcctcttcatccttcgccgccgccgccgccttcacgtgctccctctcctctgcgagtcggcggcgccgatctccatttgtcgaggcgagcagagcaggggagccgggaggggagggcatcctggtgaggtgagcatccacatcccctttctgatgaatcattcatctctctcccacctggagtagttttttttttgtctggaattcgctcgcgttcgttaaccctagctttctcttgtagatctggaagaagctctcctcttaattaacctgtgtaaaagtttgtttgttcccccaaaaagtttgcttcctgggattactacgaggaggaggagaggggatagatagtctgtcagatgatgatgatgccgctgcgttgcctctccgagctggcccgccgccggcctgatcgcgcggtgagattctactcattttctttcttggatgaatcattcagctagaagcacgtcgctgtgtctttgtactgtaattatgcattgggtctctgtaattgtgcgttgggtactagtaataatcaagtaatgatgtattgatgcagtaccatatcacatcgaagggatgagcttgtgctgttaatttttaatttccagtcaaaaacgaattgcttgttttctggtgctgtaacagtcaaaaccaaaattttcaggttgatgcaatgagagtggggctccgatgtttgatgagcacttgcccgttatccaaagctactgatgatagtcaaaggttatatgcaacttcttcttgtgctaatgtgccagaggtagcactgagtgaggcgccactgtcagacatgcttgtcgattcgttcgggagattccacaactacctgaggatctccttgaccgagcgctgtaatctgagatgccagtactgcatgcctgcccaaggagttcagctcacgccaaactcagagctcctgtcgcatgatgagataatccgagttgccggcctgttcgttacttctggtgtggataagatccggttgaccggcggagaaccaaccattagaaaggatatcgaggatatctgtttgcatctttccggcttgaaggggctgaaaactcttgcgatgaccacgaatgggctcgttctttctaagaagctcccaaggttgaaagaatgtgggctcaatgctctaaatattagcttggacacgttggtccctgcaaagtttgagttcatgacaagacgtaaagggcactcgagagtcatggaatcgatagatgcttctatacaacttggattccaatctgtcaaggtatgcagatttttgcatacctgaaatttctgcagtttgtcttctttttaacataccacaaactggagctatatccgcatcatattgagcatttatcctcagtttaattggttctttttccctttttctgctgccaggtcaactgcgttgtcatgcgtggaatgaatgatgacgagatctgtgattttgttgaaatgacgagagacaagcctgtcaatgtcagatttatagagtttatgccgtttgatggtaatgtttggaatgtcaagaagttggttccttatgcagagatgatggataaagtggtaaggtacacctctgaaaagttcacttcccttatacattttacctttctttcttccgcctgcatctagcatcctagccattttatgtacatgtggttttattattattattatggaagctacaagtaatttttcttacttgcaaccttggggatcagcgccaacgttttaaaggtgtagagagacttcaagatcatccgtcagagaccgcaaagaatttcaagattgatggtcatgctggaacaatttcgtttattacatcgatgacagagcatttttgtgctggttgcaatagattacgactattggctgatggcaacttgaaagtgtgcttatttggcccctcagaggtatgctaaccagacactttgtgaaaccttgacttgtatttctgcaaattttcctatcatattttgggccaatatgtcaattttctactttggattccatgagggacaatttttgtgctttcactgatgttgtggcctcttattttgaataccataatcagtgttaatgtgtcacgcataatcatgcaaacttgaaccatgtgtactcattgattttccttcacaattatgaactatttgaacatagatcaatacacatatttctgtatagtgctaaaaatgctcaggatgttccaagcatgttatatcatcttttttgtcttaacacaatctgaatgagtgattggatgggttgaatggtattcatgtgctttgtttccttctgttgcttttggaatttctgtttaggtgtgctgtgccttagatctgaaagtgaaagttaagtgggggcagatccagtgtccatgatatattaaaccttaatcagagtaaaatttgaccgactttctgcaagtcctatttctcattatttaaattcactgtatatttcagaattcaggttgttaattccagttgtctctttaaaagtgaaatctccttgtacagttctatttttcttgttgtattaatatcattggacaagaatggataaaaatcgaggaacaagtcttctttgcaaaatgctaaaaaaaaataaatgagtacaaatattctggtttgtacaggtgagcctgagagagcctattcgagctggtgttgatgatgctggactcagagaaataataagcgctgcggtatgtgtagaaattcacttggttgacatcttctgtatgaaagacagtaatctagaccatttattcttattgtcgaataacaatcttgcaccaactatttcaatccactcctgttcctttcatagaacacgataccaaaaggtttttaactgtttttctctctctcatctgagcagtttaagaacatatgaattcaattaatttgtttgagaagaaaatgatttttatgttaaaagactgcttctcttgacaaaaatttaaaatcagcatcgcaaataagtaccaaaagagaagtagagtctcctggcttctgggatttccattgaggaaggaagggcatgcatttttggtttggaccacattgggtagaagataagcagaggcgaactatcctgttcctggtataaactgcacattatatccaaggttacctgggatgttgggatacttttaacgtttaccagcacccttttgcctccattggaacaggtggatcttgctctgcctacacctgaggcaattgttcctttggacagctagtaggtttctattgatattagttactctacttgtccatgttcatagctagaaatagctacattttgggacgagcatagcatatcattagttatattatcatgtttagtcgccaacttactttacccaggttaaaaggaagaaagctaaacatgctgggatgtttgatattgctaagacggcaaatagacctatgattcacattggtggctgaggtatcttcttaacactgcttctaccctttgtttaataaagaaagaattgatagtttctttgaagattatccattttcttcactcaacattgttctattggatccctctgtgtgttctattcataatacagaacaatgcaaattttagaaccaaaatgctggttccctgttataaattagaggtagaatattgtcatgagcaacaattgctttgtggttgctcaggaatctagtgaagagcatctgcaatttcattaactccatggctttgaattatctctagcttgattaaacatactgttgtcagttcattatgcttgtattcttgtctggcactaatttcttttaggttacaaactgtaggtgcaacatgcaatatttagaactggctacaattttaacttttatggactaagcattatccatgcttgtcttgcttaccaattacaacttgtttcagatcagttttaccagctgaaagtaccttggctcctccatacgatgactgcgatgaactatcaacatgataaaacaaaacaaagattacatgatcttaccttgatatgatggtaaactgaggaactcaaaacttcaaacggcaatacatacagtttgtacaagatataaaaatgttactatacttgtgaaatagtagcagttacaaaacctcatgcagttgaaagttaaagcatctgtacttttcgctacttgtacgagaaagttgtaactgttgtatgatgtatgctcctcataaatcaatgctaatgtgtaactaattattcttttacggcatcttatcggttaatgaaacgaaatttattgtcttttctttctgggaagctcttgttttgtattcagcagaataacggcctcttgaaatcgcgggaatgaaaaagggagagaaatataggaagtgtgcaagtgtgcttccgcacttgctttgaatttggtactactgatacaacaaaaattactctttgagaaaacaaaaaacaagtactttattttaagatagtaaaattcaactagagttgctttagaggttggttctctcttgctaaaaatattgggaagagagtaaattttttttaaaaaaaaactatgataaacaaaaataattcaactatttcttttaagagggtaaaaattcaactagagttgctttgtggttggctctctcttgcttaaaaaagctaaatgataccccgcgtttttctacggtatgattatatacagacaaacagattttaaaaagtacacacgcttaaaaaaaaatctgaactctttagttataaggccggggagaccatcagaccaatagtctttaaatttcaattaaaagtttaaggtgcatgaacgtgacataatataacttcaacaataaagtgcatgtcaatagaagaaaattaattgctctggagaattaaaaatagattgggaaagagaatatatactactactttctaagtagtggttgtgtctattttcatatcatctttaccgctgatatatgagccctataatctatactgttacaccacctttcagtgagtcttgagtcttctcccgtttaattattggctctctttagattttaaaatcacttacatatttaataaggaaaattatagtattacttggactaaatacgtgcttattaattgatttaataaagtagaaactcaatttattttaacttaatttgtttttcgttgcaatgcacgggctctatgctagtggagactaatcaattctaggatttggaaattaacgtggaattgtacgtagcactaggaaacattagcttatgtagtttgccggtttccatatttgaccaaaaacatgaaaagttacattatcatgtcttggtatgcaattaagcaaatttcactggccaaatgagtgttgaaattgtggacatatgatctgattagtttggatggtgttagagtgtgcagcccagccaatcaaccgtgagccacctaggtcacattgagcctactccaccacaggccgtcacaacttcatgtaccgggcctacaccacccaaaagactaggttctgagcctacacaacccaaaagactagtctgatgggtgaggaccgtccccaccttttaagtcatgtgggactaaacccaacaatctcaattaccgatgtgagactagacccaacaatctccccggaagtgctaatgggcgatcgatcgcccggcgacaagggtagcgatcgatcccccttccccctccctccctccacctggtttccttttttggcaccgcattactttcctattttagtaaatttatgcacctaaagtttatacacctcaagtttacacatctaaagtttagagaccaaaagtttataagtcaaaagtttatatatccgattcaaatttgaatttgaattcaaatattttttttatatatagtatttctatgcatctaaagtttatacacctaaagtttatagacccaaagtttataagtcaaaagtttacatacccgattcaaatttgaatttgaattatatccattcaaatttgaatttgaattcaaatattttctatatatagtatttctatacatctaaattttatacacctaaagtttatagacccaaagtttataagtcaaaactttacatacccgattcaaatttgaatttaaattcaaatattagtttatagacccaaagtttataggtcaaaagtttacatactcatttcaaatttgaatttgaatttaaattcaaatattagtttatagacccaaagtttataaataaaaagtttacatacccatttcaaatttgaattttaattcaaatttgtatggtgtagtagtaagagaagaaggggaggtaaagtagtaagggggaggggcgggtgattgcttggaaggtgagggagcgatcacccgcccattaggagtaccccattctcccccgtcacatcaaccctgatgtccgtgtggccccgaagactcaattaccgatgtgagactaaacccaacagatggagagagagagagagcaatgtcaattgggatatgacgaaacccaaaatcaaaccaaagcattatttaaaatgcaggaattttataggaatcgcataaaccaatgacacaatttacaatgtgataacatatattgaatatatttgtattacaagttgataacatacgtacatagatgcacgtgcctatataatacaacagtgtccagtacactatataatgtgcagcacaacataagaaaatatgatatggcttagtcgaaacacacacttggaagggcatctaacataccccgtactgtacgtcggatgcaaaaacgtttacggcttggtcgatcggtcagctcgcgtccaccaagaagaaccgtaaatgtaggggctatagtgcagcgtagtcgggtcggagaggaggaaaattaagttgctaatgagcagcatatccggattcgtggtattaggaaatatccctttcaattttaagctcttcaaattttcggacggggagggagagtagcttagctgcagtaacgtacgtagtagctgatgccatggatgtagctagctagagctagtactggtcgggccagaggaaggcgcccatggcgaaccgccgcttggcgtcgaggtcgccgtcgacggggagcccgtactcccggagcaggcagtccacccgccactccggcatcgcctcgtactccgccttcttgtaccgcgggtagtgcagcggcatccggaacgacgacccgccacacccgccgccgccgccgccgtgctgctgctcaccgccggccgccgccgtcgtcttctcggccttgggctgcagccccaccacgcttggacccaacgatcccatggccaatgtggctttcttgcagctaggactaggagtctaggagactagctaggactatatatgattttcttttttttttttttggtgtatcttgttgatggttgcaagaggctgctcatgtgtggaggggtatttataggagaggaaaaatgtggtgtccataaagaggaggtggtgctactcgctatgtgtggcgatcgcgcgccgttggattgaaaatggatggtccaaattgagcgtgctcgcataatacaccgaataattatcgagttttagtgtttgattgttggccccgccctattgtttggctgatcataagcatataagcgaaacgacatatatgtaaataaaaaataatttataaataaaacttttatatatacgttcttagcgatataaaagtaaagactgaaaaataaactactccctccgtcctataatataagggattttcagtttttgcttgcaacgtttgaccactcgtcttattcaattttttttgcaaatataaaaaataaaaagttgtgcttaaagtactgtagacaataaagtaagtcacaaataaaataattaataatttcaaaaaattttaaataagaggagtggtcaaacgctcaagcaaaaactcaaaatcccttatattatgggacggagggagtacgataaaaaaaatctcaaaaccaactccaatttacagttgaaatttcaaatttttgctgataagtgtaagcgaaaagatgaggccatgtatcatggatgaaccaacgaacggttgagatcgagcgtgccagcacaataggaaacgcgtgtatcaaagatgaatggtccagattgagcgctcttgcataatacaccgaatgattgatgggccattaatgcacaaaccatatggttgatgacacgtatgtgcaaatcaaacaacccatttgaagttatggacaacgcaagggacatgtagggagggatgaattgcatgattggtttgtgttcaattaagaatctaatgcgaacaacaagagacgtgagagggaaatcaggggtttgattggagaagacgacagcaaatgcctcttgctgctgcccagattcagtagtttctgttccaacaaatcattccagcagagggtattaacttgccgaaaacgcaaatgtacgtaggtgtagctagggtttaattagttaattaggacttgttcgttttgttcgaccagatctgacaaaaaaaaagaagaaaaagttcaggacacagcatggtttgtgtgaattggttgcttgaccaagatacatacgctactgaggttcacagaaaactcatgaaaaactgtagcaattcaatcataccaaggtactccaacatgaaaatcagattaaacttattgaataaatatacttttaatgaagtaaacttgttaatagcagcaataacaattacagtaaatatgtaggagttgttgggtattagaaatttgcctttctactgtattttacgcgtcgttatttgattttctttattcaacctgattttttattcattttactatcactttgcttgcttctcctgcaaaaacggaaggaaggaagcccacatgtctgaaaggtgaacaagagtcaaaacacaacggcaatcaggaaacagattgcaataactcataataattggacaacttgttctagtagtcatcaacaaatatgatgattgatagttacttggggtgttcaataagcagaggtgttttcttcagagtttgagaggcatcgatagcctttcattggtgttttgcttgtgaagcagaagaaagacgtgtgtgcttctgctaccaaagcctaccttccatgatttttccttccttgatcaccttgcttctcgccttctcccagtgaatccgcattatttaacaaccttctagatgccgttaatgcccgtctgaacaaaaattgttacgggaatcatctcagtgagagggtgtgtttgacaagaggagaaaaagagaaggtcgaggagatacgtaaaacgaagtggatcattagtatataattaattaagtattaattacttaaaatttaaaaatgaattaatataattttctaaaacattttttctatagaaaattcctttaaaacacacggtaacacttcgggaagaatacgcgtgaaaaagaggggtttttcctatcattgtgctgctgctgaacgcaaatcgctcccaaagagtagctttcatgcagtagatggaagttgccacaggataaatgggtgttttctctgctccatagaagcaagtattctgaaatggccaaatgggagtactgacctagcatttgtttcaacgttgatcagttcacacctcttgttgcttcctgtgaacactgaccagcacatctctgtaattgaagtgccaaagcttgatgggccccaaatgcttagccaaggccgagacaacggcccaagtaatctggataaaggcccaaacttcccaaacgcctacaactccaaatgggtaatacaaaggccgagtttagttccaaactgttttttcaaatttccaacttatccatcacattaaaactttcctacacacacaaactttcaacttttccgtcacatcgttctaatttcaaccgaacttccaattttagcgtgaactaaacacacccaaaagcatcacattattcagtactatgaaattcactgttctaatcctatgtagtagtaagtacatcacattgttcttttttcttgctcctactccactaggactcattcacattatttctgtagtgtcctggtcgatttgatgccttgtcaatttttttgttttcgcattggcctttctccaagcaagttcttgcgacgatgatttcgactgaataatctgaaccgctcaaaattttgtcatctggagcttgagagtttcttgggtccaagattccttgcctgttcttgcacaagcatcacagttgtttttgctcgtaccttcctcctctcatgagtcatgaatggtgacaggggtgcattgaagaagcattgacaaatttcactgctgcatccatgtattcactctgacaagctcttggatcctcttggaaaacgaaagtttacagcaagcttcttcagcatgtgctacactgctagtatcacactcttggagagcttgttcagcatgtgcttcttcagcatgatgctgaagagcaattgcattggttcagaaaactttgttcggctgtttgtgctgatcaatactagtagtagtccctccgtttctaaatagccgacttccctaaatatttagaaaacgtcgttaacttttataaatatgtttgaccgttcgttttattcaaaaacttttgtgaaatatataaaactactacctccttccctaaatgtttgatgccgttgacttttttaaatatgtttgaccgttcgtcttattcagaaacttttgtgaaatatgtaaaactatatgtatacataaaagtatatttaacaataaatcaaatggtagaaaaagaattaataattgcttaaattttttgaataaaacgaacagtcaaacatatttaaaaaagtcaacggcgtcaaacatttagggatggagggagtatacgtatacataaaagtatatttaacaatgaatcaaatgataggaaaagaactaataattacttgaattttttaataagacgaatggtcaaatatatttaaaaagtcaatggcgtcaaacatagagacggagggagtactaaatctagtgtgccctcatttgtgctgattaaatgcagatgcagggaatggaagaggaactacaccatgcaaagcaattgcagagaaacaagcccaaagaaaaccaaacaagcaaactactactactactcctgtttgtgtttgctagtagtaggacaccacgtatgggacaaagcatgcaaacacacaagaggctcaagcatgtactcctcctatatccccttgcctgcaagcttccaaaccttggccatggaaccatatgcacataccaaggacatggagatgtacacacacaagatgacacaagagacacatatttactactcccatttcttcactgcacattcattgccattgcaaactaccagtgctagtaccagtaggagtagattattgttgcttgatagtagagtccaacaagtgttgcattggcagcttcagtcagtgaggcacccccatactactactgctgctatctccatggcagctttagaatccaaaacagtctaaacaatgcctttaaagcggggccagatcaaaggtaaagctaaagtccaaaagggcatgcataaaaagctaaacaaaagctgtaaacatattactgttacgactgggaacatttttaattgcagtaaacaatggcgtttctgtaggatcaacagtgtcatgcatcggtctctgtgcatgaatgatcctcctcagtcataaccatttcacacctccctacaagcaatatttcttgatttcttcatattgtgatttgtgatgtagcatcagggctcctttggactaagaattttttttcctatgttctatctcttggaacaaagtaaaatgcataaggattgttttcatatgctctcaatcaatatatgaattctaacatgaactcatcttttttttcctttgctaatgtccaatgtatactctctctctctctctctctctctccccgcatgtgatttccttaaaaaaaattgtttcaattcctgtggaactatccaaacaaaatatcttaagtgttgctatgtttctaaaatcatgtactccctccatccctaaatataagggaggagtatcgcagcgtcctactatttctatttctgtgttataggaatcctgcgttgaaaagagccctcaaagttgatatagcttattgttcattttccatggctactacactatttctctcatgttccaaatgaaatttcctgtatctttagaaactgttttgctaaatggagaccattttgaaacttgcatagattttatattttcacaaataaattatttacattttcaaatatatattataaataaagaaacaaatacatttagccattttcttaattattatgccaactaatatctttatatctaaaatcagaggaggcagatataagtagttactcctcctagtgatttaattgtatgtccatgcagatgctgctggtgaacagtgtgagacataaatttgctggcttttgatgaacagtttgatgagcatttgggattggaaggacatgttcacgttaagagttgatagtgatgaagtgacctgcaaaatggtgagtttggctggaggggattgtttgcttttaggagctaaaaccttagcttaaacttttgcatgagacatgtataatctttagctcataattaaagaaaaaagacggtttgtgtccttttccttttgttcaacaactagattagttaagcagtagagtagttagtagctcttctttttttttcccttctttttggtgctgaactgctgattgatttaccgtacttggcgtttaaaacaatgagatgagacaaaatgacaattaccaaaccctgttattagactgatggtgaaatctactactccctctgtttcgaaatgtttgacaccgttgactttttagcacatgtttgaccgttcgtcttattcaaaaacttttgtgaaatatgaaaaattatatgcctacataaaaatatattttacaatgaatcaaatgatagaaaaagaattaataattacttaaatttttttaaaaaaagacgaatggtcaaacatgtgctaaaaagtcaacggcgtcaaatattttgaaacggagagagtactagtagtagtactattaaaaacctgttttcagtgccaaaacttttctcctgtttctttacaaaaagaaagggagaaagacattgaaatgtgctgagcacccgcaatggtaaagtaagttgctctctataaaacatgtacatctcagcaatagactagattaatagtaaaccacctcaatagtatgtctacttgggtatctatagctctctaatatattgcctcgtttttctctatagactatcttcaggttagtagatagctttgctctctctcttcatttaatctcttccaagtagaaaaatatgctaacatggatctcttgtaaagagtttatagataattattgtgggtgcccttacagtgccaaactgccaataaccttgatttgttttccggttctcaactaccaacaccacaaatagtgtagcttcaagttttgttgcagcaattgatagtgagcatctggagtactactcctacactattatacacaactcaagaggagtgaaggaccatgaaggaatcaatcagccactaacattatcattagagttcttttcttgggtcctgcatgacaggaatgtgcatgcagtgtcagtgagccaattatcctgctgcccatacacttgcacattcacacattcacacacacaaaaaaacacaaaagatgaatgaatgaaaggcgcatgtctggctttgttcagctgctgtttcctccccttcttttcccccatctctttaggcggattcggtgcgtgattgccccattgccattgcaatttttgccagccacctggtcagcaaaagatgggggagatgatggggctgaagcctgcatggatgtttcattttgattccttgattccttctcctttcattcatagaaaaacaatcatacatgcacatcctttggtgataatgaatttatattgctatactctacagtaattatttgtgggagtagtagtacaagtcttgctcaatctggtaattctatctacagtaatttactcccattttcacttcacttgccctgtttagtttcaaagtttttttctaaactttcaactttccatcacatcaaacctttcatacacacataacttttctatcacatcatatcaatttcaaccaaacttttaaacttactaatgaactagacacagccgtactggagtgaagtctaccagacgagtaccagagttgtgtatgtgtgtgagagaagaaatggtcatgatagcatcagttccatcagttcaatccaagtgaatcaaaacctgctttttgcatgcatgcaggatgcaagtgaggaggaggaggaggaggaggccccccctggtatgcatgcctgccccaagcaaatccagataacctaggtgagctgaggtgactgataaaacagcatataatgtgatgtgtgtatgtagggactgtgctgcctgcccagctgtggtggcctgaatcatctcatcctccccaccttcatccaccatgctctgtctcttgccttgttgcctcctagtacctcttggcatgcatgcccacttgtaatccggattcacaatcctggtactccctgcgtctcaaaaaaaaaaaaaacattctaggagagaatgtgacccctcccagtacaatgaatctggacagagtgttgcctttttctggaacggagggagtacctttttgtttttagttgtgtttagttcccttcaaactttcaaaaattctatcacatcaaatatttagacacatgaatggagcattaaatgtggacgaaaaaagcaattgcacagtttgcatgtaaattgcgagacaaattttttgagcctaattacgtctaatttaacaatgtggtgctacagtaaacatttgctaatgacggattaattaggcttaatacattcatctcgaagtttacaggcggaatctgtaatttattttattgttaatctacgtttaatactttaaatacgtgtcggtatacttaaaaaaaatttagacagggaactgaacacggcctttgaatggaaaaaggctccccactggtttattgaaaaccgatgactttcgatcaatgttgaaaaccaattaatactgatcaactttcacagaccgacaactaatttcatgaaaaacaatcggttttatgaacctgcctagtaccggatcaagaaccgattggtatgtcgaattccgtggaaatcgttgataaaccaaatcaaaactgatgaaattagaataaatcttgtcaaaagtttgaaattcagtttgaaaaccgagcaatttgtatttttttttcgttgtctaggaaatctggtttccatcgtttttataaaccatacttgtataatccatcagttttataaccatggctgtgtttagtttgtgtgccaaaattattataagtatacggacacacatccgaagtattaaacgtagactaatagcaaaacaaattatagattctgcctgtaaactgcgagacgaatctattagcctaattaatctgtcattagcaaatatttactgtagcacaacattgtcaaatcatgacgtaattaggctcaaaagattcgtctcgcgatttacatgcaaattgtgcaattggtttttttcatccacatttaatgcatcatacacgtgtccaaacatttgatgtgatggaaaagttagaagtttaaagaaaaaagtttaaatctaaacacggcccatgcttgtagtaatagtacatcatgcttgtataatccataggcaggagaggaaaataaaacagatcataggagaataagggaaagggcaaagaagaatataaatcgtacttggattgccgtttcggatttgtacagtggcaagtaaacaataaactccgtggcctactgcaatgttattgtcacaattatatatgcatggctaggtccttgagttcaatcatcagctagctacagtactgtacccccttctttagcttttgtgatagaatgatgagatttatatcagatcatggatggatggatggatgcatatatgtctgtgatatctccggcttttgcttttgtgttggatcgatggcacaacaacatgctggatggttgtatagatctagtctatactgcatggacagctagtgatagtactctcctctttgaggtatggtttgaggtaaccttccctccctccttgcaaaggacacgtcaggccactagattctcatgtttgtcttccaaaaaaattgctcatgaatcatcgtacaatttcctttgcacttttttattccctccctcaaaacaaattatcttttatacacgatatgcttatttattttaggacataactacttaccatgtactcccccgtcaaaaaaaaaagtcaacctcgtattaggatgtgatagagtataggagtaattaatttctaatgcatacccatatgtgtagttattatttacaattatgtgtagttattattatattgtaaatacataattttattaaattatttttagtgacaattattaatatggcgttcacaaatgagatatgcaactttaacatgttttactcacacccgttctctaataattgacacggtcactattccaagttcatactttaaccacatgccttttaaacaaaactagcaaggaaacccgtaccgatgcacgggtaatttatttgttgtttataaaaaagaatataaaaaatcgtatctcaccatattcaactgtaagaactataaattacattataatcataaaagaaagaaatacttacaccatgaaataaaccataaaattttatatactaaatgataatgtatattatattcaaacaaattcactttatcctggttatacgtaaactcgtctatcaccatctttcacaaacatacgagttaatatgagttttgtttttttcttttactatacatctaagtcacctgcgcatgttcatgggtaatatacgaaggaataatccattgtcaaaattatttatgctaattttgttaacactttttatatgagaatggcataattacataaggatataatatgtttccatgtgacatttttttattgtaagtatgtatattttctttttgtgaatagtagtatgtgtattcataggatagtgtgcacacatttatatgagcgcttacgattgccttttacatggttagtaaaaaaatactttcaaaatgtctggtgggatggcatgaagcggtgccacagcgacacgacttcttcgagaagattgccatgagtgcctcaaattaaagaaaaaaaactatcagatagagcagatcgtatatgaactcttcttttttattcttttttacatatcttgtgtacatacgtacatacgaagggattaaatggtttttagttggaatagatctaatgtaatggttgaaaataatggagctatgtgtatatcaattgccaaatattttgttttctaataatttttcttatttttttctaatttattagagttgtcacgtggcatcttaagagtgcttgtaggagtgtagaaatgttattactcacactggcaacctactcactgtcaactattgtttgttgtggtttagtggcatactcttcttacctatcatttgttgaagttgcccacttagtatagtcctatcttcggtgcttgatgacacacgtgcttattggatatcagctaattattaggtgcactgtgcacgaatgactcgtaagcaatattcccactaatacagaacttatatacttatgattagtgggaatatacgattgtattagactattttgtatttataaagtatattatatactacatattaagggttttagtatgtatgcaataagttgtaaagtacttatcggattggctactctcttatttattatgagcacgtttcctcgattgttctaggaatttttataaaagaaattaataccttttgataacaatatctaagtccatctaaaccattatattccttataattaaattgatatcatggactacattgtatatatttaagtgcaacgtgtgtattattagaaatatattctatataaaagctaaatctatttttggcttcataatatttaatatttaattaatcttgcactaatgacatgtgtcgtttcgtgtgtccaagataagctcagctattgagctagatcaaagtctaattaagttggagatagaagacatcgacatggtgtcaaaagaatatataagatctttaattttcaaatattatagaatagagaaaacatataatacttgaaaatacgttcatgataatttagtaatatcattttgacatattattatattttacctagggagtggaaaaatttttagaattgttagtcacaattagagttgtttttattttaaaaatgaaagcctaatttagctatcatataatctattttttattttatttatatttttcatggatgtttccatgaaatgcgcctaattagaaactctaaataacatatattttgcatagtaaatatagacagtttggttttccataataagtgagatagaaaaaaaaagaatgatgtgggcccagcgtcgtacgtacgtatcaaaatatggacgtactttttgtttttttggaatacctatatgtgcacgtacaataagagtttttagataaatttaattgtatttttataatagatttaatggttagaactaatgggtccatcggattctaaaatttattagagcgccacgtggtgatttaggagtgtttttaggggtgctatgtgacgttttaggagcgtttataggaaatttaatagacttttagtatataatagatagatagattgtacatacttcatttgatcgtaatacattcatttagaagtaatttatggtcaaagttattgtccgtcgtcgacagcgatagttattccagaatgggccgacagtactttttattgaatatagtataatgtatttggctgcattttagttcttttagctagaaaaaatattttacaaatataccctctataaaacttattgcaggtatggacccactatcttggcaccagagatgttggcgctgaggtaggatatcacagagcaacattttaacgtcgtcctctcccatttaagaactactccttttttctgcaaattttatagacttgttgtcaaatttgaaaaaaaaggacgatatatattaatgtatcgtaaattcctaatttatttccgctagtttatttttatgtataaaaaattaatatgggaagaggacatggctcgcaccctcctctccagtactattgattcgtggttaaatttgaaataaaatcgaaatctgacacatgatatgtattttttttccccgaaatttcactgcaaatcaatattactaggtgtgagaaggagtgtgggacccacattctcctccctttataaattagcgtgaatgaattaggatgcattggtttgtagttttcctaaaatttgatacggagtagcaaattagtaataagattttgaggaaatctagatgggagaggtagacgccaaacttgctggcgccaaaatccacaaaccatgccgtagagataggatctgcaataagtttttttaagtctatttttaaaaatatgtttactaaaaatactacaatatgaaaaaaaaagacaagtttgattgctcatgttcaaggacataaacaatcaatataaaaaaaataaacttccaaggataaatctggaaaaatgcttattcgaattgatccatgaaagttgttttttttggaagggaatatgttgtatcttactccctccgtcccattttaagtgccgccatacttttctgtgctcaactttaatcgtctgtcttatttaaaaattttaaaaaaatattaaaaacataaatcacgcataaagtactattaatattttatcatctcataacaacaaaaatattaattataaaaaattttcaaataagacggacgattaaagttaggcacaaaaactcatggttgcacttaaaatgggagagagggagtatctgaattgattttttttatgtgagggacaaatacttccttcgtcccataaaacataatctagaactggatgtgacatattaacagatgtgtgatttagtactagaatttatcacatccattactagattgatttttcatggaacggggttagtaagcaagaacaacatgatattggttgtactgggctgttttggtttgatgacaaaatttgccctacaaagcactttaaatagtacattgtagatatttggattgatgccaaaatttaccaaaggtatttgctaggacaccaaaccaaatgatcccactctttctaatgtttactagtagtaccacttgtttaatgttttttttaacggggacgatatggattgatcttgtgagtagagaagcagcagcagcagaagatctttggtgaagcaggatttgccgtgacacaatgaccgatcgatcctccgttatacacacggtacacacaagcagtccagattccagtctccagtccatatacacacggtacactggctggagtagacaactgcgactcgtgtatccatggagtatgcatgacaaacaacaaatttcagcgaccccgattagacgtaacccctctccgctatactagcctgtgcagcggcagtagtccagcctgcagaggtaatatgatgtgtcctgtactctgctgtgtgcagctagttacagctacagccagcctactctttgcgttgcagatccacacatggcagctcggattggggagccatcttcttcactggaccagtccatctagattttttttttgttttttactttttgtccttgctctgaaactcattttacaaataaatatttagaaaaacttattttaaaaatagactcttttcagggtgccaacgaagataggcatcttggtccaacgtgacagtgctaatcacattgacattatcctatagccttcacgtgaaagctaagtgactgatatgaaggagttagcgtcaatgtcattggcatcaagaacctatctataattattttttataaaaaagacctatttacaatacatatatttataaatagattctcagtgccgtgttattagtgtcgtgaatctatttgtaaatgcatttttaattaaatagatcctcttttattacaaataagttattttttaaaagaatttacaaaaagatcatcggcaccaataacgtgtgcaccgatcccttttacatcagcattttagcttctacgggcaagctagggatcatggcgtcaataacttgatgccctacaaaaattcatttataagtctatttataaaagaagtttttcaaaaagtctaaaatgtaaaaaaatcattcatgtaagtacgtccgacagttgatgctactagtactgttattcaacataaaataaatgattttaggctacttagggcccgtttagttcccaaaattttttcctaaaaacatcacatctaatctttggacacatgtatgaagcattaaatatagataaaaagaaaaactaattgcacagttatgggggaaatcgcgagacgaatcttttaagcctaattagtctgtgattacccataattactatagtaacccacatgtgctaatgacggcttaattagtctcataagattcgtctcgcggtttaccgacgagttctgaaattagttttttcattcgtgtacgaaaaccccttccgacatccggtcaaacgttcaatgtgacatccaaaaattttcttttccccaactaaacacacccttaccccttaaacagactaatctaaaaattcgctcttataaaaaatttgaataagatgctaatcaggtagtagaatggcataatcggaggaaggactaattgtagtaagctgcaaaacccggcgacgttgtagctcgaggaacatctgatccaagaaaacggtagtagcaggttaattaacccaataatctgggcagatcttctatttctatttctattatatactaaaagtccattaaacttcctacaaacactcctaaaccgccatgtggctcctacaaacactcctataccgccatgtggcgctctaacaaattatagaaattctaagaaaacaataaaaatccgaccatcgattttcacttaatacggtggacccattgtttcacaccattagatatctatcttataacaggaaaaaaaaaatcacaaaacccatccgtatcccctccatcacgtacataacgtacgtacgtcccccaccttctctctctttctttccatttatttataggtagcaaatttttatgttaaaatattaatattaaataattagaatttcttataatatatttgattttaattatgccatgtgttggagtgttttatatatatatatatatatatatatatatatatatatatatgtatatgtatatatatatgtatatatatatatatgtatatgtatatgtatatgtatatatatatgtatatgtatatatatataaaagaaatatatcatttgcatataaactcatatcctttatatgataactaaatattaagacatatcatgcaatcgtaaatgatctaccatctctccttcactttattatccttatttctagctagcagcttagtatataaataattaatatataatttttattatataataaagatttgttaagcagatccccataaaatatcatgcagatatttctattatacatcctttatagtgtttttagctcatcacatggcacatctaataaattataaaaagtactataaatgctgcgaaagaaacatttaatcaatgattttcatttaaatagataaacctattatttttaaccataaaatctatctatataaaacttttaaataaaaaacgtctcctccccttcctcctccttcctctcatctacattattctagaaacttgcatatgtaaatttaaattacaatgtcaaacaaaaattagaaattcaactattaaatagtgttttgtcaagagacagcatccctgctttttttttacatgtcatccgaattgacataatagaatatgaaataattgaaaaaaaatcacatgcactcataatttatatgaaatatgccttttaccatggaatcattatttttttaccattagatttatcttaataaatagacaaaaagagaaaaggcccaatcccaaccctcctgtcctattacattatgtccatacatatgcatgtctgcgccctcccccctcatgcacgacacaacctcgcctcatcttttccttctctcccattgtcttatttttatgcttattagttagatagaaaacatattttgtgatagcaatttttaaacaactataccacctaaactaatttttttatctgtgcacctcattagattatttgcagttaactttcatgagtcgaatccaaattaactactaccttcgtcctaaaatgtaagcatttttagaccatattttggagactagctattgatcagtcataaatatttaggaaaagccacaaagaattttaaatcatattattaacaacatgttgcttacattacaacaatgtaaaacacttttaagtagttagataacacatttgtggaaaataacaaataccgacgaagaatatttgtggagaaaatatactttgaagtatgacagtgctatccgattaatattaaacatgcagcccacaatacatacgcattcacgctaccttcctagtttaattaaacttggggcgatcaacacgcacatcctgtacccaagtggagcacatatatgggcccagttgtgtgcggcatcatcatgcgtgcatatgctgctgctgctgctgctgctgctactgctgctgcttgccttggtctcgtctttggagacgaaaaagaagagagaggaagacgttggcgaggtgacctacctgtggcaagaaatgcatcgcaatgcagaggacgaccaagaagaataaagtcgagatccacctaggattcgtactactgtacacctgctatacagtacgtactccatctcctttttgtgtgacggcttgaaaagaaaagaaaacaaaacaaaagcgacgccatggctgcccatctcctccttctcacttctccctcgtgcatggtcaccatgacaacgtacgtaatgtactattcctagtaatgtgctgtggcgtactgtactgaaaataggtcatctaacttagtactgttttctaattttaaatggttgacacatagatcccaccgcttatgggttcatatgtcagcgatccacgttagagaataataagtcagacgagcctcatccgtaatgtaacaggatcacgagagcactctcctaccatgtatactggccattaaaaaaaaaactttcgactataaatttattatcggtacaataaatttcttacctcgtgtaccggctagcaacctatatccggattcgtagtcatactaatgctacattttgaaacgaatgaataactatagatttaagcacggacgatatctaaatttgaacctagtaactcaattactagtttttttttaaaaaaatactagtaattgaatttattttttttattactgcatatgtagtgctagtgcgggtgctcttcctgcagttggccacttggccaccgcccggtcaacctggcatatttcttttccttcctttggctttgctcgcctagcagaaaaaaaggatcaaaaggcaaaaacaggtctcatcgatcgcaaccgatcactccacttttaattatttcatccattatctcctttagttcgtttctcttttcttttccccctttgacctccatttctttttcttttttgtgtttcttaattagactagccttcaaaactttccttttttttcccctctcttttttatctagtgccctgcctttagaattccagttagggagggatcattttgactggaaattctagctggtgttcttttcttatcacagttggtttggatcagcataacgttctccaccagctgtgatagaaccaacaattttagggcccctttaatttgaagaaaaatataggaattttggaagatttctgtcttataggaaaatttactaagaagccatttgaaaaataaaggattggatcatatccaatcctttgaaattcctatagaatagataatcctatagagattttggagaaaatttagcaagggcttcaacttcttgataactttcctttgagtctatctctctcatccaagtcctgcgtttttcctacggttcaatcaaacggtcattcctatgtttttcctgtgtttttacaatactctgttttacatttgcattcctatcaaaatcatacgttttttctattcctacgttttctcaatcctgggattcaaaggggcccaataagatcaattatcatagtttgatagtttagtgaggtttatttacatactcccaagggtgattatgtacgctcaattaacaactagtacgattggcgtcgtcggccgatcgatctgtgtgcggtccatatatacggatgacgccgtttgcctgcacatgcagctcgatatgcatgtatatatatgatgatcatctccatcgatcgatcgatcggatcgagcacaaacacaatgaatatgtatgttgcatatatgcagcatgactccaatgtaaagctgtgcaggagatgatgattttggctgaaacacatgcctgcttgcctgcatatgcagcttatagctaactgccgtgctgccttcttctccgggcacacgctgtcccgcccttgcgcacgctacattgtcgatctaaccatcgatctcgatcgatcgatcgatcttggagctagcttaattaggagtaattagctataagcgcgcgccaaaggccaaacctggagcttaattaagctgcaaatactcctatatgtactaatctaattaaccagagttactttaatttcagtctttcagatcaccaaccatgcatatacatgatggttgcatgacatgcatcaaccctacattatttatattaatggttgtggttatgtacatgtgtattagatgtatgcgtgctgaataatgcttagagtccacgcatgcatgtactagcgccagacgtggggctgtttggttgtatatacgacttcaccttaccgaactttttgacatatataaattgtgacgacatgccacaagttttattgataagaattaattatttacatatgttaggcaaactttagtaaaaaaaagtgtgggtctatgacaagtgggaataaaaaaaagtgtgagttagattttatggcttaccaaaagtcactactatatatagaaatggttttttttaagacaaccccttatttttacaaggggctaggaagacccgcctatgaaaatatgtgtgggttatccagtcaagccccacgtgtggaaattgattttcacaggtggtgggtataatcgaaatataaaaattccacaagagatcgaatcatgacgacaaaaccaagacattatatttgcctaattatggactctcctcctcgatctagtataattacaatgtattagggtagccatgacgatcgaccggttaggcagccggtcaatttcccttccctatgctatagttgccatgcatgttgttacaacatgtgtacatctctatttaagagagagtctaagataatatttgactctaattctattctaacatatattgttacaactaaaaaatctaatttgtaactgattttgtatatatattcaacacaaactataacagtgataaatttgatggtataatactatacgtagaccgacataaagatactcatgtgaaaaaaggaattgcattttggtagaaatacagtttgtttggcatctacatccaacctaaacaattttaactccagttagttaaaccacatagttatctagctaaacatgatgtttgtgagtgcactgacaccgatatctactctagattttgaatcatgataacctagggatacaattacacaacctaatcatcttgtcacatgccaaattagcaattgagtactagtatatatctttaagttagcaaccaaggtagaactatcatacatgtcgttaccagcagcatgcatgcagcttgtctcatgaaattggccatgatcgagcatgaaccacttgtagagttgtagtgaaattaatcgcacttaaattgagtagtccaatcacatagtccagccaattacaggtaatttgcacatgcttgcttgctgtgaaagggagattaattgagacgcgaaaaattgcttgtctgtacgtcccgcttcatttattatgatcgattccctggtcaggagggaacaaaaccaattgttatgggattgtagggcctctttaattaattgtttcatatgccaaacacgatcaaataaaaaaatggcatcaccaaaattttagtcattgggttgtttttatagtcaaattggcacgccaaattatttagcttaagtaaatgccaaaatgtaactttttttagaaagacagtataaacaagctctaaacacctgtaatacacacggcaatgtatcgatcatatgcacacaagttttctcgtatacacatcatgcacatcaactaaataatatcaaaaaagttctaaaaatgttgtacatatatacttagtagtattatatctatgtatagagtctcatcttcaaactcattatatataccatttgtttcatgttataagtcgtttgactttttcatagtcaaacttttttaaattcatcaaaatttgtaaaaaaatatagtaacatttccaacgtaaaacaaacatatcatcaacatatatgcaatattaaatttaatgaaactaatttgatgttataaatgttgctatttttttcaataatttgatcaaacctcaagcaatgtgacgaagaaaaaggtcaaacgacttataatataaaacagagagagtagggagcaaaaaaaacgacactattttgacagatttatactcttaaaactgttaaaatttttttatcatttttgttacagctaaaatataatgaatttgaggttaacattggacagataagtgtaatactatttttttttgagaattacacagtacaacgcagacactcacaacacacgcaaaccctagaattacacagtacaatgcagacactcagaacgcacgcaaaccctacccctatgagcatcttcgaagactggaccggcaaatcctggagagattgacgaagtcaccacaggcgcctcgctgtcgacgggtatgtcgcctaccactgaaagcacaacgccatttaatcctggaaaattcgctcccatggggagtcgaacccaagacctctactgagtctcttgtaaccactaggctacaggccctttcgcagataagtgtaatactattgaaatcacttctataattttttttctagatttttagttgcgtacacgataagacttgtgtgcacatacacctattcttatgagcatcttggaaagattgagccgacatatataactaatttggcagcaaatcaaacgaagccattgtcaattcttgctaaaaatttggtaatgaccaatttttgctgtgccaaaaaaaaatgctaacggcaatgagccaatcggccaaacaagcgtatagcaaatttgcactgaggcctacctgttacataatagtacccctacatatatattctccaaactgttccatagggaccataaaaatagtggaaagtgggaggacctgggtacaatttatccccactggttggtaaggtttgtgcgtcataaattcgcccgccaaaaaccagatgggcgtgcgggtgcggcctcgtttacgcgttgcagtggttgctggtaacaaacgctgctcgtgtcaaaaaaaaaaaaaaaactctgctgccatcggtgacgatccgggccgtccatttccatttgcatccacgtgtcgagctttgccccgccaagattttgtttaatttgtctcgtgtaccgcccccatcccgtaaatgtccgcgcgccttaattgcggccaacccatttcaccaaccgcaaca

SEQ ID NO: 22495 - DNA, 1817 bp, Oryza sativa
gcatgtaatattattggagttttaatataagattactttatttgtaattagacttagtatgtaattattgactatggaattggtgcgacaagtagcaattgactattgtagtcttaattatacttagcatatacgcacgaaacacttagcatatacatgactattgtagtcttagcatgtaatattagttgagttttaatataagattattttatttgtaattagacttagtatataattatttactagctagggttgtacaatatacgtcacctagacttagcttatatcacgatttgtaattagacttagcacgtaaggttgtgtagggttctaatgtacgacatttacacttagcatacatgacttagattgttaaaacataaatgtctcgtgacttagacagatgtttcttgtatcaacagatggctgaccgcgatgaggaacagatattgtacgatacaatcgcggagggaagcagccagtactggaatgaagaagaggggaacgaggatccaaaccagtacttgaacgaggaaggaaacgtggagagggatgcggaggggaaccagcaggggcacgtggaaagggatgtggaggggaaccaggaggaggaggctagtggtagtcaacccgccgttggacagaagagggcacgcgggcaacgaggtgcagcgaagaagcttgagggttgacacatcataacggaagtgcaagaagatgaacgtcctagtgccccggccgaagccgccaagaactatgtacgtcacagcggttgggttgtgcgggataacgtgcctgtcagtacggtgtactggcgaagaacaagggcacgcggagatcatgagagctttgtcccagattcggagaaagagatgctgtggaccacaatgctcgagacattcacccttcctgcgggtacagaggacaaagtgaaaaggtggactctgaagaaaatggcagaacagtttcagagcttcaagggagatctgtaccagaagtatatactgaaggggcagacaccgaacttcgacacattcccaaagctaagggatcactgggacgagttcgttgcatataagacaggtgaacatgggcaggcgatgatggaaagaaacaaagaaaatgccgccaagaagaagtaccatcaccacttggggtcaggaggctatagcgtcgcgatgccgaagtgggaggagatggaggctagcttgattgagaggggtatcgaaccggcaacagccaattggccggaacgatcgaagttctggtactatgctcacggtggaacgctcaacccagctgatggctcactggtcttcggcgatcagatacgagaggctgcgcgacgactaacagatgcagtggaagcctcctctcagggcacgttccgaccagacagagatagggacgaactgacactcgccctgcagactctagagcatccaggacgaacacgagggaaaggggtgattccttggaagattggtttcaaggaggacatccacacgtacaggagtcggatgaggagcaagagagataccgaggcgaagattgcagacctagagttccgggtatcgagctacgaactcaacatgcaagaggaggtggcaaggaaggttgatgaacgcatgtccgcacatcggtcccatgatccccagccgaccattcctcctgcaatggtgagcccgtcaggaaaccgtagcagctgcgcctcaacggggcaggtaggatcacagagcatggacgccatgcaaacacaggacgaatcgacatgtcccgttgatgacatcactcagcggacacaatgtgagctg

SEQ ID NO: 22496 - DNA, 1416 bp, Oryza sativa
ccaagaacaaggacccgggatacgattgcacgcaagaggagcttgacgcttacgttgcatcagaagtcaagagacaattcaagcctcgaagtccagaaaagaagattcctatagaccccagtgtcaggaacttcttcaggggtatgtctgcatctgtcaaggaggccatcaagctatcggactatgagcgaacgctgaagaaagcatcttctggaaagtccaaaccagtccctcagcttggagagcaaccaaaccaggagatcgagccgttggttaccggtaaagaaatgacgatagaacaatttattactgacaccggtctaactacggatcaattgctaggagtcgcaccaatcgaaaaggcggaagtgaaatacatgtacgaactcggtaaaccgcttgtcaagcctgagctgctgcagtccctacccacacaaatgtacaagttccatcagctgtacatggagatgagcgccgccggtagagagatgatcggagcgaggatcagggacacggacttcttgcaaggagatgacattctctggatcaatttcaagcgaatctacgaactataccagctggacgccctcgacgtctctattatgagttgctggattttgtaagtatatcgttcggttagatttcttactatacgtctcctttaataaattaggtccttgtatataagtagactatagaaaataatatactcccttttattgttgtagaatggagattcaaagggcccgacggcggagggttttcgatactggattcatcgaccctcggagagtaaacgtcgcaatgctcgaccaatatccacaagaaacagaggacaatctcgtccatctcctgaaggcgcagcattacaagacgttcatactgttgccatacaacacagagttagtttaattttactgtcttcctacataccaaatttcattcccgtacgaacttgctaagtgtttcatatgtaatgcatcccacgcacattgcagattccattgggtgcttttactcttcgacctggaggcctgcaccgtcaacgtatatgactcaatggataaaaaagagtctacgtttgacaaggttttcgaacttatagacaggtaccatcataagttcctttgttaattaagaaaatcttgttatgttaattgctactacgaatcatagctttaaactccatgtagggcttggtatcggttccgtcatttggtccgcggcaaatggagagaaagacttaggcggaagttcaaatttcctgtgagtacacatgctctacatttatatttctccgattcaaatacatacaagtgtatattaattagatctctcgttgtttgtcatttatttgtagtgcgcaaagcaaaagcagggaaataacttgtgcggctattacgtgtgcgagtattg

SEQ ID NO: 22497 - DNA, 1301 bp, Oryza sativa
ttcttgtttaattactaatcaatttcatacattcatatagtttattcgcatgagggataacctgaccacacacaaggaatttatcacggcggttcaagaacaactcatgggattcatcaacgaagaaatccttaatcccaagggtgaattctactacgacggaaacacaattcaccggtccttagcttctgagctagcagcgagtactactacgtcgaaatgatagctagctagctaggacatataatggattgtaattaatacatgactacatatgtttctatatgcatgtgtacacattttctataatgtaaatatattttggtcatatatatatctatatacatatgcatttgcataacatatatatgtataaatacatatatattatgcatgtatatacatataatataatataatatatatatatatatacatatatatatatgtatgcatatatatgtattgaaacatatatatgcatggtttatatatatatatatatatatatatatatatatatatatatatatataaaccatgcagcaacagggccatgaaaaaaaaaaaaggtcagctcgatctttagtcccggttggttggctcagccggccacgtggctgagccatctttagtcccggttggtgttaccaaccgggactaaagatcgatctttactcccggttatttcacccgggactaaagatagcgatctttagtcccggattggtactcccggtttagaaaccgggactaaaggggggttacgaaccgggactacaaagggtttctccaccagtgagaaaagactgcccaccaaaccaaaccaacagaccatggagttaaaaaataactcgcggaaaacgtgaagcaacgaaccctcgcccgcaggaccaaacaaagctgaatgtgaagttaaattttaactaatactatgttgagttatgcgctgcggtgatttcgtcgttgagttaaaattttacctatgttccggctatatgaatgagtcgtcattaacttaaattacgggttggtggttatgtagttaaaaatttactggtagacgatgatctatgatgaaaaataacacagttattttgtagattctttttttatggatgtgtgttgtttctcatgacaaggaatgtgagttaaattttaacttatcgtaaactggtatgagtagatgaaaaactttgagacattaggcggtggtggcgatgtgtgacgtaattcacactttattattagaattttattgttttgatgcacatctccccagaaaattatgtcgatggaaa

SEQ ID NO: 22498 - DNA, 2329 bp, Oryza sativa
ggctttgtgggataggtctatcggaaaggaaggttgtcactttgatgtagccgtatttgatgcattatccctcaaatcttaaaatgaaaaaggctataaatatcatagtagtgtttcattatatatttcagtaggttgccctatttctatggtatatcccctcccccattagtttgaccttttagaataaatgctgtcaaactttgctcattattatgttgggttctatcttggtgatgaaagcattattaataaattggttattgaaaataatactatgaaaggtatatatttaaccataaattattaagaattaatgattaaaaattgcatcttgaggcccgcagcccacacatgaaactatatccatagccgttatggtttgcctttcagctagtgcatgttttaacgttgattgttttcgcaccgcaggacaagaatgcttttgctgaaattctgaagaaaatatcgaagattcagaagactaatggccacaattatgtcgtccttagagatgacaagaagtgaagagcaaaactaaagtggtgctttcttaaaatgcaaccttttgctttgctgtgccttttggcataacatgtttgtaagataagtgtattggaagaattggccttgtaacctgatgtatttagggcctatttggattgttaccctaccaattttttggtagtgccaaaatgtaggcaagttttggcactaccaaatctttggtaaagtaagattgcattgatcatatttggtttgctaccaatatatagctaaaatgtaaaattgtagtgaagaatattctagatgataccaaatctaaattaggtattaccaatgaataggcttcgatccaaattaaacacaactactattcaaattaccaaaatattggtagggcatgtttttggtaacaatccaaataggcccttagatcttttttaacttaaggtcattgatcacttatcattgttgctgccgcgcttttagacatcctactggaaaccagctgtttctaaaactacaggaaatttttggtacaaaatactcgctacagcagcggggttggtaagtaaaactgtagatttaattaatgttgagtagatttcacttcggacgatctttattactaccactgtcccaaaataagggcagccgtggatatccgtgcctaatgtttgaccgtctgttttatttgaaaaatttatgaaaaaattgaaaatatttagtcacataaagtactattcatgttttatgatctaatagcaataaaaatactaaccataaaaaaatttcaaataaaacaaacgatcaaatgttaacgtgaatagtgtaaaactgtacttattttggaatggagggagtagtttcatcatggattaggattagacctatgtttccgctcaacaacaatcctttgcgcttcagaccggggatcatgacttagacaacctctagtcatccatgtcccttcagtctaaatctgcacgacctctcctactccctgatgatcttgttgatccttcacgaccaccaatccaatgctccaatgtcccaatctatctatctatctatctatctatctatctatctatctattatattattaaaacagctttgaaaggaggcaccatattctgctgtggagagctagaagattatcgacattaatcgaagaaaaaatagaagaattcaaccgacgttggatctatgatggacatagattataacggtggagattgatcacactactatagaaatctagatttcgaatatgttttggagtccgtatgacacagttttaaaagaaattaaaggttagtactaatctgattccatgcgtggcttgggactaatgagactcggatttgacttcaagacccctccgacttgctgcttccataaaaagaaaaaaacaaggctgtagaaactatactaggtaattataaaaatggttttcaataataattccaaataaatttaaaaaatcatgaaaattcagaataaagaaggagtactatttagatatatctaaaaatcggaattaaaaaagaaaaataaaaggtgagttcaactagaaatacaatttaaaaataactgaaattcgaaattaaaaataagcactattcaaagaagagtccttataagaacccaatacgagattaattaatattcagaaaaaaaataaaatccaaaattattaaaaaaaggaaaagaagagttcgagtagaaattcaatttaaaaataaccaaaaattcggaattaaaattaagcaatattgaaataatagtccatataaaaacccaatacgagattattaagatt

SEQ ID NO: 22499 - DNA, 1941 bp, Oryza sativa
  unsure (1)..(1941): unsure at all n locations
atcgattcctgcagcgttttttaactgcaattcggaattaaatattatgtaatattgaaataagagtacatataagaatccaatagtagattaattaaatttttgaataaaaaaaataaaataaaatctaaaattagacaaattaaaaagagagtacaagtaggaatacaaatttgaaacaactgaaatttaaaataaaaaataataaaaatattaaaagaacacaatacgatatcagttaaaattcgaaacaaaagataaaataaattctgaaatttgaaaaagaaagataagatttcaactaggaatacaatttataaataactaaaattggtgataaaaaataaagactattgaaagaaaaagactatctaaaacatacgacgagattaattaagtaataggcctataaaggcgtagagtggtggcggttgaagggacatctaagaactattaataaatcaccaaatgacaattaaaaggaaggatgacgggcaggtcatgaagcaaccggtcaaggcggttggcaagacttctagaaagtaaaaataaaaaaaaaccctaatgataatcatatttgatttttaaaatctgaacgacaataaaaatgagaggcagcgggcgggtcgtacaggagtacaatggcggcgggcagagccgccgatggttgatgggacttctagaaagtaaaaaaataaattcaaacgatagttatgttcgatttttacaatcccaataacaataaagagtaggcggccggcgggttgtagaggagtacagtggcaacgtttgacgagatttctaaaaattataaaaacctgaaacccaaagacaataagttctaaaaattataaggtccgatttttaaggtttgtgcttctaaaagtaaaaaaaaaaacccaatgataattatgtttgattttaaaatctcaatgacaataaagaagggcggcagcgggcgagccgtagaggagtacaatgacaaagtcgctaatgttttggcagaacttttataaagtaaaaaatgaacataaacgataattatgttcgatttttaaaatactaatgataataaagagaagagccagtggacggccgtagaaggagtataatgacaacgtttgacaggatttctataaagtatactccctccatttccaaaatataaggcacaaccaccttaacctaaagaccaagaaatagttattatcatcttgtagtntagattatcctaataaatgtaatgcatgcatccaatagagttagagaatgtgagagtgaaggattttaaaaagtagtaatttaatggagaatatgtcatagttaatggcatgcatgcatgcatgccttatattatggaacatctaaaaaaagtggttgtgccttatattatataatggagggagtaaatgataaagatgaagcctaaccggacaataaacttctaaaattattagattcaatttttaaaggttataaggagaatgaatagaaacagatcgagcaagcaaataaagaaggatatgacagaaataaggggtagcaattggtgtgactttcaaaatataaaattagagagattaggatgataaggcatggtctttcaaaatcttaagacaacgagataactatttaataaattttaagtaaaatcatattaaaaaattatataatttacatgggtgctagtcgcgcaattgcgtgggccacccagctagttcacgttatccaatcaattgacggcccaagcatgtgccaccaaatcaccgataactgaggaaaatgggagccctcgcgccatggccgtgcgtggctgcgtcgctcgtcttcgtttcccaccgccccacgaggccatgacactcctatttcttctttcaaccagctacgcctttgtgcatgggtggatacggaattgctagaaaacttcagtatgttttttga

SEQ ID NO: 22500 - DNA, 9556 bp, Oryza sativa
accgcttatgtatattttcggacatgtccgaaagtaatttttggaatttctgaaaatatctagcaggcaattttggttctggatattttcggatttgttcgaaatgttttcggaatttccgaaaaacttagttggacttcactgtgtttgctgttctggagattttcggacttgtccgatgctaattttcagaatttccgaaaaatggaattattgcacataacgggcagatatgaagctgtggctatagatagcctcctctcaccaagtcaaggctgctgctctcattgaaaacttgtgcccttggcttactactcttgagatttacttttgagccttgcttgcttgattcccctctccacccgtgtttgattcggatttggtgtgtgtgagagttgtggtttcgagcttgtgtgagtgcttggtgttgtcttcgtgaagatttttgagcacttgcatcattcccgggagttctttgcatcatttattactcttggaggttaaggacttctagatggctaggtcactcttgagtcaccgatctacgtgtggttggccaagagaagtttgtgaaggtcggatctcacctccgaaagggaagagaaaccactagtggaaggaggagtgctttgtgcaatctcttaaggaaagggttagcgaagacccggctcctcaatagagagtagaatcccctcaaggattcgaatttcgggaacatctcatattgcatcaacgtcaatgatatccctttctccctcctctagctttgcttgtttgcgccgctataagtctattgttgtttgtgctagtatttcttttgtgtaggcagctagatctagcatttcatttcagttgcgcctgctatgttatttttggaatttccgaaaatcattttcggaatttccgaaaagtgttgcttccgcatttacttaagtttttgaattagcctattcatcccccctctaggcctaattgaccctttcaggaattatatttagctgtttgatcgtgtttgtagttatatttagctatttgatcgtgttcatttttgactacgtggagcctctctgcatgaaactctcatatgggttgtccggcccccacccaattcactaaacagtgagaacatatattagtcttagctgcttatacaaaagccatttttttttaaaaaataaaagtttatacataaggtggaacattgtgcaactatttatcatcccacaaaatataaaagataaaataagaccagtataaaataaaatagaaaattaattatatcaatagggagtaaagtgatctaatttagagagaacctattttacttagcttgaaacatccatctctataagcatagcattgtaagtgcttagatgcgtattcgggaaaaagaataactgcttagatgctaatggtgttccctttatcctatatagttaaggtttctccacaactttttttaatcaatactgatgaacaattttttttggtgagaaatcatacttttgaatcgtggcataattaatccagtttccacccttataaacatggcatacgatacatgcgtgcgcaacaatacgagctaacttcctagtttccttaatactagtgtccaactctaaaaatacttatattttggaatggaggtagtgaatattttggatctgctaagttcaaaaaagattatccgtttctcaattacagaccatgtaattgaagaataatattggaaatgatatgtcatatgtaggacagttcatcaaggaaccaagcagttaaaggaacaataaatgtcactgagcaaataaggcattaacaagcaaccagcaatcgaaaacaacatgatttttctatacgtacagtgtaaaaggcatggcaaataattacctttagtataaaaactagtgaatggatgacagatgcctactcccggggcttggggaagaatcttaaattgcagactccagattaaccatgaagacaccaatagctgttgccagaaataccacattatgttcctcagcaaagcccagaatattcattggtgccggtgtatcagtatcaggccttggttcgaaaggaaggagcctgtccagttcaatagttttctccagcacccatccagcagcagcactgtcactattgatcttatgcttccatagattgagactaaaatcccgcacagcaaggaagagaagcccaccatcctctgctggtgcaatctggtcacctccatcgccatgcatttctggtagcacatcgatctaggctggtatttgtgtatccaaatcaaactgaaggatgacggtcccaataacactttggaacaagcaataaaaaaaattcccaaccaggggtactagaacgagtcttgtgccccctaaaattaaacgcatttgagatgaccttgccccaattgccggtgtcggatgagtaaacgcaagtgaaaagccgcctccggtacttattgaagcctattaccaccacctcaaagggactggagtggcagccgccgtgcacatgcccatccacgcatcgcatcgcccagttggagacgtacgccggccggcgaccgaacggctcggggatatcaacggcgcgccggtcgccggtgacgggatcccacaccgtgatttgcaacaagctccggtcgtagataagggcgcggccgtggcggaatgcgaacatatggtaaaagtgaccaaaaaccggggggctgccaccgccgccaccggggagcgggagctgcagggagaaacgcgccgcggagatccggtccggcgggtccagcgtggggatgaagatgggatttctgtagctgaccttgaagaagccgaggaggggtggcttcccgtggtgggatcggaagcgccggaggaagacggcgtcggagacgacgcggcgccaccgcttgcagacgagggaggcgcgggggagggaggacggcttcgccgggaggcggaggaggatctcggagaggaggtcgtcgtcttccagtggctgcgcctgcgccggcgacggcgaggtggtgcggcgtcggtggctggtcatctccgcctcacacactactctagaggtggccaaacgggcggcacggcccggcccggcacgggcacggttccggcacggcccgtttcggcacggcccgttaggcacggctgatgaaacgggccgtgccgtgccggcccacgtgccgagccgccggcccaagcacggcccgtggatggccgggccgtgcccgtgccggcacggcacgcccgcggcccacgggccgttcggggcacggcggcccgtgaaggcaggccgccagcctgcagtgcactgtgcgcagtgttttttttttttaaaaaaagcaaaggaaatgtataaggaaaaaaaaattaaaaatggaaataaaatgtttaaaaaaaagtaatgatttactaatgttaaaaaatgaaaaaatggtatttaaaaaatagaaataaaagttttttaaaaaagtaatgatttgctaatgttaaaaaaaaagaaaaaatggtatttttttgttgtgttgaaaaatttaaaaatatagattgtgattcattattttgaaataatttaaaggtaaatccacacttgcgaaaatattgcaaaagaatttgttaaaaatagtaatgacctttattaatgtttatatcattacaggatacaatgatacatgctgcctcgttaaaaactttgtcatgtaaaaactcataggggaaaatgagaaaaccatgacaaagaaaagagtacagctcaaaggtcagaactacttctaacaaaattctactggggttggtctggatccaggtagagttgctcgaagtgggcggccaattcttggttgtccgcagtgtattgggcatgttgtcgagcaagctcccagtctttaacgcttagtagcatttcgacgtggtcgctgcgcagagtcgtcctccggtcttcgatgattcggccgcatagactgaaggccgattcggaggacaccgtcgacacgggcaccgtcaacacatcccgtgctagttttgaaagcacaggatatgttatcttgtggtcattccaccacccgaggacgttgaaatcttgtgcttcgtggtggatggcgtcgctgtccaaataaccggacaactcttcggccacaacatgcgaagaggcgtctccacttgtagccgacgaactgccaccaccttggattgaacttgaagacgatccaccccaaatcctaccccactgtatcttcttcttacctgtagtggggataggagggggtctccgctggcgaacttcctgaaactttacttcatatcttccaaaaacctcatataatttacgtctaacctcagtataaaaagaactataatctacacctatagtatctccaacaagtgataaaatagcagacaatccccttaatttacacctaggatctaaaacaaaagcaagagcatacaacataggtatatttttccaatatttcaaatatttttgtttcatgtgaaagacaggttcagttagaacgtcatcattttcgtattctttaaataaagtagcaatttcaagaaggttgtgcaaaattatattagcagttggataataaacatgtgacaaagttagagtacaatcataaaaagtttctagaaattggtaaaatttttggacaattgcccaaacatgctcgttcagtactgaagacccgtcactgtttcttgggccaccacgtgactgaacaaaatcagaaagtaaactactataaggtaaaacaacttttaacattaaatacgttgcattccaccgatgctctgcatcggtggcaaacttacgagcttccacaccggccgcattgcaaaacctcttccatgcagcaatccgcgggttagaagcagttaaccacgcgattgcttgacgaacagcatcgatgtggtcacctaccctcttcatgccagtcttaacaatcaaattaattatatgacatgcacaacgctgatggagtagaaaagattgagcatacacacaaaataaaggttgcaatatttcaatagctctagaattagcagatgcattatctagggtgacagcaaatattttatcagcaagattaaattcattaattacttccctaattctttcagctatgttttctcctgtatgtgagacatctattaacttaagccctaaaactctcttttgtaattgccaatcatcatcaacaaaatgaacaactacgctaagataatcctctctagctctactactccatatatctgaagtaacacaaacagagaaaatacatgtactaaacagttccttaagtgcagttgctttcttgtgataaacattctctaaatctctagttgatgtttgcctactcacagctttaaacctatggttatgagattgctgaatgtaatgttcaaaagcaggggactccccaaagttcaggggtaaatcttgcctggcgattaaccggacaagagattcccgagcaaccatgggatcgtactcccaactgcgtaccgtaccgtctgggtttagcataagttgctgctgccggagttgtattccttgcttcttggcacacgactccgcatggcgcttgaggtgacctgtaccaccagaagaacgagcagataaaatttgcctacatattctacaacgggctttcgatacctcccttccgtcggggcatgtttcctttatctcgtcgaagctttgccacacaccggaggttctcgatctcttcgagccggtgtgtgtcgaaacacttccgctcgcggttccggaaaatccttccgaagctgtctccgcctgaaccggtacctcctcaacgacagccgtatgaaccggtacctcctccacagatggtggagttggagccgatccggaggtaccgtcaaaccccgacatgtagttggggtcgaaatcacccaaggtgaacgacggcgactggtatggaaagttcggatccattctgaaaatttaaaccgacataaacaaattttcgaatatttattgaattcacaaacacaatacaaataatacacaaatttgaatattacttacatctttccaaccgcgagctcttcaaacctctgcgatcaaactgttgaactacgaaattaattttgatttttgacaaaatttgagcaaattttgtcaaaataaaaaaaaatgcacacttgagaacaaagagagcacttaaaacacttgagagcacaagatgaggagtgtgggatgaggagaaatggctggggttcatgccctatttatagggcgaaatttgagattttttggaattttttcgaattttttatgaattttttagcctcccaacggttattttcaaatttgaacggtcaaatagccgttagtgccacgtggcggcttcccattcgaccgcgcgcccgccctgtcagtgcgccgctggcgctttcggcctgacgggccgcccgggccgtgccgtgccgcgggccgtgccgtgccggcctgctacagtagccgtgccgtgccgtgccggcccgcgggctcggccaacggcccaagcacggcacggctacacgggccgtgccggcacggcccgttactgtagcaggccgtgccgggccgtgcctgctacaggaacggccgtgccccgggccgcccgtttggcccggcccatttggccagctctacactactccctccatccaagattttggttggacgtgccatgtcctattacaataaatctggacactcatgttagattcgttataccaggatgttgtactaggatgtgttagagcatctccaacagcctctccaaatacctctgctagctactctagcaaaaattactcatccaaaagcctctccaactggatggccggctggccaaaacactccctcccttagccaaatttgaccagccaaagtgattggctaacggtgagccccacgggcattcctcctcccaaaacacgcaccgcgaggggagatggatcggggcgacgagcggcttcgccgcgcgctggcggcgttcggaggcgacggcagcggcatttggagtcgagggcgcgacggcgaaatggcgaggccatcggtggcgtcggggtcgacggggcggcttgacggcgcatgagtccttcttcggcgtcggccatcggcggcatgatgagggcgacggggtagctcgacggcgagccgacgagggaggaacgaggaaggccggcggggagcggatcccgtcgttgcctcatgcgcccatcctcgtcgtcgtctagcggcctggtgccggccatcgtcgcatgaaaatagcgtcgccgccgccggctccccatccacgtgccccctcgactcgaggcaccgcctcctcatccgctgggtgggttggagatgggagggagtggcagtgacggcattgctcgacggcgaggttgagggagatgaggcggccggtaagagcttggccagaggggcaccggtggacggagcccgagcatcggcggcgggcggatagggatggggcggcggcaacagaggggagagggaaggggattttgagagaagtggaggaagaagaaagtcgtagagactgacacgtgggctctattatcatagactcagcataagcatagagaggatgaattggaagcctgttggagtaaaagagagtttgactagctaaattagatggagagttggccaaatagatatttggagagtgacatttagagagactgttggagatgctctcacctccaaccaaaatcgcttatatttagggacggagattatagtggtgtaatactgcactcttctctaatgtttggttagttggatgacttatgatgtgagatcttgtttggtcgattgttcttcctctatccaaaagtttaatacctattttttttcatcaagactaatttgtaattaattcattcatcatgtgataaaatcgatgaacatgtaaccaataagtactaaaatgacttcttgggctctcctaaaaaatttaatataccatatagtgactacaaatataacttatacttttgaaaaaaccaatgaatgaaatagaacttagacttttggatggaggaagtacttacaaatgctgcatactgcctctattccaaataaatgaatcagtgtctagattcattgtactagaatgaaatagaacttagactttgctacatactccctccgtcctaaataaatgaatcagtgtcaagatttgttgtactaggatgtgtcacatctagaactaggttggttttttattggacggagggaataccagagatattctttgattgttcgtatcagatcatagtatggttacctcctcttttgtagggtgagattaccccagcaattatggtgtactattcaattgcagttctattacttttcaattagccaaattttgttaaaatctgttgcatatgtaatgggtgaaaatcagtatgaagaattatataaaacaatgaattgtgctgcaacgataaataattcgctgcttagtctgaactttatatacgctataacatgtgagagaaaatgaaaaaaaaacagagaaaacgatagaaaagaaaaaaaatgtgcatctcgtcgtcgtcgtcattgtggagattatgggtatcccatacccacacggcatggttatccgactagtcatagggatagcttatatttatggaatatgtaacaaatcatgacttgggtattccgtttccatgtatattatggaacgacctaaagttctggtttgataatagatttaggaaaccgataccgtattggttaaggtttctatcttgtaatcctggccccccatcctatataaggtgggcaggaggccctctagggggcatgagacaactagatcgtcagatctatactacacccggcggattcaaatccccaaacaggagtagggtattacctctcattaagagggcctgaacctgtctaaatcctttatctccgcatccatccacttttaggtctcgtgcgctacccccttttcatattgccgaaaatttgtttcaacagttggcgcgccaggtagggggcgctgagttttccgactagtcatagaaaaattttctttatacgatattttccttttcctctgcctcactagatcaactggttcgccgttgactagtgagtcgggggctacatatgttatatcagattttttaataattttttatagtatttatcttgattgcttgcgacataatctgtgtacaaaagtgcctatcgaattatggagttctatctttctatgctttccgtttggtttgtcgatggatagttgcctttgagccgattcctagcacccgggggcccgttggatggaccgagtaacgcaaggtgctaagtattattcggaataaatcaaaagcatagagataagataaatttattttctgctctttacaattgcaaaagtacccgagcagtaaattctgattcgtgaaactttgttctattaatgacgaactcatgtcactcatacgcatgtttgggaagtgcctaggccgactcccgatgcttgggg

SEQ ID NO: 22501 - DNA, 1327 bp, Oryza sativa
tcagtcagaacatcaccaccggctcgcccccgtcaccgccgagtggtgtcctcgcctatacggttgggtggtcacaccaccgttgttgggcgtcattgtcttcaccgaccggccgccttcgtccgccgccgactggtgtcctcgcctatacggttgggtggtcacaccaccgttgttgggcgttgttgtcttcaccgaccggccgcctcgtccgccgccgactggtgtcttcgcctgtacggttggttggttacaccgccgttgttgggcgaatacgtcttcaccgaccggccacctcgcgcgccgcacactggtgtttccgcctgcacggctggcctattatgccgccgttgttgggcgtctacgtcttcaccgaccggccgcctcgtccgccgccgactggtgtttctgcctgcacggctggcctgttatgccgccgttgttgggcgtccatgtcttcaccgaccggccgcctcgtccgccgccgacaggtgtttccgcctgcacggctggcctattatgccgccgttgttgggcgtctacgtcttcaccgaccggccgcctcgtccgccgccgactggtcttgccgcctgcacggctagcctattatgccgccgttgttgggcatctatgtcttcaccgaccagccgccacgtccgccgctgactggtgttttcgcttgcacggctagcctattatgccgccgttgttgggcatctacgtcttcaccaccggcttgccttcaccgccgccgactggtgtctccgcttgcacggctggcctattatgccgccgttgttgggcgtctacgtcttcaccgaccagccgcctcgtctgccgccgactgatgtctccgcctgcacggctggcctattatgccgccgttgttgggcgtctacatcttcaccgaccagccgcctcgtctgccgccgactgatgtctccgcctgcacggctggcctattatgtcgccgttgttgggcgtctacgtcttcacctgtcacgccctgaagttcccctttctagctttaaaatttgtaaaataaatcgtccgaagaaattgttcaatttaacctagagctaattcctcaaattaataaatgcaaataataatcggaatcggcatgtggaatttttcttggattctacatgtcaaaatatgctaacaggatttttagtggaattttcagagcattggaaataattttaaccaattaaaataagcaaagtgcaatatttaaatccctagaaatccttttccttttctttttccctttttccatcctttttccccctcttttcctcctttgggccgccggcccatctct

SEQ ID NO: 22502 - DNA, 7593 bp, Oryza sativa
gtcgtcaaggattgcctgtggaatggaatcgcccgctgcgggagtcaagtcttcaggcttagctcgcttttatctttttccgctgcatttgtaatcttttgtatttttgtaagatgtggatctgtatgtcaacaattgtcgtttgtgtaccctggctggtcctggacaggggtttaatacacattcagcttagagattctggttcgtgaatttctgggcgtgacatcactgaccggccgcctcgtctaccgccgactggtgtcctcgcctgcacggatggcctattatgccgctgtttttgggcgcctacgtcttcaccgccggcctgcctccgtcaccgccgactggtgtcctcgcctatacggttggttggtcacatcaccgttgttgggcgtctacgtcttcaccgatcggttgcctcgtcgccgccgactgatgttaccgcctgcacggctggcctattatgctgtcgttgttgggaaactacgtcttcaccgaccggctaccacgtcgccgccgactggtgtctccacctacacggatggcctattacgccaccgttggtgggcatcttcgctttcaccgtcaaccgcctacgtcgccaccgactggtgtcttcattgttattgctggatgactttgttcccacattggccacctctgccattaccaaggggaatattacaaagctaagtcatcattgattttctttatatgatattttcctcttcctctgcctcgctacatcaactggttcgccgttgactagtgagtcgggggctacagatgttatatcatattttttaataatttttcatagtatttatcttgattgcttgcgacataatctgagtacaaaagtgcctatcgagttatggagttctatcttcctatgctttccgtttggtttgtcgatggatagttgcctttgggccgattcctagcacccgggggctcgttggatggaccgagtaacacaaggtgctaagtattattcggaataaatcaaaagcacagagataagataaatatattttctgctctttacaattgcaaaagtacccgagcagtaaattttgattcgtgaaactttgttctattactgacgaactcatgtcactcacacgcatgtttgggaagtgtctaggctggctcccgatgcttggggcctatgactagtcggacagagtgtttaaacgtgctgagtcatctgctcggggaaatcaaaattgacaagaggagaaatatatatttataaatatttttaaatacttgaattttcctcgagtattatatttgtatcagatactactcatcctatatgtttgttctacaggatccagatccagatatgcataaaagggattcatggctttaagcttatctcctacgcttcaggaatggatcagccagaacattaccaccggctcgccgccgtcgccgccgactggtgtcctcgcctatacggttgggtggtcacaccaccgttgttgggcatcattgtcttcaccgaccggccgcctcgtccgccgccgactggtgtccttgcctatacggttgggtggtcacaccaccgttgttgggcgtcattgtcttcactgaccggccgcctcgtccgccgccagctagtgtcttcgcctatacggttggttggttacaccgccgatgttgggcatctacgtcttcaccgaccggccgccttgtccgccgccgactggtgtttccgtctggacggctggcctattatgccgccgatgttgggcgtctacgtcttcaccgaccggccgcctcgtccgtcgccgactgatgtttccgcctacacggcaggcctattatgccaccgattgtgggcgtctacgtcttcaccgaccggccacctcgtccgtcgccgactggtgtttccgcctgcacggcaggcctattatgccgccgatgctgggcgtctacgtcttcaccgaccggcttgccttcgccgccgtcgactggtgtctctgcctgcgcggctggcctattatgtcaccgttgttgggcgtctacgtcttcaccgaccggcttgccttcgccgccgccgactggtgtctctgcctgcacggctggcctattatgccgccgtttgttgggcgtctacgtcttcaccgtccggcttgccttcgctgccgccgactagtgtcttcgcctgcacggctggcctattgtgccaccgttgatgggcgtctacgctttcaccgagcggttgccttcgccgccgtcgactagtgtctccgcctgcacggctggtttattatgccgccattgtaggacgtctacgtcttgtccgaccggctacctcgtatgacgccaactggtactatcatcttcacggcaggccacgtcgtagccaccgcaaataggcgttatcaccttcaacgcaagctgtctacgtctgctgccgactggtttcttcactttcatggctagcctattatgccgccgctcaacctaccggagtatctatcttcacaactacacgtcttcgccaccggtttgcttctgttgacgccgactcgtgttcacttcatcacggctatgcaactttgccaccatggtggagcgacttcatcttcggcacctgtaaactttattgcctctactttgcaagctttgctacttcatcgatcacgacgtctacaagagcctcgacatctcggcatgcgtcaacaaatataatgctgtattattttactacaacaagtggtgttccaatattcaatatttctactcggacatcttctatgcgtatcttcactcaagcaatgactactcgacgacaagaagctacagttcctgactctatgttcagttgtttcccaactaaccaaagagtcgggggctacacaaatacaagactctcaaaattcgacaagctgaagcaatcaattaatccaggagtcattttcttcatctttgcttcggagcagacgttctacttcagcaacttcaattatttcatcgacaattttggcttctcagcgtgatgagggatatattttctctttctcagcgctgccataatctactccaaaattctcaagtatcaagttcaagatttaatctacatgtttaggagtatggagttatcaaccaatcaactcagattcgatgagttagacaacaacatctactttcctccaagtgaagcttctgtaatagctataacaccatgttctactgccatctttacaaatcaaggggtgtggcatcaatcttcgttatgcacacatcaagaaaattacttgagcttcgatgtcttctcaacagtttgatggattattgtcattgacatcatcaccagcacctatacttcatcggccagacgtctccgccgttactaatgggtgactacatcttcgtctccggttgcttctgtcattgccagcttgttatttcgccttcacggttgatctactacgcaaacgctgatgagcgtatttgtcattatcatcggctactacaccgctattgattggatcgccgacaacgtcatcttcatcaacatcctgtcaaagcttatttaacatagccaactctattgctattggtgggaacttcatcatcatattcgatcatctctgttgctgctaatcgtcattacggtcggttgtgtttgtagtcatcgactattttcttcatcttcatgattgatggatttcgccatcagcgttgatgcgcgtctacatcttcatcgtcgggttgctttcgtcgccaccgactgctttgtcgttgttgttgggcaccttcatcttcactaatagctgacttctctgttgccgactggtttcttcgcctccatggctatgcgacttcatcaccttttattggtgtcattgtttttactaccaccaacatcttcgtcagctttgatggatgatatcatattcatgttggtcatttcatctccatgctgactgcatcagttactatcaatggacaaatgtgactacaacagaaggataagttacatgcttaggggctcatcagcacaagcacgaggattatattttcaatttggacttcttccggatacattcaacatgaattcatgatcatgggtctattttctatgctcaaagactggactatttattattccccgtaagggttattaactaaatacttgcgtcagtcgggatttaattattatatctattttggagtataccataagggataatcacttagatcataagctattcagatgagctacacttggtctacattacccggaagatttattactcgggagcatgttacatgcgtcatcctttaaagggtgtcctaggcctaatatgtctgtagcccatattttcaggtgtggcctgtcacgttcttttagggacttaggcactttttgcttagaccaaagtgcgcgtgatcaagtgcccaataccttaaaatccttttataccgcagttactcaactttttaggagttggtacaatgcatcttaaaaggtgtcaaacagtaaagctatatagctatcccgctgacttttttatataagtcaaggtgctgtttgggttttcaagcaattgattggatataatatcgttgctttttgccacgtaagtgtgcatttttattgaccaatattatggcttaggctgattatatatcttggtcattttccaggcggttggtaaatcctttatgagtttatttactcggattttacaccacatatgccgtatatttccgggtatggtgaaaccatgtgtcttttagggatttaagcacatctgttaaagcagtgtgcgcatggcgtatgctcaatactttagaaatttctttattcacggcattcaaacttttttatagctgttttgctatgtgaattttcaatgatgtagtcaactttaggttgcacgcatcaatttttacaaagcagtcggtatatcacttggatcatgttattttggggattcacaccgcatatgctatatattaatatcaagtcacttggttgactatatttaaattattcatcagccctccacagtctttagatttggtaaaaagtactcgggagatcatggcgaagatgattgaagcactcggctttggagtaatctagttcgagagaagattatctttttgactgtgaaggtctcaggggctactgtggagattatgggtatcccatacccacacggcatggttatccgactagtcatagggatagcttatatctatggaatatgtaacagatcatgacttgggtattacgtttccatgtatattatggaacggcctaaagtcctggtttgataatagatttaggaaaccgataccgtattggttaaggtttctatcttataatcctgccccccatcctatataaggtgggcaggaggccctctagggggcatgagacaactagatcgtcagatctatactacacccggcggattcaaatccccaaacaggagtagggtatacctctcattgagagggcctgaacctgtctaaatcctttgtctccgcatccatccacttttaggtctcgtgcgctacccccttttcatattgccgaaaatttgtttcgacagtcatcccgccgcaccaatcgccaccgcaactcctttcctccactgcaccgattgccgccgcagctcctctcctcctccacaccggttgctgtcgtcctccacccgctacgccagtcatcatcatccacccgttgcgccagtcgttgttgtcctccacccacttcactggtcgctgccgcagccacctctcctcccctgctgctcgctaactccccccccccttcaccgccccgcctcttgccaccagatttggtggcacctagcctgtagcccccagacctggtggtcggtggcggaagaagtggcagaagaaggtgcaggacggcagcgattgaagaaggtggccaggtggcttgcggcggcaagccatgccctccgttgagctcgtcaccgtgccctcccttgagctcgtcgctaggccatcacctctggctttgctctgtggccaggaatgaggagaggggaaagggcgggacggtgaccccatcgcgcgccccgtgcacgcacgggtgcaacacgctgcatcaggcgggccaggacgagctacgaagctcgattcccgtgtttctgctcagcctagccaagaggccactttcgcatcgtctcattctggctcacgtgctggtgaaggctaccaaacaaacctagtggattcctcacggtcacgcttcaagacaacaaaggtaataacttcaaggtaaatggtcatcgcttaagagttttcctaaatatagttgaggggttatgataggaaatacacttagtggatttggtcctttctctaaagtccatcctaagcctattgcaccctgcctgagccggggtgctctggggcctagggtggtttggccgaaccaagcctggtgtcaccaacccccaaccttcactcatctcggcctgctggtgtcccccttgctatcactggtggatcataatcaccctgttttcaaacttttcatcagtctcctctgttcttttcttccacctccgagttcatctttctccccttctcaatttctcttccgaaatccccaaatccatggctgggaagtgtcacgcccagaaattcactagtaatttccgaactaatttgtgcataaaatcctcgtccaggaatcagccgaggtacacaaactgacaattttaatatacaaacccatcataataataacgttacatacttacaaaagaaaagaaaacaacagcggaattaacggtctagcgatggcttcagctccactcccacaggcagctcaactggggtataagccaaacgtcttctccttctggatcctttatcttcaactgaggtttgatgattattgcaagaatgagcatatgacatactcaacaagccacacagcaaatatgcaagtgcacaaggataccaaagaatggcataatataggctcatttgcaaaagcagcatttagcaaagatttaagataagtaaaacagtagagtaattaatcatcaattttaatcaacactgaacagcacacccatgctgctcaggcccaaccaaacctgaacaaccaaccccggtcgtacagatcaaacctccaaaccaggagtcaaattaattctcaccttattaacattgatgagtagtgtgaaactaatcacgaaaaacattgctcaactcgcccataaccgcggtggaggggacggactgttgtcagatgcaccgttggcacgtgctccattgatcggctcttcgctgccactggcgttgttcgagtcgcgtgaaccattccttatctccatctgaaggggataggtagaaatatgagaaaaggaagaaaaacagggggctcagaaactaatcttgcttatgaatttaagtgcaattatcttaatcttgattaaaacactgaaaaagaggcacgcaactcctaattgaggcagtcataccactgacacatgatatcgaccgccgactaacccacaagcaacaaacctaaacacgaaaactagcaagcaaacagactaagaaggcgataaaact

SEQ ID NO: 22503 - DNA, 29445 bp, Oryza sativa
aggaaaaaaaggaggaaaaaggaaaaagaaaaagaagaaatgatttttcctgggattaaaattgcactttggtgatttttaattggttaaaattatttccaaggctctgaaacttccattaaaaatcttgttaatgcattggagcatggggaactcaagaaaaattccaccacaccgaattcaattattaattgcatttattaattagggaattagctctaggttaattaagataatttcttcggacaatttatttaaccaattttttttaaagcaagcaaaaggggaaacttccgggcgtgacaaacctaccccccttaaacggaatctcgaccccgagattcggaagagctggcgaagaggtgcgggtgggtggccttcaactcatcttctctttcccaagtggcctcttcctctgagtggtggctacactgaaccttgcagaatcttattactttgtttctggtccttctctcgctggtttcgaggatacgagtcggcttctccacatacgtcagatcttcctgaatttcgatgtgatccggacttgcctgttcctcaggaactctcaaacatttcttcaactgagagacgtggaacacgttgtggatgccaagcatgttggagggaagctcaagctggtaagcaacttcacctctacgttccaagatcctgtatggtcccacaaagcgtggtgccaactttcctttggtttggaaacgatgtactcccctaagcggagtgacacggagatacacataatcccctgtttcgaaagcgagctcccttcggcggttgtctgcatagcttttctgccgagactgcgcgattctcaatctttccctaacagctctgactttctcttctgcctcatttaaaacttctgtaccaaacaattggcgttcccctgtctgatcccagaagagcggagtacgacaccttcgtccatacagtgcttcaaacggtgccatctgcagactagcttggtaactgttgttgtacgagaactcagcatacggtaagcttttgtcccatgctccaccaaagtcaagcgcacatgctctcaacatatcctctagtatttgattgactcgctcagtctggccatctgtttgtggatggtaagcagtgctgaaattcaaccgggttcccaattcttcttgtaatttctgccagaactttgaagtgaattggcttcctcgatcagacacaatcttcttaggtacaccatgtaaacacataattcttgccagatagagttctgctaatttcttccctgagtaggtagtgtgcaccggaatgaagtaagccactttggtgagtcggtcaacgactacccaaatagaatcatgccccgatgacgtcctgggcaaaccggtgatgaaatccattccgatttcttcccacttccattctggaatctgaagtggctgtagcaaacctgctggcctttggtgttctgcctttactcgttgacagacgtcacagagtgctacgaactcagctatttcccttctcatgctgacccaccagaacttttctttgaggtcttggtacattctggtactgccgggatgaatggaatattgagtttgatgagcctcggttagtatcaggtcttttaattccttgttttcgggtacacacaatctttctcccatccagattgttccttgttcgtcctcaacaaaacctcgggcttttccaaccctcatgttctttttgagctctgctatttcaggatcacttgcttgagctatgcgaacctgctccatcagtgtgggctgtgcctctagggcagccacgaatccgcgctcaactattccaaggttcaaatgttccaaatcacgttgaacctcacagcatagttcctctacccatgcgacgttgcagtaactcttcctgctcaaggcatctgctaccacattagccttgccgggatgatagtgtattcccatatcataatctttaattagctccaaccatcttcgctgtcggagattcagatcaggttgggtgaagatgtactttagacttttgtgatctgtatatacctcacaacggttactgatgagatagtgccgtcaaatctttaaagcatgaacgactgcggccaattccagatcgtgcgtcgggtagttgccttcatgaggacgcaactgccgtgaagcataagaaaccactttgccatcctgcatcaacacacatcctagcccctggcaagatgcatcacaatagacctggaaatctttcgtctgatcaggcaggattaagactggtgcagacaccaaccgtcgtttgagttcttcaaaactcctattgcattcagcagaccagataaacttttcttccttcttcaatagctgtgtcattggcttagcaattttagagaagttctcaatgaaccggcggtaatagcccgcaagtcctaagaaactccgaacctgagtgactgtccttggtggggtccatttggtaactgactccacatttgctggatccacagctactccttgagcattcacgatgtgaccgagaaactgaacttccttaagccagaagtcgcacttgctgaacttggcatatagttggtgctcttttaacttttcaagtaccagccgaagatgctgctcatgttcttcctcggacttggagtagataagtatgtcatcgataaaaaccacgacaaacttgtctagaaattccataaacaccttgttcatcaaattcatgaagaaggcaggtgcattagtgagtccgaaagacataactgtgcattcgaacaacccgtaccgagtgatgaatgctgtctttggaatatcctcttcgcggatcctcaactggtgatagcctgatcgcaggtctatcttagagaacacagtagctcctttcaactgatcaaacagatcatcaatccttggcaaaggatacttgttcttgatggtgacctcattgagtgcgcggtagtcaatgcacattctcttggttttgtctttcttctccacaaagataaccggagcaccccaaggcgacgtgctcgggcggatgtatcccttctgtaactgttcatcgacttgcttcttgacttccgccaactcgttggctcccattctgtaaggcctcttgtggatcggtgcagttccaggtaccaagtcaatccggaactcgatatccctctttggtggcattgttgtcagatcgtccggaaaaacctctggatactctctgactatgggaatatcctccagcttcttagtgattttctccactgctacctcttgttcttcaccagcagcctggtttaaactaatccctggcttccgcggcactagagactgggaggttaccacctctccttttgcattggttaacttgatggtgcggctggcgcaatcaatcactcctctgtgccttgccaaccaatccattccaagtatgacatctaggtccttggattcgagaagaatgaggttggctggaaaaatcaacccttgaatttcaactgtcacagatgggcagtagtgagttgtggtcatgccacctccaggagtatgaactcgcattggtatcttaagcttcactaaagataacccatgtgcaccagcaaaacgcttggaaataaaggaatgggttgcaccagaatcaaacaatattactgccggtgtcgagttgacggggaatgtgcccaatataacctctggtgctgactgcgcctcctctgcagatgcatgattaacacgggcctgaacgaacttgggtccagcacgtcttggcttcgggcactttccaaccgtgtgtccgggtttgttacaattgaagcagagttcgggtttttctcccaacctcttgggctgttctggcagagctggctgaactgattgagctggaatctttagtgaactcggagtagggttgagactgtgctgctcactgttgttgtgactgccactatggtggttcttgttgaagctacccgggtggtagggacagtgctgtcggataatcatggtggaaggtccaccgtgacgtcccatcgtgaaacgaggcttctgactcttcccctggggagtcctgaactgagctgccttcctcttacggtttattttgttaccgtgctcctcctgacggatagccttatccaccagcttctcaaagtcctcataatctctagagatcaactggttagtcaattcatcatcaagaccagacaaaaacttctcctgcctctcggcatcggtacgcacgtcctcaggggcgtagcgcgcgaggcggttgaactcatgcaaatactctataactgttctggttccttgttgcagggaacggaactctcttcttttgtgccacaattccctcgggaacctgtgctttattgaaactatgacgaaactctgtccaagtaacctctgccccagctggacgggtcaccatgtagttgtcccaccaaatagaagcgggaccttgtagctggtgtgtagcaaaagcaaccttctcctgctcgttgcattgcaaaagattcagcttcttctcaatggcatgaagccagtcgtgggcctcgattgggttggtggtgcttgagaaggtgggcggcttgacacgaagaaattctaacaatttggactgaggaggcggaggaccaaattgcaggttctgctgctgcagctgtgcttgctgctgcacctgctgcatcacctgatggtactgttgctgcatctgttgcatcatcattgtcatcatctgagtctgattgtccaacacctgagcaattgttgggttctcgggcggtggggacggactgttgtcagatgcaccgttggcacgtgctccattgatcggctcttcgctgccactggcgttgttcgagtcgcgtgaaccattccttatctccatctgaaggggataggtagaaatatgagaaaaggaagaaaaacagggggctcagaaactaatcttgcttatgaatttaagtgcaattatcttaatcttgattaaaacactgaaaaagaggcacgcaactcctaattgaggcagtcataccactgacacatgatatcgaccgccgactaacccacaagcaacaaacctaaacacgaaaactagcaagcaaacagactaagaaggcgataaagctaagggcggcgactctgaagctcggggcggcgcttgcaaaagagggataggactgacatctaaagtagacaagggataggaaccaattcatgctcaaatccaaattaaacaaagcaaaagaagactcaaataagtaaccgagcatgatgatttttatgcatagaacatttttcatgaactcaaataaagacactaatgcaactaaacagtaaattaatgcatagactagttgcatggaaaatgatgcgcataacattgcccccatcggatatagacacgacctaatgcataacccccaataaattcccgactgactgtcgaataaactccaactaaaatttttctaaagccctagactgagctaattttttttaaaaaaaaatccgatctgaaagaacgaccaagatttttcccgcaaaccaaagaggcaaaactccaaattttcccaaaacaattccaggtgcaaaaaggcatatgcagatgaaaaaaaaggggttcagagggctcttagggtttccagttggcttgtcctacggtcaaggtcggctctgataccaacttgtcacgcccagaaattctcgaaccagaatttctaagctgaatgtgcattaaatccctgtccaggaccagccagggtacacaaacgacaattgttgacatacagatccacgtcttacaaaaatagaaaagattacaaatgcagcggaaaagataaaagcgagctaaaccgggaagcttgacttcagcagcgggcgactccactccacaggcaatccttgacggcagcgacgaaaccaactttgacaaaacagctccaactaggaagatcttcagctctggtgtgggggaaaagagagcaagactgagtactacccactgtactcagcaagtcataccggaagaggaggtatgatgcaggatataaccaaaggaggctagaggttcttttgcataaagctagcatttaaaagcagtagttgaaggcagtaaaacagttgtagtaattaatcaatattaaccaaacactgtccaacgctacaccacgttgcaacaggcccaaccaaccacctgaactacagcagttcattaagctaaactaggggtgagactaatcacggtgaatctggttgatcgcccataaccgcgggcacggctattcgaatagttttactctggccagaggtgtacaactgtacccacaagacacgattccacacatgtcgccatgccccgaagtatcaccatgatactgcaaagggggaaatcgtgacaagaccctccacataaccctcccctaaccatccacaccacgctaaggtttcacccccacccctcaaaaggcagtgggcggtcccctcttgcgccgcggtgaatccggcagctggacaaccggacaccccggccgacccaactccatcacgcccaccctcgccaccggtgcctaggaaagggtcgagctatacttcagatcaagcagttacccactcccgcttgtggtaagcacggtaagtctcccagggtttcccgtgaaccggtccttaattgccatgggtgcgaccagcaaaaccatgcacccacaacccaccattcaatgtattttaattaactaacaccattgcggtggcaccaatccaaagctatgctcatagtcaaagtctatgtaataatgtgatccccatgtgtgtgctaattgaactaagcatggctaagcatttcctaaaccaacatctagtcattttgatacccaagttatcaatggcataaggtaaacaataaatggctgagtattaggacccatcccacatgacattgtaaaaggatgcaacatttaatagaaatacgggatatttgtaaattgggtacaatatgatcaaacgtattgcatgacttgccttgctctcgcactgacgagacctcagcaacgtcttcgagaaaccgtggatcgacgaaacggccgaaacctaagcgacgaacaaagcacacaagcaaaacatgctataagactactgaaacaggaaacaaaactatttttaatggattctttgcatttttcttgatttactgagacttgaatggacttaaacggagctcggatgaattacttatgaattttagaagataaactgtgtttttactaataaagaaaagtccttaatcaatttattgcgcaataaagcccagggctgacgtcagcgaggggagggggcggcgccgacaggcgggccccactggtcagcggcactaagggagggagagggggcggctggcaagcgggccccactggcagcggcacaaggggagagggagggggcgtcggcatgtgggccccactggtggcggctaaaagggaggggtggtccaccggctggtgggccccaccgggcagcggcacagggcgggagaggggcgtggctgttggcttggcacggctcaagccggccggccatggcgaggcgacgacggcgcacgaccgccggcggtgaccggcggcgcggggagacggcggcggccggcgcgaaggcggcggcggcagccgaagacgacggcgcacgcgcggagggcggcggcgctcacgggggagaggaaaggaaggaggaaaggggattcctcaccgaggcgatggcggcgaccggcgtgggaagagacgagcggcggccggcgcttccgacaacggcggacggggtcgagcacaacctgggaaaggcgatgaccgggttaggggaaggggaggatgaccacggccactagagcggccggccggagttgggtggaaatggagagctcaccggcgtgcgagagaagcggcgtttcggcgacgattggcggcaaccgagcggcggccgaggtagctctcgcggcggcgaagctaacggcggtggcgggttggcgcggcggcgaccctagcggcagtggcgcgcggccgaaggcgacggcaagcggcggcgctagcaacaagcggcgcgagctcggtaggaggcacgggaggggacgggaaatgggtgaaacgagagaggggactccgggaagggtttttatgggcgaaggaggggcggacgtggccggggatggcccctatttggccggcgatgtggggagtggagggagagtgagagaggtgggttcgaaatcgaatcccgccctctcgagcgcgcgcgcgggccgggagatgcgggggaagaggcggcgacgtgggggggacgcgggagcggcgcggcgtgggcgcgggaagagcggaggaggcggcggcgtggcggattcggcggcggttgccgtcggaggcgggtggctggaggaaggggacgacctgacaggtgggccccacctgtcagcgtcctggagagagggggaaggagaacgggccggccaacaaggggaggccgagcgcgggcgacgggtggactgggccgacggcccaacaagaggaaaaaaaggaggaaaaaggaaaaagaaaaagaagaaatgatttttcctgggattaaaattgcactttggtgatttttaattggttaaaattatttccaaggctctgaaacttccattaaaaatcttgttaatgcattggagcatggggaactcaagaaaaattccaccatgccaaattcaattattaattgcatttattaattagggaattagctctaggttaattaagataatttcttcggacaatttatttaaccaattttttttaaagcaagcaaaaggggaaacttccgggcgtgacagtacagttgcacgctcatcactgaactacatcaatgacgggaatgcaaccatacctacacacaaaacaaacagcagcgttctaccctactaactattcttcaaagatagtttggcggcataggttctaaggtaggatccaaacttcattccatcttgaccacttggcacttcagatcgatcatcacattcatattcctcgatccactttacttaacctccataagtagacctcattggcgtcttcaagtttcaacaactagtttcagaactactcaagttgaacgagagaggagagtagacaatgaaacaatttgcaaagaattctagataaggaagaaaggagaaattttcacaaatcatgttttcggaaaatttgtccttaaggtttgaccatttggcttatcctacagtcgagatggctctgataccaacttgtcacgcccagaaattcactagtaatttccgaactaatttgtgcataaaatcctcgtccaggaatcagccgaggtacacaaactgacaattttaatatacaaacccatcataataataacgttacatacttacaaaagaaaagaaaacaacagcggaattaacggtctagcgatggcttcagctccactcccacaggcagctcaactggggtataagccaaacgtcttctccttctggatcctttatcttcaactgaggtttgatgattattgcaagaatgagcatatgacatactcaacaagccacacagcaaatatacaagtgcacaaggataccaaaggatggcataatataggctcatttgcaaaagcagcatttagcaaagatttaagataagtaaaacagtagagtaattaatcatcaattttaatcaacactgaacagcacacccatgctgctcaggcccaaccaaacctgaacaaccaaccccggtcgtacagatcaaacctccaaaccaggagtcaaattaattctcaccttattaacattgatgagtagtgtgaaactaatcacgaaaaacattgctcaactcgcccataaccgcgggcacggctattcgaatagttttactctggccagaggtgtaccactgtacccacaagacacgattccacacatgttgccatgccccgaaataccaccacggcattgcaaagggggaaatcgtgacaatacccttcgcacaacacaactcactacagtgcaccattcctggatgataatcacccccttataaaacaaggcatggactccccagcgacccccacggacttctcgccgcttcacagtctggcacactataatgaaccatgctatacaaaaggtaaagccgttgcccatgctggcttgtggttggcacggtaaatgtttcacaacagtagctcgcgaaccggtccttaattgtcatgagcacaaccatcaaaaccatatgctcacaacccaccttaaccaggttttaattatcaattaattaacatcacacgattaatcatcgtgagctaccattaaatataaccataattaaaataataatgtaacatagtttctaattaatccctttagttagctaatgtttctaagcatggctaagcaaacttacatatagcatttagctgaaccaatccaacatataaggttcatgctaatcaaattataacccataggaaaataagatcatcttcggccattaattaacggggaaaggttcaccacccgatgacattaaaaaataatgcatagttgaaataaaataatagctttaaacgggttcaacatgctcaaagggttgtttgggatctgtgtgacttgccttgagtttccgcaaacacttccgaaccttgctcaatgaaaacgctctccttcagaacgtcggaaactaaagcaaaagaataaaaatcaacaaaacagtacaaaaacaagcataaacagtacatgtggatatttttaacatgtagatcttgattttagaaaaatttagcaacttgaaccactcgaatcggatctacagttatttagttatgattttccgaagatttaatctattagaaaaacgggaaaaagaaaaaccgatgatgtcatgatgacatcatcaaaggtggccggctcggattggcgacctcgccggagctagggtggtcggccgggattttggagaacacctacgcgtagaggacgacgagacgaacccaacggtactcaccaaagcgtccaacgacgagagacggcggccgacgacgagcttgtgcggcggcggcggttcggtcgacggcggcgacgggtctccggcgaccggcgacagcggggagagggcggccgaggttcctcacctccgtgcgcacctaacggcggcgaggggaagcggcggcgacggcggaatcgacggcgcggcgcggctgggcgtcggccggcgacggcggcggcttgctcggcgtggcggcggcgctacggagcacgagagaactcgggagatggggcaaacgaaagaggaggactagggggtcctatttatagccttggattgaagagatcggactcctcccgcaagaaatcgatccgggaaaccaaaaactcggttttggagataaactcaaaaacgagttcgattcggataaaatactcaacggtttgctccgattcttgggggaaagaatagagcaggataagaggaatatttcccctcaactaattttgcaaacggagctccggatgtggcggatttaacggaggaagcggcggctgcacagggcacagcacgggcggctcggctctgtccatgcttgaagataaacagtgccagggaggtaaattagactttcggctgggcttctacttccaagcactgattaaaggaggtacgcaaaacagacttcaggaaagagaggaaaagggctgcaggctgagaggagactgggccgagagtgagaggacttttcctaattcggcccgaaaaggaaaaggtgaattttaattacttttccaattaaattaatcactgaaatgatctttgaattgttaaaaatacttccaatgctcaaataatttcaagaaaaatcctgaaaatacttggacactcaaagtacttaaaaaaattataatcagaccatttaatgattaatttaatatttaaataattgctgaactgctctttgtatgattaaaattaataattgagctccgaaaaatccgagaaaattccagagagtataattaaccatggagaatttaataaaaattaaatccatccatgctttatatttaggaaattttatttcccacatttaacttcacttgtaaattaatgaatataaattctgataataatttattaaataatttataaatcctgaaacgaaaatcagggtgtgacaggaaggtcttgatctccctctccgattccaactccactttccgcctcgagaggagatcgaacccaccaatctattggtcttaatgcttgaatattgcgaaccacagatactggaacccctagcgatcttgcctctggtcaagcgcgacaaggggtcgggtggtggccacgatgtttggtttggccgaacctggatctagccccctcggcaccctattcaaccgtgcactcgccttcactgaggaggatacaaaggggtccagctgaagcatctatgctcgcgttgttaattttgataattaatgataagcgctaattatggactaactattctatttgagttatgcattttgagttaggactacatgatgcatatgccatggatgatcaccaaggattaaaattaatggcgcaaagaaatggaaccaagacggtgaatctagcgttttattttaaattgatcgagacgttgagcgatcaaattttgctaggtttatttctaagcttggtcatactattaagagaggtaataacctaagcaaaaagatgatcaaaatgccacattagatcatatgtattgtcacttggttcgactacatatttcttttctccctctctgtggccggtctgaccatgtgccacatgccggtttgaccgtgcgtgactggccggtctgatcggaccagggccggtgtgaacgagcggtggctataccgaatggtgtggcctcggtctcgcaagaccgaggcgccagtgccgtcaccggtctaaccgagggccaccggccggtctggccggcatgtccaaccggtgtgactgtgctcagttcggtctgaccaggtggctgccgtgtcttttgtgtggccttggcctatcaagactaagccgatgagagccgatgttggtgtgaccgagctgaaggcattctgaccggcaggctgttgccagggcattaaatgcactgtaacgactacttttctatttgttatatttgtgggcggtctaactagccaccccatggcggtctgatcgataggcaacagaagttggggaatttgaccccaatggcttgtttttgtgggcggggatataatacccccccctagcagcaaggggactctcttggtacttgcttcatttgcatacatcccttgcatctcctcacacacatccttgagcttgtgttcatccttatgtggtgtttgagagtagtttgagcttagagtcaagtgcattgcttcattctagagctagtgtggcctttgatcatctccgagctaggtcatcgcttattactcttggaggtcgccgcctcctagacggcttgtggaggtgcttgcccgtctccaaggagattgtggagaaggctcggtgccggttgtgagtggtttggagttcactaccttcggagtgaaggaagaactaccctaatgatcgaggcttgagtagtccacttcgtgggtcggctcccaccttgcccaccccttgacgaaggggccttgcggtggcttcgtggttttgagtggttgtcacgcccagaaattcatgaaccagaatctctaagctgaatgtgtattaaacccctgtccaggaccagccagggtacacaaacgacaattgttgacatacagatccacgtcttacaaaaatacaaaagattacaaatgcagcggaaaaagataaaagcgagctaagcctgaagacttgactcctgcagcgggcgattccattccacaggcaatccttgacgacagcgataaaaccaacctcttcgagacatctccaactgagaagatcttcaactctggtgtgggggaaaagagagcaagactgagtactacccactgtactcagcaagtcataccggaaaaggaggtatgatgcaagatatatccaagggaggctaaaggtcctttcgcataaagccggcatttcaaagcagaagttgaaagcagtaaaacagttgtagtaattaacccatattaaccaatcactgtccaacgctacaccacgttgcaacaggcccaaaccaccacctgaactaaccagttccaaaagctaactaggggtgaaactaatcacggtgaatctggtcgaccgcccataaccgcgggcacggctattcgaatagttttactctgatcagaggtgtacaactgtacccacaagacacagccccacgacacgttcccgtgcgccgacatgccaccacgacataccggaaggaggccgtgacaggaccctttgcataaccccctctaaccgatcgcaccacaccttagggttcgcccccgtccccagcaggcaacgggcagcccccctttcgtgccgcagtgaatccggtagccgatcaaccggacaccccggccgacccaactccatcacgcccaccctcgcctgggtacgtcggctagagaaaagctacactacgagcccagccgttgcccatgctggcttgtggtaagtacggtaagttcttccagggcatcccgcgaaccggtccttaactgccatgagcacgactagcaaaaccatgcacccacagcccaccatgacgtgtattttaattaaccaacaccattacggtggcactaaaccaaagctatgccgataatcaagtctatgctttaatgagatccccctttgtgcactagttgaactaagcatggctaaggatctcctaaaccaacatctagtcattttaatacccaagttatcaatggcgtaagggaaacaacataaagctgagtaataggacccatcccacatgatattgtaaaacaatgcaatatttaatagaaatgcgggacaattgtaaattgggtacaatatgatcaattgtaatgtatgacttgccttgctctcgcactgatgagaccacagcaacgtcttcgaggaaccgcggatcgacgaaacagccgaaatctacgcgacaaacaaagcacacaagcaaaacatgctataagactactgaaacagagaacaaaaccatttttaatggattctacacatttttcttgatttactgagacttgaatggacataatcggaggtcggatgaattagttatgattttcagaagattctctgtgtttttactattaaagaaaagccttaatcaatttattgcgcaatattgccccagggctgacgtcagcaaggcgggggcggcgccgacatgcgggccccacgggtcagcggctcgagagtgagagggaggggcgccggcatgtgggccccactggcagtggcacaaagagagggagagggggcggctggcaggcgggccccaccggccgcggctccaaaaaaagggggggtggaggcggcctggctcggctcggcttcaagccggccggccggttatggcgagggcggcggcggcaagcggccaccgacggcggcggccggcgagaagacggcggcgcatcacggcgacgcgcacgcgaggagcggcggcgcgcgcgagaggaagagaaggggagggagttctcaccggggttcggccggcgtgggaggagacgatggcaaacgacgacggtgagcgaccggagggcgacggcgaacggcggccgagctccgggacaccctaagagaggaagtgagagaggttagagggggagagggtgtccacggcgagcgagagccatggccgacggcggcggctatggaagggctcaccggcacgcgacgaacggcgggctccgatggcggaattcgacggaggaggggtggacgaggtagccctcggcggtgcgaacccgaagacgacgacgacgcggctcggcggcggcgttagcggcggccggaggagtggaaaaggcggcggcggcgggtgtagcggcgcgggagcgatggagagctcgggagcggccgatggaaaaaggaaaaaggaggaggagaatgcggggatggtttatatgggctcgggaggggcggacgaggccgggaggcggccgaatttctcgccgacgtgggggagtggggagagagagttgggggggattcaaaccgaatcccgcccttacggggcgcgcgcggggcgggaaggcgtggggaagggggcggcgacgtgggcgcggcaacgcgggcgcggggcgcggagtggaggaggtggggcgccggcggttgccgaccggctggaggttggggaaggtgctgacaggtgggccccacctgtcagcgcccgagggagtgagggggaggcaacctggacttcgggagggggcgggagagatgggccggcggcccaaaggaggaaaagagggggaaaaaggatggaaaaagggaaaaagaaaaggaaaaggatttccagggatttaaatattgcactttgcttattttaattggttaaaattatttccaatgctctgaaaattccactaaaaatcctgttagcatattttgacatgtagaatccaagaaaaattccacatgccgattccgattattatttgcatttattaatttgaggaattagctctaggttaaattgaacaatttcttcggatgatttattttacaaattttaaagctagtggtgaatttggactcgcctcaacggggattagaaaaccagcaagtttccaaacctcgggtgaaaaattccttgtctcttgtctcatttacttattgcatttacttttttgcaatttacattcatagagacatacttgagcccttatcaccctagaaatgcaaaacataacttagttgcctacttagagttatccttcaccatgcctagcaacttgggttagttttgttagatgtaatttaattttatatcgcctatccacccctctagtcgacattgtgatcttacaccaaccccctaccaaagaccaacatcagacaatcggccataagaagtcgatcaacgtctggtttttctaggggaacgacgtgccaatgtcgtcctgtaggattggtgaatgtcttgccgctgcagcgttcaccgaatcggagaaagggaacagccgccagaacagtagggacgcctcgtcctactcaccagtcaccggaaagtcctccgcgaaagccccacattcgcttcacgggtgtgcaaacacccactagacgtgaaaaggtgttcatcccagcattgatacctagtgtgaagctgaagatggaggcctctcatgagtcacgactccccgctgattggacggcgtctttctccacctcccattaagggtgcgctcggttgtgccaaatatagtattgagttttatcagtacttcatgagtactgtatatagccagtaattaatgtggtggttggatgaatagtcagtaacggtggctagatggatattaacgccgcttgtgtcttccgtgacgtcggcgatggaggagtgctgcagccgatgcagcgagctgatggaggcatgtcgggaagcagttatcagtaatgagcttgctgctcatgtcggcgaccgctgggactacaggcgctggtgcatgtggtgctgaagtgagcaggatgcaagggaggcgagaccgaaacaattaacacaccatttagcaaatgaaacgttgattgaatgtaaaatgactgattaacaatacttgagtgcacataattattaataaaattgcgatgcacaattttgattacacgaacacgatagaagttactcgtacagggaacacacataattggctaacatgggaatgacaagaccaaagactactaatttaatcaggatggaaagtgatgtaagcctagttgttgtaaacttcatctgcaatggcgtcacgaacagctcgcatccccgctgcactgttcggtgcgtcgtaccagtcgcgtagtggtggagcctgtgggatgttggggtacctgttgtacaacggatgctatgtcaggaaatgtgggtccgcactgtcaagcctgtagttgtggagagcaaaagcacagtgtatgatcttcgtttgggtattctgcctagggaaaaatggcatctccctaagaatcctccactgactcttcataactccaaaagctctctccactgacgtacgcagagaagagtgcatatagttgaaggtttcttccctcccatgcggttgaccagcaaattccataaaatggtagcgtatgtgtgggtacggtggcaagaacccgcaccggcatgcgtatccagaatccacaagtagatatttacttgcacaattagatgaatcatttctaaatgtaaattaaagagggattaatttcaggagacatgtattaatggatgaaaaaaaaactaactacggtacttgccccatggaagccttggaaaaatgtagggatagttgcgtacagcttctgtgagcaccctctggtcgtggacagctccaggccatcccgcatcagcaaaaatgacacgatcgtcccatccagtcacaactaatacattccatgatgtgatttggtgacgattgcggtgtacattggctttttaaactgcaacacgaattgggatgtgggtcccgtcaactacacctgcggccccggcaaaaggaaggaaatttgcatcttgcataacacagttatgcactctgcgaaaattaggatttgcaggcttgttgatatcagcagccatggcataaactgcattaagcactctatggaagtacttgcacatggttgacccagaccaagccatcctataatttatgcaacctgcatgttagtcagcataacaaacaaataccacgtacaattaggcagaataataagatgattcacgatccagctaaattatttagagctacatcaaatcaaatgtgccgagaatgtttcatcctacacactcaacagaacaaaacagttacgttgctcgagacgaagtcgagcaaaattatttggacagacaacacgttcgaaaagctctagctcagacacactcatcgttcgaaaggatctagcagtaggtccgatcggcatgaggtcaaaacattgcataaccagatagatcataacttccaggtcccaaccccaataaagagcacccacataaccagttcccccgtaacccgcagcaccaccatcgccatcgtcaccataatcatcatggccatcaccagcaccatctcctccctcgtcatcgccatcgccatatgcttcaccatcaccagcatcatcatcatcatctccaacgccatctccttctccatcaccagtagcagcatcatctccaacagcattaatagctacagctccaagaacagcatcaccagtagcaccaaagaatccatcaacacagaaggcagtaatatgtacaaaaaaaggactgactgaagttgtgacaacagcaacattgatatatattggttaatgacactagcaaattaacatatttatttgtgaacaacactcaaaaataccaaatcatgtatggcaccataattataacctatttcattgaaatttgcagcaaactaacatgattgagtagttaacagcacttgaaaataaggatttatgtatggcaccatcattgtgaactatgtcattgcaaaatgcatcaaaataacatgaatgagtttgctaacaacacttcaaaagcaggaatcatgtacggcaccatgattataaactatgcaattgcacaatgcaacagaccatgcaatgagttcaagaaacaaaccggcaggagctgactggatgtaacctccaaatccaggggggaaggggctggtattgagccgtgtcttggtattgggattggatgaagtacaacctcccctccggagtgtggcagtcgtccaagaaaaactccctgaggaagccatctcgaaagaccctcagagccatgtggtaaataggatccctcgaggtgtaaccgtcagccttcagaagctccatgcaggccttggcactctttgcttgctttatctcttccattctggttctgctatcgtttgactgaaccccgaggtccgccaaacggttgagagcatcgctagcagaagagcccctggacctcttggagcttccgccagaggtggtacctctagtcagtgacctcttcccatgccgtggagtctgctcagatggttcttgtagggtgtgctcggtgaggtcctctatgtcgaggatctcggcctgctgaggcactgcgttgatgggtgttctgacaggaactccagagcggttcagggtacaaaccctacccctgaaaaccgcatggtgctcaggaatatacagaaggggaccattccggaatgcacgtgcgcctctcctcatctgcaaaggcataaagagaaaggaatgatttgtgaccgcagtaatatcaaagggccttatttgtgtacaaaacaactaacttatgactatgactatcttaacagcatgaatggccctgtgacttcaatgagggttctgtagtgaatgaatagcaagtaatgggttattgcttttaacctagtacggaaaattatatctttctttgctgcattgaactaaacacattaaatgagtattgttgatccaatattcagataacgtaatttgatccaatgggtaattgattttaacctagtaccaaaatagattgccttaacctagctttgtgacgttgataagcactatgtagtgaataaacagcagctagtacaacatcaactatttgtaacttaataggctaatcttacgctttatgactttaatgaactaaacaaattaaatagtaatgttcatccaatatgcagacaactaaatagcaaggaatgtgatattgcttttaacctagtaccaaaatagattgccttaactaacattaccatgaaaggctttgtgactttgatgagcattatgtagtgactgaacatcaaatattacaacttgaagtgcttgtacaattactcctaattaactaacataagcatgaatggatttatgactttaatgagtattatgaactgaatgaacatcacatattacaacttcaagtacttgtagaattactttgaatgatctaacatgcccattatttcaagtactacatagtatgaataaataacaaaacagtaccgcaatgaacatgttgtacataacaaattctggtttataggcttgaatttgttctggttgcaactaatctggtctctaatagcaaacatgttgtacaataccaaacaaatatggtctctaatgtgattcgtctagaagcatgagttagttctgattgcaacaaatttcattatgaacctaacatggcactggattcagaaaaagctcaaaactgaaataaatacatacatgatccatccgagtccaccactcagggctggctaggatattgccggtgaagggacagcaaccaagcccagtggccattgactcgagccagcaccaagtttggaactggcggcgacatgtatcccataaattgtttagctggtgccggttgaccaccttctgcaccttctggaacatcttcacctccaggttgatgtagccttgacggttggggcaggtgctggtgattgtgcgtgcctcaatctcttccatgcacgcctccggaaaagctttcatctcggcctcgttccatgttgtatgccccgcaaccatctatgaaccaaagtcatgcaagcaacaaaaggggaaaaaacatcacaaaaattttggctctaccttttataggtggtcggagtcgaggaggtcccaatccagtgttgaagcaacgttccccggggtgaggcagcgcaccaactggcagattgcttctgggtacttcaaggcgatgcggataacggcacgtgctacagcttgaacatcttcttcgagggtggcggtgtaggcagcgtcagaacgaagggaggtggaggaaccctcagaagattctagatctgaaggtacccttctccttctcaccaaagtgatgggtgacagaggtgagtggaggaggcgatgggtgggggatttgtcgacaatgagcttgcgcttcacggctaccgctgccattgccttatatagagctggatcgaccacccctcagctcctcctttcggcaatggcaatgcaagggcgccgaataccttttactatgccgcacgagattggacctgaccattctctgctcttgttgccaggattctagaatcggcgacctcgatgctttccctccactcgatgcagcgatgcccctgagcagagctcctttctcctcctccgatgcggcagaccaatgtgggaagtggatgcctacttgattaggccaagcagcctacgccatgcgcgtgctctgccaggcttggccggtctggccaccaaggcgacgatgcagttgacgaccgctctctgcgcttgctgcgaggattctggaatcgacgatcgccggtgtgcacaagaaagctagcaatgtcgagatatcctgtgtgcaaatggatgcggcggcgcttggaggaagaacaatggagggcagagtaagatctttcgggcaaaaggatgagctcgagcttggaactccaacaatgggggtggggtgctcagcaaggaactgtggccaaaacacagcacgcaacctatgaggggaaagtgatgcacaccgtaaaaaccactgggtaatacgatgcacgggaggatgacggaaagtggagatggtgacctaactctcgtcaggaccgtcacctctccatcgccagcccacgttattgacttcgccactcctatccgcgtggtgcacagtacactggatgactgactgcgcggctcagccctaccagcactaacgagcgcgccctaagaggttggcaggggactaatgagagtgatggggagaaatctccatgtgagcctacagtggctcgtttagcctacttttgtatagggtaaataaacaggatagaccccaatgtcaatcatagctaaataatcttgtgcaatacccatgtttctcttcttttgctttgtacataattatgtaaatactttttatattaatataccgcagtagaagcctctcctgctgtttcttctaaaaaatactacagcttatagggtggtatttacaattttccctattttgtttatttcaattcggtgaatagatttcaataatcaaaaaacatggataataattattttacgatgcatattattacattcactcatcagaatctctccctgaataagtatcgaaacaaaatcatagtgatttagcagaaaattacacatagggtgtatttacggtgaatcatttgactccgacaagcacaaaggaagaaaagaaaaatctcctaggtgctagcgccaaatactagggatgcaactgagcagacaagcgggattattatacctgtttatcccacttctagtttttttttcttctaaatttgtattattatgtgagaaatgaactagcaagcgggtttttatatgagagtgagattgcccacttacatccctaccatatacgcacgacagatggtagagtagtggccttaggttctattctagcccttttggtttaggcttataagccagtctataagtttatttggaaactaaaggtgccaattaagattaagatatttttgtggtttttttcaaaggtgtcattctaacaaggataatttagtgagaagaaattggaatgtgagtcaaagatattgtttttatatgtataatgagattattcaacattttttttattgccatattgcaaaatttgtttggagaatcctttggactgaaaccccccgatagtatatctaatatggttggaattggctaagtggtattgagtcaaaactaagaatctcgtatttgtcggagcatccgctcaatgttgtgctctgtggttgggtagaaatggtgtagtttttgataaatgtccaaataaatcttatatgcaaatgtaggtgtttttcagggcaacttactagctccggttttgggcacatgttcaaaagtgtgaagagaacaaggagctcatatattctacatatcgaaacttagaatttacggtaatgcagattttcactaactacggatggagattcacaaatagacttcaataattgtttactccttatgtgttggctttattatttaaattatttttggttgcctgagtgtttgctctctttgtaacaattggttgtagtttctttaaagcaaaggccggatttaattccattatcaaaaaaagtcaatccataagtaaaaaattctaaatataaacaaacaagcatcctttttgtttggtttatttaaagctaaaagccactcttatactattaagtcaaaagttagatcggagaagggttttttttttttttttttttttttttttttttttttttttttttgcttatatgagttggagatatgactccaccattaaacttagaactttaaatctgttggcttaataatcatataagctaaaaagctgacttaatagtctaagtcaataagtctaagcctaaacaaagaaagtcaccgggtaaaggcaggtcctgattgcatggagacgcaagagtgccgcgctcctctaatgtgatattagacttcattttaataatatgaaacatattccaatatttctattagatcctatttttaaaaaaaaacaaaaggccataagaaacaactccatttcaattgtaagcactctagtagttctactaaaaatagatttcatcttatatttttgttgtatgtacaccctacccctctatgagcatctccaaaaaaaactggtccggtatatcttgagattaacgaagtcatcatagatacctcattatcgatgggtacgtcacttatcaccgaaagaacaattaaccataaatatgagcacacatatcaaatctaggactgtaaattggatagatggttccaccacatgaaaaaattaataagttgagctaagctcaataatttttttaaccaactacaacagggcatgcctgtgctggtgatttttttttcattaacaaatgggggtgaaagtgtatgcaagaagtagagggaataaagaagggaaagcaagaatctggtaaagtccgaaagaaactggttttccagtctagactggcattcgaaacatttttcaacaatttagatccctcgtggttgactatacttttaccccacaaattttggaacttgatataaaatgtttcttacaaatgtttaacaactttgatgtggcaccaatttatcaaaaaatacaacctcatgcgtagtgaggataagctcaactggttagcctctggtggtgaaattctagacttgatacaaatgctgagcatttacagttatttatttttttagtattagacgatgtatctatcacctgcaagacccttttagtaatacatgatgttcctgtcaacaacgagacagctatgtgaagtgtatgtataaccgtctgtctttgtgtgaggtgtacgtacaggcgtttgtctttgtgtgaggtgtacgcataggtgcatcctgtgtggggtgtacgtacaggcgtgtactgtattagcctatatggtgttaaaaaaatccctcctcattatatcgggtatagattacttcttgaaacaagggggaaaaataaatggtttcaaagttgaggggttttgcttagtcatcactcatcagcgcaataaaatcttgaggggttttactaatacctctggtagtactgagaatcaaaaggtgttttccttaaaaaaaaaaagagaggtgtttcgaacaaatgtgatagttgaggtgttgatatggactttcctataaactttcagtgccaataaatcttcagtgcagataaagcaattttgccaaatgaaaggtatcaaaacataacaggcaattgctgcctttcatgaaaaaataacttctattgtcttcggggtattgtaccctctttggagagttcgatatccatgtctaccgtaaaatggtgctttctattaaacactctcataatcgatgttaaaccaccggcaaacaatcaatctctacggataattatgcactcataaactcataaatgattctaaactcatattataactgtataatcaccaaaaaaatatcgtcagcacatgtaacgagctgattagttctgcatacacaaaactgtacatcaccatagttaagccaaaggcggatcacacaaggcttcttttctgttgagctgtagtagtattgctagtagttcttgggtcactgtccacatatggtagacatcaaaatattattggggaattggcagtaagccaataaataattttataaatgaaactagtagcagtgaaagcaatcctcaatttatggaacacagaccagcacagataggcaaacaaaccaagaacgcaacgaaatatcttaaatgcttgtttggatcagtcctcagtgggagttgcagccaatcactttgatgagaggagattttcttcgacttgaaaccacaatccgaagggattggggcattcagcaatactcctttgcatccaaacaagccttagaatgaaactttttgcctgccagcagaaattttctagagagttcattatttagaactccagtattttacaaaatgaatcatctgatagtcaattccttgagcacaaaaaaaagggactgcagaagtcttgacaagtcctggtactttataagccccgatgttgatgtgattcctaaccattcaaatcaaacgggggatggattcaacaaccaacaaactcaacatcgaaataaccagttcgaaaacaatgtatgcaaacggcaaacctatcagagtacattgtgccaaaccatgtttttgttttttgggggataatggaaatcaatccagcctctacatcaacatgtatctacacagtgtcaaaccatgtcagtatcacctcaataaagcctttccagaagacataatgaccaggttgaccctcatactttagatcagcaatagcaatcctgcagaatagactacgcatggaaaaagtaacatgccaaagcaaaaaagagaaaagcatatccggacatgaaaagattaaagacaacataacatcagtgagttgtgggcacactccatgaacagtaggggtataccagattccagggggccaggagaagcactaccttctatgcttatccaaattccaaaaccaaaagcaagatgcttcacgatacaccatttcaaaaggtggacatcccctcctcagggtcacttaagtcctctccatagtactaaatccacataactatctgtctgtgattaaggtttcagagaaatataaaaaaaactgtgggcctgtgatagcacatgtgatcaattaggcaatgttgttgtcaattttgagttcaggtcggcattacctttttccctagggaactttatacagtagtgagtaaaagaatacataaaataggaacttgaaccaaaagagacatacattaagggacaaagttaaagctaccttttgcatctaggtaagagctaaacaaactcaccgaactttctttcgggacttgaaagggaacccaccaggtggagacggtgagaactccaatgggaggtgcggaggttctccctcgccagacagcattcggagtacctcctcacttgatggtcgacgagctggagacctttggatgcaaaggagtgcgactgtaatgcagagtaaaacctcatcacggttcacatcctgtagggctggatcaacaagatcaatcaagcggctcacgcgcgcaagatgtttcgcccacgatatgaggcttgccttctcaaactcagacatgggtgaggccgtcacttgcaacggccggcgtcctgagataagtaccagtagcaagacaccgtagctatagatatcgcatctctcagacaaaggaccaccaccaccgtattcaggagccacatagcacaccgtgccgcgcatgctcggtgtgctgctcaccgcgccactactcttgggaacgaattccccacttgcccaatcacgggtgcttcttgcaccattgacccaccagttaatactgccattgccgttgccattgccattgccagtgctgccattgcttctccgactccagctcttcatcatactccatttggatcgtccctttgcatccaagtcatcgtcaatatcccgctcccaccattgcaaccctgcctgctcgctctttgatttagcaagtgcacgtcgtttctgctttttcgcaagctcatcagcatattcttctcgccaccattctcgtgccctcctctttggcttcttcctgtctgcagctggattggtaatagctgcccctgcaatccagtcattcttggggcgctccttcttgatctctgatctaatccactccatcacataatcttttacaccattgctgcccccaccattatcctgcttccaccaccagtcactcccggtacctgatcccatggtacctccggtgcgtgaccctccaccgttgcagctgcggctattcataccactctcaacactggtccggtcaaacccggaagtggacgcagcttccgccggtgatgccgatgtgaagccatcgtcatcctccggtgatttggggttcccctcaccattcaccgtggtggtgaccgtgctctccgctatgacagaggcgtcatcatcacatcccccatcgacgtcacatccttccgcaatcgcgccgctctcaggcttgccgtccgcatctgcgtcggaattgatgcgggagagaccaaagtcggcgaggcgggcgcggagatccgtgtcgagcaggacgttgctgggcttgacgtcgccgtgcacgaccggcggcttaacgacggagtggaggtaatggagcgcggcggccacgtcgcgggcgacggcaaggcggcggggccactccgccacgagctccgggcagcgccgccccagcagcgcgtcctgcagcgacccgttgggcatgaggtcgtacaccagcatcatccgccgcggccgcccctcgccccgcgccgcggacgacatcgagtacgcgaacggcagcagtatggagtcccgccccttcccacccggcttggcggcggcgtcggggacaggaggggatcccggcgcggacgacgacgcgaggaggtgggacgcgacggcgatctcgttgtggaactcccgctccccctgcagcgaccccgcggcatccatcaccgctcgggcaaagggcgtcccgccccggtcgccgcggattgctcccgccgccgtcgtcgtcggcgggagcgcgccgcggaacacggggccgaaccccccctgcccgag

SEQ ID NO: 22504 - DNA, 745 bp, Oryza sativa
cccggcgtgatgaatgaagtcttcaagcagtcggattccttcagtcggatctgatgataccccgagtagcattccaaaaaactgagaagctcgcagccggcggtcgagtcgactacctggtcaatgcgaggcaacccaaaaggatctttagggcaagatttgttgaggtcagtataatcaacacacatgcgccattgccctgttttcttccgaactagaaccgggttagccagccagtcgggatgaaggacttctttgatgaagcctgctgctaacagcttggttaattcctccttgatcgcgtccttcctgtcttgtgcgaatcggcggagtcgttgtttgataggcttggcatcttctttgacgtgtaaggagtgctcaatcacctctctaggaataccgggcatatcagacggtttccacgcaaagatatctttattgttctgaagaaaggtgatgagcgcgctttcctatttacaatctaactcggcgcctattacagcagttttagtaggatcagagggatctaggggaatcttcttagtcttggcttcgctttctccactctttgaaatcttggtagcgggcacttctccttcgctcgccgtggctgcagccagtcggatatcctctcgggcagacgccatctcgcgggtttgggccatgtcgcaactctccttgtcgcatgtgacggcttgcttgatgtcgctccgtaaggataggactcctcggggaccaggcatct

SEQ ID NO: 22505 - DNA, 749 bp, Oryza sativa
caacctatccggacagtccaacaaggggtacaaggcttgcactcactgtatggatgaaacagaaagtacatatcttaagcactgtaggaaggttgtatacatgggtcatcgtcgattccttgcagcaaaccacccggtacggaagaaaggcaagcacttcgaacataaggccgaccaccgtacgaagcctaaacatcgcagcgggaaaacagtgtttgctatggttaaagatcttaaagtagtgttcggaaaggggcctggaagccagcatatagagagcgaagatggtcacgcggcgatgtggaaaaagaactctatattttgggagttaccatattgggaattcttggacgtacgccacgcaatcgacgtgatgcacctcactaagaacctttgcgtaaaccttcttggcttcctaggtgtatacggaaagtcgaaagatacactggaagcacgtaatgatctgaagcatatggaacaacgcggcgaccttcacccggaaccaaaggagaaaggaagccattacttgagtccagccagctacactcttagcaaggcagagaaggaaagtatgtttgaatgcttggagagaataaaggtaccgtctggatactccacgaatatcaagcgaataataagcacgaaggagaagaagttcacaaacctaaagtctcatgactgtcacgtgttgatgacacaactgctaccagttgtaataaggggtaaccttccagacaatgtccgggcaa

SEQ ID NO: 22506 - DNA, 566 bp, Oryza sativa
tctacatgattcactaagattaataactgtgcctttgggtgattacttgaatttaaaagatttgtttgaattagtatccaaaataaataaaaacggaaactgacaaaacctacctctggacctcgtagtctagacttaaatctagataccaaatcttgtgtagtgacaggagcaacagcaagaaaaacagtcttgatttatccctctgtgacaggaaatacatttgcactagtttttgatgcaacaatggccttcaatgcaggttttgaggaaaatggtgtctcatctttggccactgatggttttgtatcctaaaaataatgaaaggatttatcatttaaagactaaagtaaaaaaagtattcttgataatagtgtgtaagaacttacagattccacctttgcttttttggaagctgcaccgccagatgcttttgaatcatcaccaccacctgatttcctcttttgcttcgatttggatgcaggaggtgtgccacgagcatgtcctgatggtgttggtttagcggggctgttatctacaggttcatctttgggttgatccttctg

SEQ ID NO: 22507 - DNA, 1497 bp, Oryza sativa
tcaccttccagatctccaaggatccttgggtgatccgctcacaacaatagatcggctcatggaagtaccctacttgctggagtaggtacttcaactgttgggcatacccattagggttttccatgggctaaggtttttttgactggcttagttcaagaggggggtgtgccctttttgaagttgccttaggttccttttataggcactattttgtcggtggttcctgtatcccatcagctgggttcccattaacattgcttgggaaggggcgagtctggattttctgggattctggatctgcagggttcatttcgaatcgtcctgtggttggtgcgtgtcttcaatgtcataccatccctcttgtggtgtttccaaggtggctttggatagaacgggtggactggtcatgctagtttgagtaggtcaggtggggaggggtaattcgagatggttcccggttgtttttctcactggccatatcatgggctgctcaaccggttagacataaattgtgaaccacttcacaaatgaaaccatcgcatgacacaaacatttccatagtgctatgaattcaactgatatttctagaataatacaaattatgtgattatgttacaggaaatcataagtgcgtagaaagctaagtgctaatacatatcttacatctgaaattaggtaaaaacaaacatcagcacataaatatagtgctggtatgacaaaagctagctacttgcatgctagctcagaggattgctgttcaaaccaacatactacagtggtgctagctcagaaatcagtacctctatgacgtgagaacctctctatatacaatgttcctcgtgtacgtcccacgagacatggaacgatggctcttgtccttgctttgtaccgcgaggatcttaatgttcattcttgctgttgctctagacaatgcaacatacaactgaccatgagagaacaccgggtcagggaggtacacgccaacatttggaatggtctggccttgcgccttgttaatggtcatggcaaagctaagtctgaccggaaattgctttctcttaaaacgaaatgggaacatctcatcgtcggaggggcataggggtatcctaggaaggaacaccctcttcccagcatgttgaccaagcactatctcagcgtcgatagtgtttctctggaatcctcgaaccaccaacctcgtcccattacagagtccgttggcaggatcaatattccttagaagtataacggggcaattgatcttaagctttagtatgtgcggaggcaatccattaggggtcaacgaatttaagaattcaggaggatagtagttgtgaggatcatcctcggcacgatcgaagctgtggtataacatttcctcccctcgaaaacgatcgatcatcttcatgtttatttgatcaacatactcatttcgtgttgacaagatggcccgagatgtgatatagtttgggtcggctagattagcatcaagcatcggaa

SEQ ID NO: 22508 - DNA, 1298 bp, Oryza sativa
tccaccgaacacaactgtcttccccccaaatggcacgtcaggacggtccatgatgtcgcgcatgcttctatctagggcctcgactgcttgccgttttgtcatagaagcttcgtcccatataattagggaagctctctggagaagtttagctgtcccactctgctttgtgaaactgcatacccctccatcatcaatgttcagtgggatcttgaatcttgagtgggcagtcctaccgccaggcatgatgcaagcagctacaccagacgtcgcagttgcaacggctatctttccctgaccacgaatagtagcaagtagagccttgtataaaaaagtctttccagtacctccagggccatctacgaagaagagacctccttgtccgccctcaatagcggataatatctcatcataagcacatctttgctcagggttgagtgaacttgacaaatccatgtgcccatgatccacctcgattgtagactcctcaaagatctctctaggctcgctgcctgaagtgtcgtatgactcatcaatttcgggtagaggaaacgacgttatttcttttcccatcgactggagcatatttctaatgtccaaaagcaccatctgctcaattgtacgtgggcacgtgtgagaacgacgatagtcatccaacattccctccaagtgcttgttccatagaccaagtacgtcacttggctcacaaaagaccaatatcgtggcaaagagcctccgtagcgatgatggcatttggaacacctcagcctcagtaaggcactcatctaatgtgttgtctgcctcgataagaccccttttttctgcagcttcacgaaaggacgagcagacttcaccatccactgtcctaaggtgttcaaaggaggtggcgccagtcacatgggttagcagcaccctaaggtagtaccgctccccctctgcaggatgagctgtcacgattctcccaatttgagtgattcgccgtttcctccgttgccatacttttgggccagcttgccaagtaaatgcctctggaaaatccttgtagaggattcctcgagcatcttcgttaactttatttgcctcaaaatactcagttagcatactcttctcgacgccatttctctctacgacatcatggagatcttgccccgcacgaaatgagaccatgtgcatgtttggaagatgcagttgtagctgtttcacaggcggatgtaccttactaaggtcaaagctatatatacgccatagtgcttctggtggggtgacccaccttgcatctctatattgttgaatctcatcaa

SEQ ID NO: 22509 - DNA, 25905 bp, Oryza sativa
  unsure (1)..(25905): unsure at all n locations
cactacacttacatgatgatgaagatgcctggtccccgaggagtcctatccctacggagcgacatcaagcaagccgtcacatgcgacaaggagagttgcgacatggcccaaacccgcgagatggcgtctgcccgagaggatatccgactggctgcagccacggcgagcgaaggagaagtgcccgctaccaagatttcaaagagtggagaaagcgaagccaagactaagaagattcccctagatccctctgatcctactaaaactgctgtaataggcgccgagttagattgtaaataggaaagcgcgctcatcacctttcttcaaaataataaagatatctttgcgtggaaaccttcggatatgcccggtattcctagagaggtgattgagcactccttacatgtcaaagaagacgccaagcctatcaaacaacgactccgccgatttgcacaagacaggaaggacgcgatcaaggaggaattgaccaagctgttagcagcaggcttcatcaaagaagtccttcatcccgactggctggcaaacccggttctagttcggaagaaaacagggcaatggcgcatgtgtgttgattacactgacctcaacaagtcttgccctaaagatccttttgggttgcctcgcattgaccaggtagttgactcaaccgccggctgcgagcttctcagttttctggattgctactcggggtatcatcagatccgactgaaggaatccgactgcttgaagacttcattcatcacgccttttggagcatactgctacgtcaccatgccgtttggattaaaaaacgcgggagcaacctatcaacgcatgattcagagatgcttttcaacacagatcggccgcaacgttgaagcctatgtggatgacgtagtcgtcaagaccaagcaaaaggatgatctgatctcggatctagaagaaaccttcgcgagcatccgcgccttcaggatgaaattaaaccctgaaaagtgcaccttcggagtaccgtcagggaagctgcttggctttatggtgtctcataggggcatccaagccaacccggagaaagttactgctatcctcaacatgaaaccgccaagtacccagaaagatgttcagaagctgactggatgcatggcggcgctcagccgatttgtttcaaggcttggcgagcgggggatgcctttcttcaagctactgaagaaaacagatgatttccagtggggacccgaagcacagaaggcctttgaagatttcaagaaactcctcaccgagccaccagtcttagcttcaccacatccgcaggagccgttgttgctgtatgtatcagccacctcccaggttgtgagcacggtcttggtcgttgagcgcgaggaggaaggccatgtccagaaagtccagcgaccgatttactttgtcagcgaggtcctagccgattccaaaacgaggtaccctcaggttcaaaagctgttatatggtatactaattactaccaggaagctatctcattactttcaaggtcactcggtaacggtggtcacatcatttccacttggcgatatcctgcacaaccgcgaagcaaacggacggattgctaaatgggctttggagttgatgtctttggacctatcattcaagccccgaatttcaatcaagtcccaagcgttagctgattttgtcgccgaatggaccgagtgccaggaggacaccaccgtgaagaagatggagcactggaccatgcattttgacgggtcaaaaagactttcgggcactggagcaggggtggttttgatttccccaactggagaaagattaagctatgtactttggatacatttttcggcgtcccacaatgtcgccgagtatgaggccctccttcatggactgcggattgcaatttccctagggataaagcgtctaatagttcgaggtgattcacagctggttgtcaaccaagttatgaaagagtggtcctgccttgacgacaatatgaaggcatatcgacaagaggtacgcaaattggaagacaagttcgatggactcgagctcagtcacgttcttcgacacgataatgaagccgccgatagacttgccaactttggatccaagcgcgaggtggcgccttctgatgtcttcgtcgaacacctttatacgccgacagtacctcacaaagatactactcaagctgcgggcattcatgacgtagctatggttgaaaccgactggcgagagcccctcatacgatttttgacttctcaagaactccctcaagacaaagatgaagccgagcggatttcaaggcggagcaaactttatgttatgcatgaagctgagttatacaagaaaagcccttcaggaattctgcaacgctgcgtatctttagaggaagggagacaattgctgaaagacatacactctgggatatgcggaaaccatgctgctgcacgcaccattgtcggcaaagcttaccggcagggtttcttttggcctactgcagtgtccgacgctgacaaaattgtgcgcacgtgcgaaggttgccaatttttcgccagacaaattcatctaccagctcaagagttgcaaactatcccgctgtcttggccgtttgcggtttgggggctcgacatggttggcccgtttaaaaaggcagtcggcggttacacgcatctctttgtggccattgataaattttccaagtggattgaagctaaaccggttgtcacaatcacagcagataatgctcgagacttcttcatcaacattgtgcatagatttggagtgcccaatcggatcatcactgataatggcacacaattcactggtggagtttttaaagacttttgtgaggactttggaattaagatttgctacgcctcagtggcacaccccatgagcaatggacaggtggagcgagccaatggcatgatacttcaagggattaaagcgcgtgtctttgaccggctaaaaccctatgccggcaaatgggtgcaacagctgccatcggtactttggtctttgcgaactacacccagtcgggccacaggccagtcaccctttttccttgtctatggggcagaagcaatgttgccgagtgaagttgaatttgaatctttgcgctttcgaaatttccgtgaagaacgctacgaagaggaccgagtggatgacttgcaccgactggaagaagtccgcgaggcagctttgattcggtcggctcgatatttacaagggttgcggcgctatcataatcgcaatgttcgatctcgtgcctttttagtcggtgacctggttttgaggaaaattcaaactacacgagatcggcacaagttatctcctctatgggaagggccatttattatctctgaagtcacccggccaggttcttatcgactcaagcgcgaagacggtactcttgtcgacaactcttggaacattgaatatcttcgtcgtttctacgcttaagtttattattgtacttccctatcttgactgtcaacatcaagttttcttcttgaagttgtcagtcgggggctatcatcataataatggagtgtgattttttatcaatttaatttgcttacttggtctatcattgccttgtttgattttttctacttagtctgcgaggactgaaagtttttaatagcttctttgggttttaggctcaacaaagcttgataaaagcttttaagaaatcaaagacttggctagaactatcaagcacagcataaatacaccagtatagtacaaattatgcctccatttgctacatttacactcagtcagaatcagtcctttcatcatcagagttattattgcttggctgaaggtcgttgttgcggaattgctctacaacatcacttgcaatcttgtcagccgcactttgagcattactgataagatcaagagcagcttcttcacttgtcccgtctgcaaagccatcaatggtatcaatttcaatcctcgggtacaaggatttggtcatcgccaatgccatactagctcccatacttccagctttcttgatattcttgaaatatacatccggtgcaactctcagcttgtcaaagatttcggttgcgtcaagtgcactcggaccactgttattaaggaacatagcttggacgagtggtgtagcgacattggcgacttcgtctcttgctccttcaagcttcttgatcttaccaaccaggacatcaaactgagcttgagatttgattttacggtctacaaaacacatttataatgagaatctgctgcattaaagagaggacagttcaaattgtcagctggcagtaccttcaacctccttcaaggctgagtccctttccgcagccaattctaccttgtctcttttcaaggcttcaatttgcttttccatctgagccattctggtggcttgcgctgtttgaaatccaaatgtttgaggatacagttatgacagcataaatcaatggaacagatctggaagattaccttttgatgaaccactcagctcgaagtttgaatcctggagctgagcaattcgttcccttaattccttctccgttttcttggcatgctccttggcctcgtgtagctgttccctaacggcttcaagagttcccaaatgtggaaccagcttttctaaggttgcagtcttggcctcattgcgaagatggattctctgcacggtggttcatggattagttttgctaacgagaaaacaaagtcatcaaaggcagtcacctagaagacttacattcacaatgcgagtggcttctccaagtactttcttcagctggcacacttcctcatcttctttttggcgatttataacaatgccggaaacttgagagttctcgtcccaccatttgagtaagataggaggacgagagtcattagctgcctttatgcggagaatttcttcttcgtcgccgcctagtggacctgatgtattcccaagacattagacgaacaagctggagttattcagaacggcatcacttgagaagatgagttacctgaggatatgcctggttgagcgtgaggtgatccttgctctttatctggagacccaatcactgagtcattaccaacttctggtccttgagaagttgtctgcgcttcagcttcagggatctcttgatttagatctacatccgactgatttccagtcgggggctctcgggttgttgcagtttcagttgctgccgactggtttccagtcggcggttgatcactcggattggccttatcgtccgaagcttgggcgccagtcggctgactttcggcagtcggttggctttcggcagtcggctggctttcggcagtcggctcagcatctttggataaatttggctctgtggcagccggatcaggttcttttccagttggatctatatcggacggtttcctgcaaagtgtcctttcgatattcagcgtaatttctattagagaagcatgtcgaaataaaatggtaccgagaggtttatacctagaagatgttctaatctttggcatttgacggccagccagttttttcctgggcatggtatgctttgggggtttattgggcgttcctttgtccccagatttgttgctgtcatcgtcttcgtcgtcattaagcaccagctttctcttgcgagaacctgtctgcccagccggtttagaggtttgaggttgcgggtctgacctgattgtcggccctccgcttccctgaacggtgtgctggcgaggagatcggcgttgagcagttgggggatcagatttcattaatacgtactcctgaatgagatgcctccacggttagctcactcaacatgaagataaaattatgttttggtcatgagttgaaggtttcagatacgtacctgtggaggcggattgaatgcattatatggtacaactggcagctgatgtgagtagctgacgacaatagcatttgagaagattttatacattctctccttcatgattttaaagtccagagagtctgggtcttcacggtttggatcatgcttgccgtcgaactcgaatgctgtgcgggatctctctttgattggagctaatcgacacttaatgaaatgccgagtgatttgctctccctgtaagccttgttctttgagcttcagcatgcgttccatcagttctaaggcttgggcagcttcatctcccatgggaagagagttccaggtatcttggtatactgggggaagacaggagtactcaggaagagcgggctcgggattttgaatataaaaccagttggcgtgccatcctttgtttgaagtcttgaaaggcatagagaaatacttttggctcagagtgcccctcagttgaaatccagccccaccaactacgcatggtttatttttgttcggttgaggcttaaggaaaaatattcggcggaacatagcaaaatgaggtctaatgcccaaaaaagcttcgcagacatggacgaaatttgcaatatggactatggagttcggattcaagtgatgtaagctgattccatagaaattcagtatcccacggaagaactttgaggttggaagagcaaatccgccataaaagaaatgagagaagaccacgacctcgtgtgtatcgggggttggaaaggcttcaccgcatgctggccgccacccgatgatctccttggcagggagaacgccgtgcgctaccatctccttcaggttttcttccgtcacgtcggacggcgcccattggctttcgaagctttctctctcttccgccatcgatttttctcaaatgtgctgatttgattcgagggatggcttgggagaggtgaggaattgaggcggtggatcacgggaaggattttgatcacgttttgaaggtggatttgggtggattggtgaaccctagttcgccggcgcagctctttactgtagcagggagtggggaaaatggcgagcgttccggcggggaagacgaagcgtcgcttggatctcggatttcttcagttaagggtatcggaggtgcaaatgggcctaggcctgaacagtacttcagcccaatattttcgacagcgtggcccattgtgttccttagggacttaggcattttttgctttggcaatttatgcgcacaatagtgttgcccaatgctgataaaatcctttttatgcggtcatataattctttggaattattgcaatgcaaattaaaaggtgcccgacagaaaggtgttatgctgtttttgtacgcttttttaggctacaaaagctgtctgggctgacttggaatgacttgtttttaccatagtcatttccttggtatgttatatacctgttttcattatggtaaatagtcatagcctaggctattagacttattcattatcataatttttataatatttggtgggtaatctttagagttttatattcggatgcctgtcaagtgagttcattcgtgaaccttttagagtgtaaatcactcggattcattttattatggctaaaaagcagtcggcaagaatgtctctttaggcgccgcgtatgcttttgccgtatgatgcatgattatgctattattttgttctcaactatatgtttagtttgttaactaatcacatagttgggggctacacctaattaggtgcatctattcgatgcaccatattctttgtcttttcgccctttacagtcttcgtctttgctactcggcaggccttggcatgcataatttgaagcactcggattactatctttgagaaggctatgatggttgactgcaaaggtctcgggggctactgtggagattatggatatcccatatctacacggcgatgatatttgggctgaatataggataccgaatatagatagaatatcttatgtgtatcctgggtttgtttcttaacttgtacatcaaggaaacaccttgagacttagtcggtcacgactgtatttaatctgtatctgtgtattccgttagggatatagattaacttttgtaacccggactccttcccatatataaggggggtccgggcgcctctaggggcgaaggttgattttctctaaatcatacaatcaataatacactcggcggattcatccccggacaggagtagggtattacttcttttataagaaggcctgaacctgtataaatcctttgtctccaaacccatacacttttccagcttgatagccacccccttttattattgccgaaatctagtttcgacaagcagcccatgcacgagtgactctgcttcctcgccaagatcgaacggtgactgcagcctcaagccgcagcacgcttgagtggtaatagcacacatcctgataaacgtaatcattgtaaacattggagcccttatcggtgataattgaaaccctgcctgcgagccattgaaactgacatcaatgtggaggcacctattgcggataagcttgatccgcagacagccatcacggacctcgacgaggaacctgatgcttccgcgagtgtgaatttgaacccttcaccgatgaggagaaatatggaggagtcagcttcagatctgtggagattgtgggtatcccatatctacacggcgatggtattcgaactgggtacaggatacctaatgtaaatagaatatcttatctgtatctcgggtttgtttcttaacttgtgtatcaaggaaacaccctgagacttagtcggttacgactgtattttacctctatcttcatattccgttaggaatatagattatcttttgtaatccggactccttcccatatataaggggggtccgggcgcctctaggggcatatgctgatttttccccgaatcatacaatcaataatacactcggcggattcatccccggacaggagtagggtattacttcttttataagaaggcctgaacctgtataaatcttttgtctccaaacccatacacttttctagcttgatagccacccccttttattattgccgaaatctagtttcgacagttggcgcgccaggtaggggcagcgtcaagcttttcgccgatcagtgcaatgggtcctttctctggcatcgacgacctcgtcttcccgcccgggcagacgtttcggttcggcagcctcgacttcatcaccgacaacttcggcaagatttctctcctcgactcggaatcaaaccagtcgggagagaaccggatttcggtcccgtttggattcccgaacgcggctgaaagctacttcaagaccatctcaaccgagtcggcttcaaaccactcggccgagattgcatcttctccaatgacaccagatcaagatgatggggcttacccaccggtcctgatgaagctccccgacgatttagcagccgtctccaccatgacagcgtcttcatcccgtaggcctaggcggaagtcggcttcaacaccgatttcgcctagcttcagggaagtcggcgtcatcctccaaccactcggcacggtttcgacggatcagctagatgaccactacagctctcccaccgtcgactcgcgccccaccgacatcgtggagtacgacgaatttagttctcgctacaacgacttccacgacttcgacgacttcgacggaagcctagatgacgactacacccctctctactttggcgttttcatggccaataatgagacggaggagcaacgccaagcccgggaggccgaagagcgtcgccgactggaggaggagcaccaagcacaagaacaagaacggctacggcgtgagcagcaggaccgtgagcggatcgcgaaggaggctgaggaccgacgtcaacgagctttggaagcagggcgccgagcgcgtgatctcatcggccagcaagatgtcgaagggacaccggttttccgcacccctcaacagaatgcggttgccgcgatcacccttctcgacaccctcctcaaccaaaacgagctcaatcgatccgaccacgtcgtcaacatcttgaaccagacgaagaccatgatcgcggcttcggtcccagttaactccgaaagcgtccacacgccgactggcagccgagtcccccacttccgatctcatgactaccgtcatccaagcctcagcatcaccggcgcaggatccaaccgcaggagcaggggccacgacgagcggtctgttcactcacctcccgaccttcatagggagcgccgagtggaacggcctcgctcaccacctcgtcgccgccccatcgatcttcgcgacacaatcatacagcgccgagcagctcgaggctaccatcactcgccagaccgccacgacgacgaccttgacggagtagcagccttcaccgacgacctgcgtcgagtggattggccagccggcttcaaaccgactggaatagagaagtatgacggcaccactaaccctgaatcgtggcttaccgtctacggtctcgcaatccgcgcagcaggaggtgacaacaaggccatggcgaactatttaccagtggctttagcagattccgcccgatcttggctccatggattgccccgtggtacaattggatcttgggccgaactacgcgaccacttcatcgccaacttccaaggcaccttcgagcgtcccggcacacaatatgatctctacaacgtcattcagaagtccggagaatcccttcgagattacatccggcgattttctgaacaacgtaacaagatctccgacatcaccgacgacgtcatcatcgccgcgttcaccaaagggattcgccacgaagaattggtcggcaagttcgggcgcaagcctcccaggacagtcaagctcatgtttgaaaaagccaacgagtacgccaaagctgaagacgccgtcaccgcgtcaaagcagtcgggtcccagttggaagcaaaacaagggtacgccggctacgggaggaggtggaagtaacaatcataaggaccgcaagcgtaagcctgcggaacttgttgcaaccgccagtcactcttctcgacagcgttcgcgcgtcaacacgttcgacaagatcatgaactcccaatgcccgcaccatcctaactccaaccacgtggccaaagattgtttcgtctacaagcaattcgcggatcaatacaccaagactgcacggaagaactctgacgaagaacaaagcacgtcgaggaagaaggacgacggcgacaccctggcaggttttcaagatcaccgcaaggagctcaaccatatctttggcggccccctagcttatgaatctaaacggaagcagaagttaactgaacgagagatcaatgctgttcagcccgacacgccccagtatcttcgatggtcagagattgcaatcaagtttgaccgctcggatcatcctgaccgagtggtccacccggggcggtaccccctggtactagacccagtggtccgtaacgtcaagcttcgcagaaccctcattgatggcggcagcgcactcaatatcctcttcgccaagactttggatgatatgcagatccctcgctccgagttaaaatcaagcaatgcgcctttccatggagtaattccaggattatccgcaactccactcggtcagatcactcttccggtcacttttggcactcgggaaaacttccgcacagagaatatcagctttgaagttgccgatttcgagacagcataccatgccatactcggacacccggcgttagccaagttcatggccgtcccgcactacacgtacatgatgatgaagatgcctggtccccgaggagtcctaaccctacggagcgacatcaagcaagctgtcacatgcgacaaggagagttgcgacatggcccaaacccgcgagatagcgtctgcccgagaggaaatccgactggccgcaaccacggtgagcgaaggagaagtgcccgctgccaagatttcaaaaagtggggaaaccgaagccgagactaagaagattcccttagatccttctgatcctaccaaaactgctgtaataggcgccgagttagattgtaaataggaaagcgcgctcatcacctttcttcaaaataataaagatatctttgcgtggaaaccgtcggatatgcccggtattcctagagaggtgattgagcactccttacatgtcaaagaagacgccaagcctatcaaacaacgactccgccgatttgcacaagacaggaaggacgcgatcaaggaggaattgaccaagctgttagcagcaggcttcatcaaagaagtccttcatcccgactggctggctaacccggttctagttcggaagaaaacagggcaatggcgcatgtgtgttgattatactgacctcaacaaatcttgccctaaagatccttttgggttgcctcgcattgaccaggtagtcgactcgaccgccggctgcgagcttctcagttttttggattgctactcggggtatcatcagatccgactgaaggaatccgactgcttgaagacttcattcatcacgccttttggtgcatactgctacgtcaccatgccgtttggactaaaaaatgcaggagcaacttatcaacgtatgattcagagatgcttctcaacacaaattggccgcaacgttgaagcctatgtggatgatgtagtcgtcaagaccaagcaaaaggatgatctgattttggatctagaagaaaccttcgcgagcatccgcgctttcaggatgaaattaaaccctgaaaagtgcaccttcggagtaccgtcagggaagctgcttggctttatggtgtctcataggggcatccaagccaacccggagaaagttactgctatcctcaacatgaaaccgccaagcacccagaaagatgttcagaagctgactggatgcatggcggcgctcagccgattcgtttcaagacttggcgagcgggggatgcccttcttcaagctactgaagaaaacagataatttccaatggggacccgaagcacagaaggccttcgaagatttcaaacaacttctcaccaagccaccggtcttagcttcaccacacccacaggagccgttgttgctgtatgtatcagccacctcccaggtcgtgagcacagtcttggttgtcgaacgtgaggaagaaggccatgtccagaaagttcagcgaccaatctacttcgtcagcgaggtcctggccgactccaaagcgaggtaccctcaggttcagaagctgttatatggtattttaattactaccaggaagctgtctcattactttcaaggtcactcggtaacggtggtcacatcatttccactcggcgatgtactgcacaaccgcgaagcaaatgggcggattgctaagtgggctttggagttgatgtctttggacatatcattcaagccccgcacttcaatcaagtctcaagcgttagctgattttgtcgccgagtggaccgagtgccaagaggatacccccgtggagaaaatagagcactggaccatgcattttgacgggtcaaaaagactttcgggcactggagccggagtggttttaatttccccgactggagaaagactaagttatgtgctttggatacatttttcggcgtctcacaacgtcgccgagtatgaggcgctccttcatgggctacggattgcaatttccctagggataaagcgtctaattgttcgtggtgattcacagctggttgtcaaccaagttatgaaagagtggtcctgcattgacgacaatatgatggcatatcgacaagaggtgcgcaaattggaagacaagttcgatggactcgagctcagtcacgttcttcgacacaacaatgaagctgccgacagacttgccaattttggatccaagcgcgagacggcgccctcagatgttttcgtcgaacacctttatacaccgaccgtacctcataaagataccactcaagatgcagacactcgtaacatagctatggttgaagccgactggcgagagccctttatacgatttttaacttctcaagagctccctcaagacaaagatgaagccgagcggatttcaaggcggagcaaactttatgttttgcacgaatctgagttatacaagaaaagcccttcaggaattctgcaacgctgcgtatctttagaggaagggagacaattgctgaaggacatacattctgggatatgcggaaaccatgctgctgcgcgcaccattgtcggcaaagcttaccggcagggttttttctggcctactgcagtgtccgacgccgacaaaattgtgcgcacatgtgaaggttgccaattttttgccagacaaattcatctaccagctcaagagttgcagactatcccactgtcttggccgtttgcggtttgggggctcgacatggttggcccgtttaaaaaggcagtcggcggttacacgcacctcttcgtggccattgacaaattttccaagtggatcgaagctaagcctgttgtcacgattacagcagataatgctcgcgatttcttcatcaacattgtgcacagattcggagtacccaatcggatcatcaccgataatggcacacaattcaccggcggagttttcaaagacttttgtgaagactttggaatcaagatttgctatgcctcagtagcacaccccatgagcaatggacaggtggagcgagccaatggcatgatacttcaagggattaaagcacgtgtttttgaccggctaaaaccctatgccggcaaatgggtccaacagttgccatcagtactttggtctttgcgaactacacccagtcgagccacaggccagtcaccttttttccttgtctatggggcagaagcaatgttgccgagtgaagttgaattcgagtctttgcgctttcgaaatttccgtgaggaacgctacgaagaagaccgagtggatgacttgcaccgattggaagaagtccgcgaagcagctttgattcagtcagctcggtacttacaagggttgcgacgttatcataatcgcaatgttcgatctcgtgcctttctagtcggcgacctggttttgaggaaaattcaaaccacacgagatcggcacaagttatcccctctatgggaagggccatttattatctctgaagttacccggccaggttcatatcgactcaagcgcgaagacggcactctcgtcgacaactcttggaacattgaacatcttcgtcgtttctacgcttaactttatcattgtacttccctgttttgactgtcaacatcaagttttcttcttgccgttgtcagtcgggggctatcatcataataatggagtgtgattttttatcaattcagtttgcttacttggtttatcattgccttgtttggtttttctacttagtttgcgaggactgaaagtttttaatagcttctttgggttttaggctcaacaaagcttagcaaaaacttttaagaaatcaaaaactttgcaagaatcatcaagcacagcataaatacaccagtattgtacaaattgagcctccatgtattacattcaaactcagtccgaatcagtcctttcatcatcagagtcatcattactcggctggaggtcgttgttgcgaaattgctctacaacatcactcgcaattttgtcagccgcagtttgcgcactgctgataagatcaagggcagcttcttcacttgtcccgtctgcaaatccatcaatggtgtcgatttcaattctcgggtacaaggattttgtcatcgccaaggccatgccagctcccatacttccagctttcttgatattcttgaaatatacttccggagcaacactcagcttatcaaatatttcggttgcgtcgagtgcactcggaccaccattattgaggaacatggcttggataattggtgcagcggcattggcgacgttatcccttgctccttcaagcctcttgatcttaccaaccaggacgtcaaactgagcttgagatttgatcttgcgatctacaaaacacatttatgatgagaatctgttgcattataagcagaaaagctcaggttgtcagctggcgattacctttgacttcctttaaggctgagtccctttgtgcagccagttctgtcttgtccctctccagggcttcaatttgcttcgccatctgttccatcctggcggcttgcgctgtttgaaattcagatggttgaggatacagttatgccagtttaaaccgatgaaacgaatctagggattaccttttgatgaaccactcagctcatagtttgaatcctggagctgggcgattcggtcccttaactctttctctgtctttttggcgcactccttggcctcatgcagctggtccctaactgcttctagagttcccaaatgaggaaccagcttttccaaagttgtagtcttggcctcattgcgaagatggattctctgcatgatggatcatggttcagttctgctaaaaagaaaacaaagttaccgaaggccgtcactcggaagacttacatttacaatacgagtggcttctccgagcgctttcttcagctggcacacttcttcatcttctttttgacggtttatgactatgccggcggcttgtgagttctcgtcccaccatttgatcaagataggaggacgagagtcgtcggtcgcctttatgcgagggatttcttctccgtcatcacctgatggtcctgatgtgtttccaagacattagacggatacactgaggttatttaaatcgccattgtttgagaagacaactaacctgaagatgtacctagctgagcgtgaggtgatctttgttctttacctgaagacccagctattgagtcgttaccagcctctggtccttgcgaagtcgtcgtctgcgcttctacttcggggatctcttgatcagggcctgcgtccgactggcttccagtcgggggctcttgagttgttgccgtttcagttgttgccgactggcttccagtcggcggcaggtcactcggattggccctatcgcccgaagcatgggcgccagtcggctggctttcagcagtctgctggttttcagcagtcggctcagggtccttggatatattttgctctgtcatagccggatcagggtcttttccagatggatctatgtcagatggtttcctgcagagtgttctttcagtattcagcatcattttcatgagcaaaacatgccgaagcggaatcataccgagaggtctaatacctggaagatgttctgatctttggcgttgcacggccagccagttttttcctgggcatggtacgctttgggggtttattaggcgagcccttatccccagatttatcatcgtcgccttcatcatcatcaagtaccagctttctcttgcgaggacctgtttgaccagccaatttggaggtctgaggttgcggatctggtctgatcgttggccctccacctccctgagcggtgtgttggcgaggagaccggcgctgagagactggtggatctgactttatcagtgcatattcctgaacaagatgcttccatagttagtcaactcagcatgaagataaaactatgttctgatcacggtttggaggtttcagatacatacctgcggaggcggattgaatgcgttgtatggcacgactggcagctggtgtgagtagctaacgacaatggcgttcgagaatatcttgtacatcctctccttcatgattttaaagtccagagagtctgggtcttcacggtttggatcatgcttgccgtcgaattcgaatgctgtccgggatctttccttgagtggcgccagtcggcatttgatgaagtgccgagtgatttgctctccctgtaagccttgttccttaagatttaacatacgatccaacaactccaaggcttgtgctgcttcatctccaatcggaagagagttccaagtatcttggtacactggaggaagacaagtgtacccgggaagagcaggctcgggattctgaacatagaaccagtttgcatgccatcctttgttcgaagttttgaagggcatcgagaaatatttttgactcagagtaccccttagttggaatcctgcccccccgactacacacggtttgttcttgtttggttggggtttgaggaagaagatccggcggaatagggcaaagtgaggtttgatccccaaaaaggcttcacaaacatgaacgaaattggcgatatgcactatggaattcgggtttaggtgatgcaagctgattccatagaaattcaagatcccgcggaaaaattttgaggtcggaagagcaaagccgccgtagaagaaatgcgagaagactacgatctcatgtgtatcaggggtcgggaaagcctcaccgcacgctggccgccacccgatgatctccttggctgggagaacgccgtgcgccaccatctccttcaggttctcctccgtcacgtcggacggcgcccattggctttcgaagctttctctctcttccgccatcgatttttctcaaatgtgctgatttgattcgagggatggcttgggagaggtgaggaattgaggcggtggatcacgggaaggattttgatgcacttttcggaggtggatttggccggagttgtgaaccctagttcgccggcgcagcttttcactgtagcaaggagtggggaaaatggcgagagatccggcggggaaggcgaagcgtcgcttggatataggatttttttcagttaagggtatcggaggtactaatgggcctaggcctgaacagtacttcagcccaatacttttaacagcgtggcccattgtgttccttagggacttaggcatattttgctttggcaatattatgcgcacaacagtgttgcccaatgctgatcaaatcctttttatgcggttatataattctttggaattattgcaatgcaaattaaaaaggtgcccgacagaaaggcgttatgctgtttttgcaagcttttttaggctacaaaagctgtttgggttaactaggaatgacttgtttttattatagtcatttccttggcgtgttatatgcctgttttcatggtaaatagtcatggcctaggctattcgacttatttattaccataatcttcataatacttgatgggtaatctttagagtttttattcggatgcctgtcaagtgtgttcattcgtgaaccttttagagtgtaaaccactcggatttcttttattatggctaaaaagcagtcggctagcatgcctatttaggcgccgcgtacgcttttgtcatataatgcacaattgtgttattattttgtctttcaactatatgtttagtttgttaactaatcacatagttgggggctacacctaattaggtgcatctattcgatgcaccatattcttcatcttttcgccctttacagtccactcggcaggttttggcttgaagaatttaaagtacttggattatcatctttgagaaggctacgatggtcgactgcaaaggactcgggggctactgtggagattgtgggtatcccatatctacacggcgatggtattcgaactgggtacaggatacctaatgtaaatagaatatcttatctgtatctcgggtttgtttcttaacttgtgtatcaaggaaacaccctgagacttagtcggttacgactgtattttacctctatcttcatattccgttaggaatatagattatcttttgtaatccggactccttcccatatataaggggggtccgggcgcctctaggggcatatgctgatttttccccgaatcatacaatcaataatacactcggcggattcatccccggacaggagtagggtattacttcttttataagaaggcctgaacctgtataaatcttttgtctccaaacccatacacttttctagcttgatagccacccccttttattattgccgaaatctagtttcgacaagatcttagtgagggaacccggtcattgcatcccaagctagacgcggcgtctgccgctgatgaggatgttctggaacccaacgatgctttattcatctccaaatgtggctgtaatttgcgcgctatatagttccggcggtttttatgagaggaggaggagctaccatacgttgtaagctcttgtgcaggggcatcattaagtactagcatgaatagcacacatgcatgacatgcttgatattgatcatgaaggggttctgaccagcagccagataatgtcactatacaagattcctggagcacaaaatgggataccaagagcatggtgtctcatgtgtagtatattttgagctcttgtgataagctcaaattcttgtttggtgtgaactcaagcatcgatgtggaaaacgtatatattcttctcgtaaccgtcttatagttgacatattcaacccctgtcatcctgctgtagcgcaacgaagcttgaaatcaagtgacacttgcaggatggcaggtatgcaatatatatatggaggtcttgtttgacacattcagatcgttgcttgttacaaccatggaattttatttcaatatacaccatgaattgaaagtgtaacatgatgcatggtagtaggccgtaaaatttcctatcatgacttcagattgatagccatatatgacatgggagatgaatttaatatgtgagcacatgaatgacggagtgcacagctggtcctttggtagtagaaccggggtaggaagacagataatctgatgactcaggtgatgctccaaagtcacgacaatgatgctgtaattgttagttccactgaagtggaactttgacctgcccatagcacaagtgtaggcaagaattttccttcttgcccccagcccactttgattggtgctcgagcttacaatatacaatatacaagtttgtcttcaagatcatatgttccaccaaggttataatcactgtatactgattatccttcctcgttggggatccttttttttttggataaaataaaatagccacaagccacattagagaagtcagcaaagataaacttgacgaccatttgtgcgcagcaaagatgggaggagaaccaggtcccactgggcgtgccattttgtttggagagaaaattcaactttgatctccccgcccagggaaataaaatgtgcgggcgtgccagtgtactaagtacacaaataaaatagacgaaggaaaatgcatttattataattctcaaagaattacaaaaatacaaaatccttggtcaaatgcgcttcatggcctataggcaaggtggatccgaattggcgattgtgttctcctgattcccggggtctcggaagacacccggttaattactctcgtgagttaaactcgtgagaaacctccgattaagctgcgctggtcgtcgtcgtcgatcttcgcttcacgttctcccatgcatgacagtgatggtggtgtagatgtgtgtgggcgtcggcaacggtccacgacctcgtcggtccatgcgccggtgttggtgacgtcttcatatagacttcgcccgccctgccattcagcctcgtcggtggtgcttgtagtggagactagcatggcattggctggggtgagaataagatgacggtgtcggtagtggtgctgagctcgagtatgttcgtggtagccatgaagaggtcattagcgaaagcatgaatgacatcggtggtggcgtcgagtttgagagtatatatgccgacggtggtcacgaagaagtcatcagtatgtgtactgatatcgctaggagcaacagagacaccgatagagattccaagcttatggtcactggcggttgaggtagcatcacccatctagtctccacggcactggtcgatcatcatcatggtacagaagttagccttctaatcgctacagcacgcacttagtatcaagtggctgtaggggatgttaggggcgtagtgaaacctgggagcgatggataacactccaggtgtcgatgaccctgttttatgcgtgctgtgtgataggggcaaaacccaattatgttgggagtgcctccgatcatagcgagcatgagttggtcacggaatcttgccattgggcgtctttagttcgagctcaagcatgtcagccgaggcagcaacgagacgccagtagcagtgttgcgtttaggcgcgtcatcggcgaatacatgttgaagccgatggctcgtcaagctcaagggcgtccttggtgatagttggcagctccaagcttgagcacgtggcggcggatgcatgggtggcgccggcgacgatgacagggtcgagcttgtcgttgatggcagccacgaagatacacgtatgccaatgagtgatgacgaacgaggatacttccgtcttgtgggcgagatcacatcaccggcgtcgatgacaattatggagacactccggtcgtgcgggtctgagagtatgaccggcgatggcgacgagtcggaagttgtcccgacaacggtgtacatatgaacattttgtcaccgagcggtcgaggccgatgagtgtgatactgtagttgttggcatgaggatgactccgtgtgatgaagcgaaagcatcgtggatggacagcacgacgacctcagcctgatgaagataaggaatcatggccagacttgtcgacggcgtgtgggcacctagcgatggcgctccagtgttctcctcaagaggcttgacaatgaatgagaggaaggtgaaattgccggcgagggtgagcgtacgtcggcggcgtcatgacgaaggaacagtggccaacaaggcgacgacgtccggcatggcattggcagcaggtagatggtgtcaccggcgactgatgcctctgatgggatgctgcagccgtggtcaccggacgacatgatcgaggatgatcaaagatgtggcatttgcttccgagcaccatggtccatggacgatcgaacaccagtcttgtgcatgcaagcatgaaactgaaacaggagaacaaaataaaatacatggatagattagctaccaatagcagtgggctggaacagcatcatctcctccccggcgacgcctccttctcagcgcacgcgccctcttgccaaacgccgaggtgctgcagccgaggtcaccagccaccgagcgcacgcgtcctccccacgagcgccgaagcagtgagcatgcaggctctcgacttttctctctctctctctgttgctgccctctcgtgtgtgtgtctccgtctctgtgtgttgtgtccctgtgtttctcctcccccctgtaaaatgaaatggacaatcttttataggggtgataagtcggttcacaggctagctcatacatggattagtatctgctcagccagccagccgcttccatctataagccaaatttccatttagcaaatatcatgattatgataattccattgtattgtgatatgattattggagcttccattctatggtgatacggagagtagtatttccatgtgaaatctcaagtgcttgctgctattatctgtttcgtttccaatctgacgtgatatggatcaattttccttgtatacttatacgctcacgcactgctcatagaaagaaactttcatatagagctatcttgcccttttgatttccttggtttccatgcaagcatgtacgtggtttccatgcatatgacgtgagagattaacggccggcaaatgatgtgattaacttcctctaatgacagtgctacagtggcatatgcttccattcccatgaaaacattcacacctttttccttccatcagccaaccatgaaattggatcgatcacgctatatcaaaatgtcgtgagtacgtatatactagagcagccgacggcaagtgtctcataatattcatacgtatacgccatgtacgccaggttgtattattagtgataattaatcaccaatttcgttattatgtcaccattcccgaaattaatactttgacacacttcatttctttcatttataaaaaaaatgtacaaaatatcgtcgaacaaatgccccctcaccaagttaaattcgagcgtggagcggctcggaattaacttggtgaaaattttccatttcctgaggaacaatgaattaagtcccacagcatatatatattttttaatctcataactacaagcagagttcaagcactgaataaaccaagacgaacttggtggttttttctatgttgaagaagcgtatgtagctgccgccatactgcttaaagacattaatcctttctactagggcaaatctcacggtagttgtagattatgccaccaaaattttgcaacaaaggaccgtatggattttcactatggtatatagtccacccggatgtactggggcaaaataaatccatgccagcgtctaatgaattaacagaacatgaggcaaaaaatccatgccattgtcgaaaaaaacaattcttcagacctgtgtattgatgataaggtctaaagtaaattaatcaggcgaacggccatgccattgttaataaatatcccacggaccagtgtattagtgataagatcccaagtaaacggatgaggcgaacaaccatgccattattaacaaaatactccttggacctctacatgattgataagatccgaagtttgataagatccaaagcaaaaggatgaggcgaacaaccatgccgatattnnnnnnnnnnnnnnnnnnnnncattcttgatgggggtccgagagtaaatatatgaggttaatatccatgccataatctatcccggtcacagcgaaacaaacgtgccgtgtccggagagaattttatcaacccacacacgatcgcttttttaaaaaaatccacgatgtcagctgaatgggttgaagggtttcacagattcacactggccgcattggcgtgctgcactactcccaaaatatgcgtagcggcacatccatcgctatatacgaaaaatcaatagttatctgggagacatattgatcggagtcttaagttcttttaagaacaagtgagacgaaagatcatgcccaaggaataagaaaatcgattttcttgcccgagacatatattaatgtcaggggtacaaggaattaagaatatgtgaggcttaaatcagtgacatcgataaaatataatttataagaccaagtacaaatggtctcaagaatatttaaggtagaaatccatgccaaaaatttattcttcaagggatcaagactagcatgaagaattgccaggcaaaagtatatgccccagataaaatttatatttcttgagacaatgacaactagtctcaaggatatttgaggtgaaggtccatgccggaaattcattcttcaaactagccggatgacacatgttagctagtctgaagaattgtgaggcgaaaatacgtgcctccgataaacaattatatatttcttaaaacccttcatgaatggttttaagaatatttgaggcgaatccatgccaaaatgatgatttattctttaaaccggcttggctgtagattaatgccagtgtaaagaatggtgaggcaacactacatgccccctgtaaacatatatatatttttcaagaccaatgatgaactgtctcaagaatattgtggcgcaaatccatgccgaaaatgggaatttattctttgaacctgtcatcagattaatgatggtctaaagaattgtgtggcgaaagtccatgccactactaaagaaaacatgtgtgaggcgtaaatccatgcctttctcaatccatggcgaaagaacatgccatttcatgaagggttttatcaaccaagtcgcgaccatttaaactccacggtgccagccgacctgatcgaagggtttcacagattcacactagccacactggcgtgctgcactgctcccatttatcgacagcagaatcaccatcactgtaggtataaataaattaccatcacggatgatttaaagcggaatggaccatcacttatagagaatgatagtgtgctatacggtagatgcatatagtactagcagaatgaaccattgctaggcatcaatttgaattgaccatgtaggtaagaaaagg

SEQ ID NO: 22510 - DNA, 4736 bp, Oryza sativa
  unsure (1)..(4736): unsure at all n locations
aaaacatgttttggcagggctaccagttgacaatagacctcccaatgcttgtctcatcgcaacctagagacttgggtgggctaagattaggaatggttttttaggacatcggctatggaataatgccattacttttgctgaagggtgttaaatggctactctcctccttcaaatcaaatgtgcaatatgccttattttctactttgatattctggagacttaaacatcaagagcttatttatcttcttcttcattttttttttatatccttgatacttcttgcttgaaaacggaatgatcccatctaaaatattgtttgatggtcatagcttgattataaaatttcttccaataactgtagttcttcatatgacttgttggagaaccatccccttgggaattcagagagtagccattcaactttgtgactaaagaacccctcgcaggcttgattttcttttttttttttttgggtcccttgttatcaccgcacagggttggcaagtggctgcacaccgcatcacaacttttgttgggacaggtagccctttcatgctctttatctctatatttttcccctggggttttgtgtctccactggtctgagacgcattgagaaaacgagggacatgttgacctcgctaatcggtagttatccgagcaattatttccattgcccccggtagccgctgcttgacatgtgtgttgtgtgatgaaagtagattgattcttttgcttgattagttttggacaagtcctagggcagccaaatctttagtcgtgagcatgacatgacatagagaaagccagttgcccctgtttcatatgggaactgaatggaattttgtaggaaaaaaacaatttttttttaaaaaaaatgaaggctataattgcatagcatctccatgataatgtaagaaagtagatgttgatggcagaagtagctagatgaaacatggctttgcactgtcctctgtatagtaacagcttgaaagagtggagggagaggtcggtgcggacgaccgtcgaaggaacgtgactcggcaccttcctgtagcaaagactcaagaagaaaatatcgatggagaagttggtgcagatggcagccgaaggaaacgtggcttggcacctctccatgtggtagattacacctaacatagtaccggcgaaagtttgaaagcgagtccggtagtgacggtgacctaggaggaagcaattcctcgttgaattggcggggcagttgtggaggtcatagatgcatcttcaacacagacagctccctaatatcacaaatagtgccacgttgcttcatgacatagtcgagcggcgctcaaaagacatgggcagcagtgtattgactcatgccggtgtagacggggctaagctccacggccacagccgacatctccgtgtcgtgattatgggtcctcgatcaggcacagctaagtggcgtccacggctgcttcgacgacctcctgtgaggaagcgtgatgatgctctcacgtgagatggtgtgatggaaatctttcgtgaggtcggatatttagttgttatggatgcgggcagctcagcgatgttctcgatggctccggtgagaccttctagatcggggatggcttggcgacatctgcagctgctccgttgatccacgacgcactccggcagggcgatgtaacgacatcctcctcctgcagatgatgattgctcggcgaggatgagcattatttgacagtgcctcgtctgctcgatgatggcaataaggtctcatgtatcgtggatgcgagcagctcgatgacgtccacatcggctccaaccaccctcgacgcactctggcagggtagcgacaatggagagagcgagcatcatggatagataacatcgatcttgacatgatggggaggaaaaaaaaacgactccgatgtgacggaggacaggttcccctaacgagaagcacgacgacaactccgacatggcaagttcgcctcagcaaattgagggcgtccggcctcttgacgacgttgcaacgtcaggtagatgcatcaccagtgactcgaacgggtgatgtcgacaccaaggatgagtagcatctcgtcgactcggatgggtggcatgacggcattcttgggcagccattgatctcactttcatgcttgctgatggtcagggcgctcgtcctcctgccggacgcggtgcttcggccgaggtcgttcgccgtcgctgatgtgctacggccgcgtttgtgctgctgctccgccgcgggtcagtgtgtattgttggtgtgcctggataggaataaatggatggatgtgttggatgtatatgattatcaaagttgatggtctactggccgccggtgcgtgcgcccagatggctttctcctcctttggcctctgcctccctatcgcgccgggcaccggtgatgtgcaagcgtcccagctgtggatgagtagatgtatctgttctcttgccgctatgttctacctttgtcctctctctatagtgagatggcctcccttctatagtggagaggagatagttcacagccagctgcatgcatggctttatcgatatatgcatggccagttgtccaactaaatactccggtgttcacgtcatggttgtaagttcgggcaattttgacatgcccccggcacaaatttaagtatgaatttgcttgcccccggttgagcatcttgaattcccgatttcttgagcacttcacaacctatgaggctgctttcgaaatcgcaagtgccaccgggttgttatcattatggaagaaaatagctcttaaccagagcatttcatcaaccatcatatgtgttggagaaagaacacgaaagatgggaggaaaccagggcagtagacaatatgagtagctcatccaacacaatggaagtgaagaaggattgacatacgtgaaaaaaatcacttgattatttttttttgcggggaaaatcacttgattattacttcgcagtgtgagaagagctcttctacgcttgattattttaataaagaaaantttaacaactatttattagccggtgttgcatgagtcgacactatttgttaaagcccttgatagggtactgttcatgacttgctctttttcttgcctaggaaattacttcctcattttgctgtacgatgaaccgagtttatctgaagagcaccaagtattgcagttgttgggtagtataatttatataagtaccatgcagaaccacggcaggtgatcatgctattaggccatcagaaatgttgcattttaagaggctaccatggttttgtgcttgttgttcaggagctggcccgcttagctccattcccctgttcaagactcaagagcagccatactcaatatgatcgctacgcttggcatggtcactgcggtcgcatgctagccgtagttgcggtgcgcgcgctcacgtagtgaccatttttgccaagccagctgtcccgtgccgcctgctcttcccactgccagtctgccccttgccacaccggcgcgcctatgaccgtagcagtgtggagattatggatatcccatatctacacggcgatgatatttgggctgaatataggataccgaatatagatagaatatcttatgtgtatcctgggtttgtttcttaacttgtacatcaaggaaacaccttgagacttagtcggtcacgactgtatttaatctgtatctgtgtattccgttagggatatagattaacttttgtaacccggactccttcccatatataaggggggtccgggcgcctctaggggcgaaggttgattttctctaaatcatacaatcaataatacactcggcggattcatccccggaaaggagtagggtattacttcttttataagaaggcctgaacctgtataaatcctttgtctccaaacccatacacttttccagcttgatagccacccccttttattattgccgaaatctagtttcgacagttggcgcgccaggtaggggcagcgtcaagcttttcgccgatcagtgcaatgggtcccatctccggcatcgacgacctcgtcttcccacccgggcagacgtttcggttcggcagtctcaacttcgtcaccaacaacttcggcaagatctctctccttgactcggaatcggaccagtcgggagagaaccggatctcagtcccgttcggattcccaaacgcggctgaaagctacttcaagaccatctcaatcgagtcggcttcaaaccactcggctgagatcgcatcttcttcaacgtcaccagatcaagatgatggggcttacccaccgatcctgatgcagctccccgacgatttggcgaccgtctccatcacgacagcgtctccttcccgtaggcctgggcggaagtcggcttcaacaccgatttcacctagcttcagggaagtcggcgtcatcctccaaccactcggcacggtttcgacggatcagctggatggctaccacagctctcccaccgtcgactcgcgccccaccgacatcgtggagtacgacgagtttagctctcgctacaactacgcggatctcgacgacttcgacggaagcctagatgacaactacacccctctctacttcggcgtcttcatggccaataacgagacggaggaacaacgccaagcccgggagaacgaagcgcgtcgtgagactgagcgtcgccgactggaggaggagcatcaagcacaagaacaggaacggctacggcgtgagca

SEQ ID NO: 22511 - DNA, 1132 bp, Oryza sativa
ctggcagccgagtcccccacttccgatctcatgactaccgtcatccaagtctcagcatcaccggcgcagcatccaatcgcaggagcaggggtcacgacgagcggtccgttcactcacctcccgatcaccatagggagcgccgagtggaacagccccgctcaccacctcgtcgccgccccgtcgatcttcgcgacacaatcatacagcgccgagcagctcgaggctatcaccactcgccgaaccgccacgacgacgaccttgacggagtagcagccttcaccgatgatctgcgtcgagtggattggccagccggcttcaagccgactggaatagagaagtacgacggtaccactaatccagaatcgtggcttaccgtctacggtctcgcaatccgcgcagcaggaggtgacaacaaggccatggcgaactatttaccagtggctttagcagattccgcccgatcttggctccatggattgccccgtggtacaattggatcttgggccgaactacgcgaccacttcatcgccaacttccaaggcaccttcgagcgtcccggcacacaatatgatctctacaacgtcattcagaagtccggagaatcccttcgagattacatccggcgattttctgaacaacgtaacaagatctctgacatcaccgacgacgtcatcatcgccgcgttcaccaaagggattcgccacgaagaactagtcggcaagtttgggcgtaaacctcccagaacagtcaagctcatgtttgaaaaagccaacgagtacgccaaagccgaagacgccgtcaccgcatcgaagcagtcgggtcccagttggaaaccgaaaaatacgccggccacgggaggaggtggaagtaacaatcataaggaccgcaagcgtaagcctgaggaacttgttgcaaccgccgctcactcttctcgacagcgttcgcgcgtcaacaccttcgacaagatcatgaactcccaatgcccgcatcatccaaactccaaccacgtggccaaagagtgcttcatctacaagcagttcgcggagcagtacaccaagtctactcggaagaactccgacgaggaacaaagcacgtcaaggaagaaggatgacggcgacaccccggctggttt

SEQ ID NO: 22512 - DNA, 870 bp, Oryza sativa
tgtgatatactcataaatgcccctccacaatattaatcagttagtgattagtgaataattagttgatttgcttgcacagtagaaacagagagagaaccggcggcttggggcggcggcgacggcgccttggggcggctctgcttcttcgcgggagtcgggcagcggcagcggcttgcacgagagagacggagagacaaccggcgccttggggcggcggcgatggcgccctggggaggctctccttcacggcagaggggcggcggaggcggctttgggcggcacggattcttcgcgggagaggggcggcggcggcggcggagggccggcgcgacggcgcggaagaagcagcgcgggatggccggcgcggcagcagcggcgggggatggctggcgcggcagcaagggaggggcggcgacgctacgatgaggcgagagagagagagagagagagagagcttgcgcggcgaggtagcagctgcgcgggagggccggcgcggcagcggcggcggcggtggccggcgcggcagcaagggaggggcggcggcgcttcgatgaggcgagagagagagagagcttgcgcgcacggtgaggcgagaaagacgaagaggagacagagcgagagagaaggggaggcgcttttattggtgagcggcttcgccgcttcggtgggaacggacaccacgcttagagtctttttaatatggtatagatatacctagaaccaaaatcaaacaaaaaaagttcaaactcagttcaatgaacttgctagtaaagaagttaatgttcatacctaaacattttcaaaaaattcatactcattcaaattgggtacatactcaatttgagtcttggagcccatactccatatagc

SEQ ID NO: 22513 - DNA, 5897 bp, Oryza sativa
cccctacacccacgagacccatggatcagtcaacagcgcggacgtcgaggcagacgcgggcggcgatgtcgacgacggagccggtgggcggtgctggctcagagatgaagaccgggagaaggagcagccaatgctccattttagatatgaagcttcttcttcagaaaccgtctgacgggacgaagaagatagcctatgagctatacctgtgcagatccacatagctttggatggtccgatgctgcgagttattccttgggccacggacatgccagtgttggctatggctccggcggcgctgctctgatccccgaattggattgacgcgattggggttgaggtgtactgatccatggctagatgacgtaggctgctgtgtaacgtaccgggcataatatagacctcagctcgctagtcgcgatcaaagctggcatgctcctacacgccaggttcatcagtaaaaggagatataataactgcaaaactgaaatcaaggtagttgcttgcttgcttgcttgcatccagcgtggcacgtcgccttgatctatgtggatcgcaggtacttgctggagctgagttgaaatgttactccctccgtttcgttttatctgacatcgttgactttttagcacatatttaaccgctcgtcttatttaaaaaatttaaataattattaatttttttcatatcatttgattcattattaaatatacttttatgcatacgtataattttacatatttcacaaaaaactataagacgaacggtcaaacataaaataaaaagtcaacggtgtcaaataaaatgaaacggagggagtactgagtaatattttgggtgcacgagttgccgcccatcatcgttagtggccagcagtagctgatgttttatgtgcattttcatgcatgtcgcataattgttgtaacatatatatgacaattcggacttacgtgtacgtctcttacttgctaggaaaatcatggcgtgagttacatgtaaacaaagcaaattaagtttgtcaaggtctcctcactccggccgttccatgggaggaagttcttgctgatggacaatggatagaagaggaggatgcgtgagcgtgactagtcagcataagctttactttgctatactagtcagcatgcatgtggaatccacgttaccaaacaaatttatgaaaatgttgaatatggatcccatctgaatctctatttagaaagacaatcttgaaagcagtggaccaaatataaccatctacaacacacccacttctttgccgattttgctatacttcttacgaccgtttttttttttttgcctcaaatcactcgaatttgattccggcggatcacttgggcatgatttaatttgacagttgtgatttatcccttaccaccacggcaccacctagcagtatctttatcgggcacacaatgaacaaatgaacaatacaaacaaactgatgagtacgggcaaaaatatgaacagatgcaagttagttttgtttgatgatttgatgttctattttttcatgtcgaattagggcaggaaattgtggatttagtgattatgtttttttctcaattctttagtgcttacaaccaactatattgtaatatgtatttgttgtacagacaaaataaagtttatgttagagttacgctataattacactatagttacagtgtacttacattgtacttacattgtaattactatgtaattatagtgtaactatagtataactacaatgtaacttttggatgggttaatcatattttttatacaatataagatctagcaaataaagtatacaatatatatacctgctgatatcatactataaggcagctttcacggttacgggttaacgatgtgattaagaatttgactaattttggttagaaaatactcgtatgtgactgtagcatattaatgaactgatattatctatggtggtatggtgcccattggtatgcagactaaacatgcctcttagtatcgttgcaagtatacttgccaaatatcaaaagcgagaagcaaacccgagtagaaatcaaccagttacaaataaatttgtgcctctacagacctgacaatctggatcactaaggctacagcatgggatgctgacttcataaaagagtatacacgtcaagtttaaacatcggtatttttcttcttggcacgggggccgtaccacttcagcagacatcggtaggagggcagcagagccagtgtgtggcttaaatttctgtttttcaaaaggtagcgcatcttgaacacttttttgtgcttgcaatgttcacctctgggatttttatctgctttgtacgcttccagctcaaagccgatggagagctgtcggctctacccttgcttccgaggttgattcttcatgtgctaatgtgtcgtagcagtttctatgtcattagctttaactgttcttgctgcttttatctactattacttgattgaaatcaaagtatctgttttcgcttgtttgggtgtaggaattaaggtttctgtgtatgtttcatatgcggtctgtggagcacgctgtatttttgtatattattatttatttagtagtgtagtctatttagattagagggttgtttgtctataagcgggttacatgtgtacgtgtatgtactttggacttaacatcctccttttgtttgctttattggcatgttgtgagtattatacttatcataaatggaagattaaattagtcactacatctataaccttctattcatcgtaaaattatcagtttcacaaccgaatttcgtaatatcacctggacccatttctcagcacatatgcacttcaagatggttgcgatgtttatctttgcaatattcatatgccttatccgctactggctcaaagcacggaaaatcaagagtatacttggccttggcctccggtcaattcaacaccgcgtgggggcaaatgccccctataatttttttacttagttattgtaactaagtagtagattgtcggcctacacttgtcactaatagaattcaatggattccctagggagtttattgatcccatagccacgtacttggagtgccacactaaaatacactcaaaaccactaactttcaaaattccacgacaaacagttataaattgaactagtaataatatcattcccatagtgtgatccatccatataacccatggaaagaaactaaaagctatctaaaatattattacaagaccgaaccatgatatagtttaagtatcattatggacctaggcaatatagtttcatagtgtgcagataaatgtgtatataaggatgctacttcccacccatgcatgtcggtctcaatgcgtacctaaaaactagataaaacacaagactaagtacaaaaatactcagcaagtacaatgtggaactagaaaacacatgatgcaataaaacatgatgtgatgttgtatccatcgccgttcatcttctattgatttcttcataagcgcattaatttcttgcccccaagcaaaatcagctttcttgattacatgatttcgaaggcaaaacgataaactataccggtttcggacccggtcagcagcactgtttctagtgtttttcctgaaccgtttatcagaatcaaacgaaaccagaggtgttgaaaagataacagcaaaaactacaaatcttatttaggtcaccaaacttgaatctctatgagtaattatcagatttgaaaatacggtttcagcctagcggccgataaaaaataaattcgatctaccggaaacggatcgtcttctatataaattagaaacaaccaggggctaaaacgaattacctagcagtactagtttataagaagaacaatgaatttagaaatatccaccaaattccccaatttctcctattatttttcctgtcctccttgttccttctctgctttgctcttccattctctaaacgttgtagaagaagcagcagcagcagaccacctagcagcagcagcaaggaacgttggtagcagcagtagcgagcaaatcacaaagcggcaacaaatcagattgaagctcaccggaatgagcagaatagaaaggaaccaccgatgacgacggaggatgatggctgcagcaaccggcaacggtcggggcggtggtggcgatgcagaagcggcggcggcgtccgcaagaatggcaacaatggcggctagggcttcaagtatcgatctgttcttttttttcctttcttttttttctgttggttaaatagagggagcctaacaaagatcgagtggcccacattaattcgataaccggaaattcgtcaggactccgattaccacaaacttatagtctattttgcaagatacgctacctttcaaaaaaacagaaaattgagccacgcactggctctgctgccctcctaccgaggtctgctgcagcggcacgacccctgtgtcaagaagaaaaaggtcgagctgtacctgaacgatatggaacagctcggtaactacatgttcgaaggtgggccatgggatcaatggaactccctagggaatccattaaattctatcagtgacaagtgaaggctgacgatctactacttagttacaataacttagtaaagaaatgatagggagcatttgccccacgcggtgttgaattgactgggggccaaggcccccaactaagtatactcttgatctcacgtgctttgagccagtagcggataaggcatatgaatattgcagagataaacaatgcaaccatccagtggtggacccagcagtaaaatttagctatggcggatcaatgtgatatgactagcgtattatactcttaattaatgaattaaatataattatacacaaactatatactacaattgcacttattgaaatacatgtcactaaaatataaaattaccactataattctatatttgtcatgtggtttttacaaccaaaattttaattttctttataatatatctctattttacatatgttgtcactcatatcgaccttttttcagcatgttgctgccttttgtgcatatggtttagagcttggatagtcaggccaatcaacagttatttctgaaagtagagaagtagtaaaccactgttacacttacatccatttaactaaactgataaacttgtactaaatcagatagcaaattaatcatgtgattatcatctaaaatcaacatgctaatgaccaaatggacaaacaccaagcttgctttaccggtggcctagctatggcccatgccatggcatgccacaagagaagttccaccagtgcaaccatcctgaagtgttgaaggagtggtcgaggtggttttcaacttcggttttgactgcatatgtgctgagtaatgggtccaggtgatattacgaaattgggttgtgaaactgataatttttagtgactaatttaatcttccatttatgataagtatcatccgcgtttcggtacgggtgataaccacaggagacatggtgctgtgattgcggggcttaagagcgtgttcattcaacaagcccaatcgatttgtgtcgcgactccggctaaaccgttgattatcagaacctttcggaagatcaggaaccctagtccacatcaactagtgaatgaacatgttagttgcatagtcaaaccaccactattgagtttaaataaaaaggttatattatccacttttttaaatacttgggttgtattcaatttgatgatttttgtctacacaactgtagaaaagaaattcttggtgatatttgaagtgccatgtttttctcatataatctatcatgttattggcaattttgataacaaaggagaatattatgcattgagtatatttttgtttgaatttgaatgtacccttctttttat

SEQ ID NO: 22514 - DNA, 5157 bp, Oryza sativa
attcctgcagcccggccaacagtctctaaaatgggcctaagcacagaaccatcacattataaaatgttttgatttctctattacttatctagaattgctaacatccatatgaatttagaagcatatatgttataatgtgaagcctatttaaaacccaacacatgttataatgtgaagcagaggaagtagtatttgtgagtgacatggcattacagaatttaccgttatttacgtacggtaccatagatgtcagattttatgatacaaaatataagggctaccacaatatgctaaaaaaaagtgatcttaagtaataaatatatagttaaggtgcatatacattgtacaagttaaaaatagtaaaaagtttcttgtgatgtaccttaagcttacaactaaccttaacaaaaacaagtacttattctttcctttactttctctctcctcaaatcacttaagagagttgggagccaccttaaattttattgagaaggctaatctctttttgcgaatcgaagaacacaaacaagaacaaagaagatacaaccaaaattgtagatgaatgatttagctcataagttggggtcttacaaaccgaactagcggcgaaattgttctcgatagaataatctaaacaaaaccccaaaccctaaaggtgacgacgggtactgatatatagattttagggtcgtgcaaccaacccttgatgcaaccctaataggttccaacacgatacacggaccaaaggcctaaatacgatgacacagcacttgaagacatcaacttgttcggtcaactagaaaggaaacccgcgcagatgcgcgggtgtcttatattactgttttatgaacacaacgctaaaaaaaaccatatttgttatttcctccgtttcatattataatactttctagtaatgcccacattcatatatatgctaatgaatctagacatatatgtatatgtgtacctaagattcattaatatctatatgaatgtgggcaatggtagaaagtcttataacctgaaacggaggtagtataagatatcgttattaccttataataaaaaagtatctacattgtcaaatagaccctagataatatgttagatgataataatttctcccagattctaataaaaatgacggcacccggttacgtataaattcccatattatcaagactacttattatcattgttttgaaacccgggcatatttaatagatgaaattgcatatgtcctatcaccaaaattaagcctaatacattattaatatactaaaaggtttaccattaatctgagtgtttgggtctcacttatttccaaatccatatataattattgcaagaatcccacttctataggttaatggaataacaccgttaaaatttgacataaatacccctctaacgggtgaagcttgccatagccgccaaggctttctttctccattaccttgaaaaaggggtcacgcatccatgtagccatgtcacttaaacctggcgttgaggacaattatcggcatgctcgtagaggattacaacggtaagtagaaagttgagcactattaccaacagtgacctccaatagggccacctaaactcagccatatgtatgcctttgctgatgcttacaacaacgtagcaagttttctcatccatgtttgatgtccttcaacgaaggacaagagagatgatggagatgataaacatagtttttctcacagaaatagttttatttacgttttgagtagatttgtggtataaagtagacatgatttgtttataatgttaatcggtactatttaatattttttatggatacaatattctcttttgaagataagcatggttgatcattcgactgtgcttaaaaaactatacataaagagacatatcacgatgataatctaaaaagcatcctatcattagtatttatattttgacctagatcctttttttggcaacatttgcttttaacacatgttgttcgtaataatatgaaaaactttcactaattccaagaatatatttattttctcaaacttatttacataattaatttgttcaagtgcacttataggcatcgttcgttctggtgagataggggagattgagtctcgtttaccgcgcgcacgcttttcaaactactaaacggtgttttttttgcaaaaaatttctatagaaaagttgctttaaaaaatcatattaattcatttttaaaatttaaaatagttaatactcaataatcatgagctaatagctcacctcgttttgcgtatcttcccaatctcctcaatccccttctcctcaaacactcccatagtcaagttagtgggggatatggcatacatatagcaattatgcccgacatattagaattcatcaacaataataaaatatatcatgagtagtttaatgtgcatgctattggactgctcatttgtagctaaaactattctgcatagaaaaatcatacatataaccatcataatccttgttatggattaaggtgcttgtgttatagaaagatcattgactcgaaatattttttatagtatttttcacattaccttgtatttaagaaagaattttccaggtgatagaaaacttgggagcaaagaagggattgggtaaaactttagggtcacatagaaaattttctctaaaatatgttgtgaaattattttaaaaaaatatcatgacattaattattttatgttggtcttatgtgtcctgatgtatttagcattataatatcattactataagtccacggtagttcatttaattagaggaatacaatatgatcacaaattgaatatctgattcaaaaataatttaaaacatggacgtatgtttagaagtaatatgttttatttttatattatagaaaattatatagaccgtccttttttccccatgatactaacacgcgtatacatgttttatttgggctttaactttttctactcgcacgtactacgtatggtattttgggttttttggctggtgaacagtacatcggctttaattattttttatcgtaagtaaatacgttgttaaattttcccagcgaaatagttacgtattttgtttgtatatatacacgggagatttggtggaagggattaattttgttcaatagatctaatctaatggtgtatactaatgggcccaccagtttaaatgaaaatcgatggtgagatggtttgcttttctataaattattagaaagtgccacgtggcggcctaggaatgtctgtaggagtccacgtggccgcttgagagcgtttgtaggaagtttaatggacttttagtatataatagatagatagattcccattgactcggaaacaatttggatgtgggaccaaaaccattggaaaggttatcttcttagctttccatccatataaagaacgccccaatccgagcacgtatgcgacctgggcacccgttttagtgtagactagtcatggactctgaattgcactcgaagtcggcttggtttgggcctccaccttgacttgcatgtccttgatgattctccatggctctaagtccttctccaagtgtctccttgtcctctccattgttgctaatcacaatataatcattaggtagcaatctattctcaaattcatacaaagaagaacataggaatgagctcacctctaaattcaattgtcgcgtgcgagctcttgttatcggtccttgaatgaccgttggaggattgttgtgtgtatccgaaggagtgatgtccgcatcgctagttgtagtatggatataagtgagacaacacacaacttttctttcttagaagaaacatcaagcaaattgttttatgacaaaggtatttcaacagttgtttccaatatgggttgctctaacgtaacatatgtagtgggcatatttcgtacatcataactattcataccttgagtaaatgtcgcaccattatcatcaccattgttctcatcttcagaaattgttggcgcttgctcaattaaactttcttaaagcatgcatggagcaacgagtaggccttcttcctctatgcctttcttctcttcctctttatcctggttgttctcaaatacctagaaaatgttagtaaatccaaaactcatgcaacaagtggcgggtatggcactgttgcagcggtggatgaaggtcgtgtactcactggcggtggtgtagtatgaaaatgaaggcttagctagtccagtaatgttaatctttcttggcatgcaggatgtgccaaaatttctctggttctttcgttgatgttcctgcaactcgttttctacaagcatagcaggctggaataaactattgatagtagtaaattctttattataaacaatatcctgaatttcgctcctcaacccaccataaaaacgaccaattgtatcccctgcttcatctactactccgtaacatatcatacacttttgaagctcgagtagtatttatgaacaatcatatcaacttgatattaatgttgtaatttcttatgcaaatcacgctggtaagaaagaggaacaaatctattacgcatgacatcttttagcttattccatatagcaggttgtaagtggatatcgcttagatcattccactagattattgcaaagtccttgaacacactagtagattgtctaaatctatgtaccttaggaactaggtgtgagttaaacttttgttctactatcatctcccaatcaaagtattcctcagtatcacaagcaccagaaaatgatggaatactaaacttgactttaacaaaattattactttccatacattgacgtagttgttcatcttgtgttgcttcatggccaacctctccatgttcatgggtactatatcagaggagtagagagccattgaactcgtgaagtctatcgtttagagtagctaaccattttttctcatgctcaagggaattggttatgtctaactaggtaatagccactactggaaaattaactattgccacataaatattgcaacgatgtataaattgttgcaattagttacactgtagccacaattttattttttgtggtatttataatagtatatcaccacaatatataattgttgtaataatagtatatccacccttttcatcgcttggtctattgtacc

SEQ ID NO: 22515 - DNA, 2423 bp, Oryza sativa
taatgtgaattatttttagggacttttttcaggttgaaaatgattaccatagacaggcaacctaagatgcctgcccgtggaaatcatttttcacaagtgggtgatctaatttgcctgactgtgaagtttgattttcagtgccggctgtttcctgcctacaaaattgatgatttctgcgctcgtctagatataggcggaccgtcgatctagatacttcgatgaatggaataacactttgtttcataaagaatctaataaagtatctatgattgcaatagcacatgactatatcaccaaatcctagtaaacattttcttcgaaaggaacatactctattgtcaaaatgacatgttcaacaattccggaagtcacatttttctagctataatatttggccgggtaggcgggccatggatctagatacttctatgaaataacactttgtttcataaagtatctatgattgcaatagcacatgactatatcaccaaatcctagtaaacattttcttcgaaaggaacatactctattctcaaaatgacatgttcaacaattccagaagtcacatttttctagctataatatttggccgggtagccattgacaccgctaatccaaacttctcagccatgtctaaaccattcctgttcaccatttgaggcattgtccatttaaattggtgcataagcgagccaagtatcatgtgcagcattcggttggcaagaggcaatccaatgcaaatgtgcctccctgaaccaaatggaatgaattcgaagtgtctacctgcaaaatcgatatcttttgtaatgaatctcttggggaggaacttttctggttgtatccaaactttaacactttgatgaatagcccatgcattcactattactttgctccctttggggattgtatgtccttctatttctactgtcctctctgcctcgtatagtcgcaaaggcacaattgggtgtagccgtagtgtttctttaacaattgcttggagatagggaagttggccaatgtcagattcttcaacttgagatctagtgcccagaaccatttttatttcttgttgtaacgttttcatgatttcaggattttgaagtaactctgccattgcccactctacagtagttgcggtggagtcactccccccaacgaataaatcctgaaattcattcaaattgatgattactgcacagtttatttcaacatatatacaatatgtacagttattgaagttccgatctaagggcggatctacagtgtcaatgccggtatcaggtgatatcgacgacttcagcatatatggttaaactgcttgtctatatattataacactatgatataagtatgatgagtatactacaatattgataggcaccttatgacactaacgaaccaattttttttgatccgtcactgttctgatcggactgacaatatgtacatatcagtgaaaatcaattaaaacaacaaacgtaatatatatgtccatttagaatttacaaataaccattttgaacgactgtgtttgactccttttaggtgtaacaaaaaccttgtgtttttattttcattccaaaatgtagttatgtagaacatgtattttttcagtggtcagagttcgggagttcttttacttaccgtgagcaacgccctcatcaaatcacggtttatcacctcgtcgtcgccatcttcccgctcttgctcggacatgtcaaggagcacgtcgagcaagtccatggcctcgccgccgcggccgccgcgcaactccctgcagcgcatccgatggtcgatctgcgcgtccaccagccggtacgtgttcttcatcagctcggcgagcctgcgacgcaggccctggaggtcgagcgcggcgaccgccgggaagaagtccgagacgttgggcgtcccgaggagaacggcggcctcgcgcgcgacgtcgcagagcacgtcgagcgtcgccgcgtcgaggcgggtggagaacacggagcgccacagcagctccacgttcgccgcgagcgccaggcgccccacgttgaccggcgcgccgccgcggtggtccgcgcgctcggcgacgcgccggaggaggccgccgacgatctcgtcgcggagcggcgccagctcggcgagcttccgccgcgagaacaggtgcgccgcgccgagcttgcgcagcaggcgccacttgcggcccggcgggaggacgaacacggagttctccgcgtggccgccggcgtgccacgcgtcctgccggccgcggccggcgaggctggcgttgtgcgtctggagcaccgcgcgggccgtcgccggcgaggaggcgacgacgcaagtcgcggcgccgagccggacggtcatgagcgggccgtagcgctcggccaggcgcgcgaatgagcggtgggggaggtcgccgatgtcaaggaggttgc

SEQ ID NO: 22516 - DNA, 515 bp, Oryza sativa
tggctctagttcacgccaggaacatcggtaagtccgatgcatggattacacggcatcacattgatactttccccgcgtggctacgacaacatctcatggataacgagtcaatcaaccaacaacttgccttcctggcgaggggaccgtctgggtcgatcacgacattccagggatatgagatcaatgggtacacattctacacgagagcccaagacatgaagagcacgaaccaaaacagcgctgttcgtgtcgatgccatgggacacgatggaacaactgccacgtattacggtgccatcgaggacatatgggaacttgactatggtcctctcaaggttcctctgttccggtgccaatgggttaggttgactggtggaggcgtaatgattgatgacagtgggatgacaactgttgaccttaacaaggttggatactcggacgaaccttttgtccttgccaatgatgtaacgcaagtctttttcgcgaaggacatgtctagcaaaggaaagaagggc

SEQ ID NO: 22517 - DNA, 803 bp, Oryza sativa
ttggaacccgggagatacctatagaacgttccattcaagcagatcgcacatcctgttttacctttaatttgacctaaaactgaaaacattgctggataatcattaatggtcacgaagatgatggccttcactgtgaagtattcccttaagtactcctctcacactttcaatccctctttccataaatcagccatatcttccaacaatggttcaagaaatacgtcaatatcaataccaggctgacggggtccctgtatgaggatacagagtagtacgtatttttgcttttgacaaagccagataggaagattatacatggtgagaagcactggccaagtactatgtgagctgctcatgtctccaaaaggattaactccatcagtactcagggcaaatgtaatgttccgtgggtctttagcaaactctctgtactgagcatcaaagtttatccactgacgagcatctgccgggtgtcgaatcatcccatccttcttgcgcccttcttcatgccagtgcattagttccgcatctcgtgggtttgagtatatcagtttaatgcggtctttgacaggaaggtaccacatcacaagctgcgggatttttctctgtcgtccctcagttgtgtcagacggttctaggccagtattgctattcgatttgtaccggctagtaccgcatgttggacattcatctaaaaaaacgtactctttcctatacagtatgcagtgatttacgcacgcatgaatttattccacaccaagtgaaagagggcatatgggtttctttgcttgatatgtgctgga

SEQ ID NO: 22518 - DNA, 4035 bp, Oryza sativa
cgtgtccatatttcgtactcgtccataaatccacgagttactaagtgctccttcactttaaaagcatcgtcgaagtcccagactatttcattcttacagtcagcacatggacaaattatcttcctcatattgttcttctcagcgtgtgccttggcaataccaataaatttagacacttcgttgctatatggagacaaaagcctcggccaatgatacatccattcccgactttccatatctctaaaaaaatgcacataaaatatttgcacaattaataccaaatttgtagggtttattgaaaaaacttatcgctattcaaaactaattaactaaaggttaagtgtaaattaataaaaaatcaaagtttatttcaattttttttacacggacatgccaaattagtacattaggaaaatctaacaaaatcagatcatcggcatattacaaaatactataactatactatttttttattgcaccgaataaatagacattaaaaatttttttctctctctatatatgacaagatctagatctagatctagaactaagaggtggatgtgatagcaaaaataaaaaaaaaattgagaatttatgttaccacatgaaaccactacaacaagaggcatcaagtattacacatacatctaacatcagcatatcaaaagaaataaaattaaaaaacatggagttcttccttcacaattttgcatgcataaatccatcacaaattaaggtctaaaagcttaaaaaattacatacctagtgtggaaataagtagatctaagcaccgtagaaaaatcacccgaagatttgaagtcaaaacctcccccctatatttaagtcactttaggagagagaaacttcggggagaatgaacagggctcggggaggaagaagactatataggggcatcttttcaggcgggccatataagctgtcacaccctacaaatcccaaaatgtataaattgttgtttaaatgaaattattagaaatgattttaaaagccttgaagaaaagatctaattttaagtgctaaattccaatataaaagtgggccagataaaattttattaaatacttcacttgattctatagttcctagatttttctgggatttatttgagccaagaaagtatttttaataaatggaattgcatttcatgaataatttaaatataaaaaggttttaaaatctcccttttggctttgggccgaaagtcggcccagttctctccctctctatcttcggcctgctagagcccggcccatccagccccccgagctgagccgcccgctctccctcctctctcccgctaacaggtggggcccacctgcatggtcgtcgtcttcctcctcgcgccgcagccgcgccttagcgcacaagccgccgccgcccccttccaaattccgtcgcccctttcccgatccagtcaaattggtagaggggaaatgatcctcttgatctcctctatcttttctcctatagaaacttcatctaatttcgtttggaaattgttggattcgagctcgattcggattcgtttttccctcctaaccttaaaccttccttctcgccgccggccgccatgggcctccatcgccgccctctagcccctatataaggacctccgagacctcctccatccgtcgccacctcgccttagctcgccgccgcttgtagcgccgcctccgcgttagcctttgcgctgccgtcgccgccgcaagtccagccgtgcgccgccgccgctccggtcgtcgtcgtcgctcgggaaggccgccgtcgggttcgccaagtcatcgccgttcttgtcccatcctccgttttcgccgaagaccgctggagcatcgctgtcgtcgtcgacccgtgcacctccgccgcttcgacctcgccgccgtcgccgtccgttgccgtccatcgtcgtctgagccctcggtgagttcgccgcgtcgccctctacgcgtaggtgtcctccgtttgcgccgccgcgccgtcgttcgccggcgagcgtgagttgctgagccgtcgccggtgatgacgtcatcgctgacgtcagcgccgcgtcatccgtagacccgcggtagatcgattagatcccggccgttcgttttgggctagattagatctcggtcgttcgttccgtagaccgtctccgtgcacccggtccaccatgaacccgagccgctgacgcaataaatcatttttccttttcaaaaataattctttattgcgtcataattcaattaaaatctaaataaatgatttaatccgatttaatctttaaaaattcataactaattcatcttagctcggatttagttggttcaagtctctaaatttttctaaaattgagatctacatgttaaaaatatccacatgtgctgtttacgattgtttatgtactgttttggtgattttgctcttttatgcttagattccgacgttcacggagagtctgagtttgcaggagaagactttgaagagttccaaggccagcaaggcaagtcacacagatcccaaacaaccctttgagcatgttgatcccgtttaaagctattgtttctattcaactattgcatttatttttgaatgtcattgggtgggaataacctattgcttttgttatagccctttgatattgattacctatactttgtcacctggttaataattggattagctagaacattatatgattttagctaaagtaattaggatgcttagccatgcttagagactctagctcatatgaatgggataattaatgattcactattacttaatgatggcttaatgatagctcatgatggttaatcatgataggatgattaattaagatgccaactaaaacatgataatggtgagttgtgagcacatggttttgatggtcgtgctcatgacaattaaggaccggttcacgattttcggttgtgaaacattaaccgtcaccataagccagcgtgggcaacggctttaccttttgtatagtgtggttcattgtagagcaccagattgtgaagtgttggagataagctcacgggggtcgctggggagtccatgccttgtttacaagggggtgattatgattcgagaacggtacactgctttgatttgtgttatgcagaggatattgtcacaatctctattcgggtacttgttaagtatcgcgacgcatggttgacatgatgttgaggttatgtattgtgggtacagtggtacacctctggccagagtaaaactattcaaatagccgtgcccgcggttatgggctggtcgaacaatgtctttcgtgattagtctcatacttctcaccataataaatgatgctgtaattgataataacttgtttagctcctggtttggaatggtatattcctggtttggagataaaactgtgcagccgggaatggttgctcggaatggttgggcctatgcaacgggtatgttgtatagcgttggattaatattgtttaattaaatactttactgttttattaaattctgaagtatttgttaaatgccatttatgcaaaatgagactatattatgccatcctttgttatcccttgcatctgcatatttgctgcgtggcttgttgagtatgtcatatactcaccttgcaatcattcatcagaggaggagttctagagtgatgctgaaggtgtggagggttaggcgtagtcctggtcaagctgcttgtggaatggagtcgcctgcgccgtttatcttattttccgctgcttagaactttattgtttgagaggaactatctacctctgtaatgactttatattcgcttattaattagagtaataattgtactctattatcaatttgttattgtgtgcctcggctgattcctggatgagggtttacacacatgtaagcgtttggaattttggatagaaattccgagcgtgacataagcggcgcctgcgaagattgatctttgcaggcaggccatataagcgtcgcctgcgaagatcgttcttcgtcggcacacgacgtctgccgcctgctaagatcgatcgt

SEQ ID NO: 22519 - DNA, 8575 bp, Oryza sativa
cttccaaactgccaaaggacctcggttgcactagttttgacagctcagggatcggctgtatctgtttttgaggttgaaggacgaaaattagatttattggaaaattaagggacctcagatgaacttatttcggaatggaatgtaagaaaaaaaaatctatgatccttacctcaaccatggtcatgaaaaataatatgaaggaagatgattggacattgatttgtagaattcaatgatttatagatggtgttgcagatgacatgtttacatgttgagctttagaattagtgggttataactttacagtaagataggatacacgagtcctaggcctccactcttttttggcacacaaaacatcattgcagcaggcagggaagatcctgattcactctagcatattttgaattttttattcggtggaagcagtgatttattccacaaactagcaatcatctcacctattggcttaggctagttcctttcagattatttatcgaattattaaatcagattattcgctccatgtgtctgtaaatatatttttaaaaaacttaagtttggaaggtgcttgtacgagtagagtgtgtacgttagtattggttagaccaattattttaggttatttatcaaaatatttaatttattcatagaattaagtaactgatctgtttcaaactaagtcgagtagcttaattaactcgcagatcgtacgtgcgtcctccatatataagtccacaaaaatactgtgtcataaatgatatactgaaaaaagaacaaatgtgcacgaataaactttattcaaccgctgacttatttaagcgtagattgttcacattttgtacagagaaattaaagctgtaattattctttgcatatatatatacggagtatgtacaagaaggaaccgccatatatgcatccaaagaacatgttaatacaacactagagataacaataacttaatttagaataaaacaagttgtcatcattttgccttgtcttacaaagttgaccagcggtaatgcacgccctaattaattaaacatgttcatctcaagatggcaacgataaaaacggcgtaccaagaaaacctcaagcttctgtttttctccatttattgccctaattaaccaccaacctcataatcctagccatacaattcgctgctaaacctgtccttgaaaccactatgtatatccaccgcaaagccggccacggcgtcctctagtcgcaacaatggcgcgtcatcgtcccatgaccgccgtcttcttcgtcttcgtcgtcgcactactgtcgtcggcttctccggcgacagccaaggcgacaccggcggcgccgccatgcgtggcgccgccggcggcagtggcgttcctccgcgcgagctgcgccagcacgctgtaccggctgacctgctacgacgcgctcatcccctccgggtgcgcgttccagaccagcacggtgaagctcgcccgcgccgctgccgacgtcaacgcggcgagcctcaagaacctgacggcgcgggccaaggagctcgtggcccacggcgtccccggcgaggcccccgcgatcgccgccgagatccgcgactgcgcgagcgcgtcgtcgtcggcgtccggccacgccaaggagacggccgccgagctcgcgaggctcgacgccatgggggacgccgccaaggggagccaggcgaggtgggcggtgtccaacgcgaagacgtggctcagcgccgcgatgaccaacgaggccaactgcgccgacgcgctctcgtccacgggcgccgccgtgtcgccggccgcgagggagttgatcgccggtgtggtgatggccaagcagtacaccagcatcgccctctcgtttgtcaataccataccggtttcttgaggtgtaacttgcatcgtcttgtacctccgggttataacattcgttgtttcggacaaagacgtacatgaaacaacttttgaccactatttcttattataatatatatatctatctctatctctactacttaaaaaattcaaaaggtttctctgtctaaaataaaaaagagtaaactgcactcaactcacgatacacaaacttgcgtggtgggtgcaaatagatacaataacttgtaaattgtacattttagtataacaacttgtctagtccgtgcaaaccaggccaaaacagaccatgcattcaaaataatttgatgtggcgttgacacggatgccatgtcgctttccttcttggctcgtttcagttcatgtttgcgtcttcttcacaaattaaagttataaaatcataagcatatggaaattttgtttcgtgcattctattacactcacccatccctgacatagttcaatgcaacatggacctaaatcgctgactagctacaagtgctcagagatattggtgaagggtcgattggccattacactaccgttttaatacgtggcaattagtatgtgctattgctagtaacaacttgtatgagatgaagctggcatctacacttctgtcgttgatcagtctcatcaccagccactctagttgttccagtcttagaaactactactttggtattacaggatatgtgcttctttccactactgcaacccatcttcttgccattactacggtgtgcaactaattgtctcctcagccgcatagttccagtgccacatcatgttattttcaaatacactgactattttggccttaatttatatggactacacagttgttgtaccgaaatatgcagtttgcaagttgttctatctatttgcacccaccacacaagttcgtataccataaatgcaatttactcaataaaaaaagagcaaaaaaataagtccgaatgtatggtaaaaagcacggcaaaaaaagtccgaatatccgttttcatcatccgtgtgtatatcttctctatctctaatctaatctaatatatgactcttctctatctctaatcaaatctaactattttaaaaacaaaagtttccatcgtgcgctaaaaaacaaaacatacaccaaaaaataaaatcggtttacaaaaaacgcgtgagaaaaaacacatgagaaaacaatgtcagaaagcaaaaaaaagcgctagaaaaaaaggtttccattgtccgtaaaaatgtaaaaaaaatgtgtgagaaaaaatattcccatcatccgtaaaaaaacaaaaaaaaataacatgcgaagaaaaaagtcacgaaaggagccatttctaaaataaattgtttgaaaaaaccacgcaagaaaaagaaaacaccatttataaaaaaaaacaaaccgctctaaaaaaactgtgaaaaaaaacactaaattgatggacgcttggatcggataggatcatcgattttttttcatctcctacaaggcttttgtttcatcatctattcttttgtattggagaccctgcatgtctctataggcaattatcggactatttttgttaagtaaagctactattcttgataacatattatatggaaataatatgaaaaaaataaacatatatttaattgttatctagagaatagttcatagtgactctattttgtgtagacttgactatgcgaggtaatgtatgatttgattgattctattattggttgcaagaatgagattgaaagagtattttagataatatgcatgttgtcacatgaataattcaattattttaggtaaagcaagcatcggtaaggttgccatcgttaaggttgggtcattacattagatgttccagttttctgattgttctaaaacaatccatacaaacgttattattgccatggttatgcataaaaagcgtatattatcattagaattttttcactcgttgcaacgtatttttgttagtatataaatatatcaaccaaattatttgttaattaaatctccatatttttaagataaatattttaactattatctatatttaaagattttaaaggttgatataggcctgatttaaaacgacgagtattatctatcctccttggagatatggtttaatctttcagtttggtcatttataacgggggtgccagaaatactatcataccgggagggtggggtggcggcgctagaaccaaaatttcagaaattttgatccgaaattttgaaccctgcttgaagatagtacttgacatggcgttttctttcgttcggagacgtacggaggacagtaacgtgtgtctacacgggtagaaagtttaaacataattttcaattggaatttcaaagtatgaactaccctcgtcaatttcaaagacgatcgaccgaattacccctaactcaaatatcagatatttttaaccccgaactttctaaacaagacgaattaccccctaggactattttggacggcgtgacaatccaatcaacaaaaataataataataaattatagggcccacctttcgtttcctttctcctctctcccaactatctctctccctctagccagtatcatctctcccctccctctctccgcggatgggaatggtggcagtggccggctgaaagaggcggggcttggcatgagggagacggccggatgcaaggctgggaataggggcggcaaccggctataggaggtggggctcgacatgagggcggtgactagacgctgaccgcctcgccacctttctcccgtgtcatcgctgtcgaacggtgtcaacatgatagagggcccagatttgcttcgtggtgaggcacttcacctagcgatggcattggcatcctcgggcgtgagctgggcaaccacgccaatatgcacccacttccttcaccgtaggggatgagctcttgtcatcatcaccagaggagaagtctccccgactcgactgcgtcataaggagagggctagacccgattttcctgtctgctcaccttctttctccactggtagcaccgatctctccaatacacgaagagggacaacacctatgacggcaaagctacctcaagcgcaagtggaggtgggcgaagatcgcttgggcatccggcggcagtggtgggcgaagctcgcccgggcggccggtggctgaggcggagcttgcccaggcagccggcggcggatgtgcagcttgccccgccgccctcctggttgtcgatgtcgcttgatccatgcgccatcgccgcctgtcgcattgccatccgccaccaccgcagacccgtttcctccccggaaacactgccaccgcaacttttgttagccatctctgccccctagcgtgtgccattgttggccacaagacgcacgatggttgctgcctctatcgctgcccgcggctgtgctcgcacgggctcgagcacctcctaccactggccactgtgcggtaccatcggcctggtcctcatagcccggttcggtgagagagagagatggaggtgagggaagggagaagagagagagagatgatggggaattggggattaaggaaagagatagagagggtgagcatatggcatatggggctcaccaacatttttttaaaaaaattaattgccacgtagtaccaaaaaaccactggtttgagttaagggggttatttatcaggtttgcatggttaaggatataaaatgtgtggtatttgagtttaggggggctaattcgatcgacctcgatagtttatgggtaattcgtactttttccttttcaatttacagttacagagaacatatctcctaagaattgggagagtgtttatttgtctcatagacatcgataacttcgtctttcattattagaacaataagacgtatatctaacgactcacatggccattttatttctgtatgacagatgaaccatactactttgaactaaaataaaaggtgaagtgcatgagctgctcataaacttatcttggatgtcatgtagatttaaataaccttatcttggatgtcatgtagatttaaacgggctctaacctatttggtgcgctgacatagcatacattgatggcgcttacctattagtagacagaaataaaatcacatagaaaaacatcttttcttctcttaggtagacagaaaaaataaaaaagtagagaggtgaaaatatttttaaaattttacaaccccatcgtttacctggtaagagtaaaaagcgaaacaatctatttgcaaatgaaaactaattttgaatagaaattttatatatgtgttctaaatgatctaaaaacaaaggctgaagaataaactatgatgaaaaaagaattacaaaatcaactccaaatttaaagttaaaaattaaaattttggtcgatacggataagcataagcgaaaagatgaagccgttagtttttcctattgttggtatttgatactatcgcagaaaaatctgcaagtacacgaataccgttgtagcacttacccttacagtattctaaggtatcgaacatgagaaacgtgtgtgtactacctatgaacataattcaatcaaaggacaacaactgatgattgtttagttagagaggattcctatgtctttgaattagctacttaagttaaaagtaaaactttaccatatgctttaggcaccggccctccactggtctaccaggtcaagtctggtcttgagctctacgatgtgccgaacatagagggatacatgggacggataaggctatcaccacgtaccgcctacctcactttccgtggagtacacaacaacaaagataatttcaaacctaaacaccatgcctaagtcattaattactattctagcaatgcatatgaacttccttctttgtccagagtcctagtactactgcactcagttgcacactaagcgtcgtggcggttgcgccccgcggcgaggggcatggacaggcagagcgtgacgtcgttgggcaggagcaccatccttgaccaccgccgtcgccgctgcccacagccaccgtcgtcaccattgtctccacaccagccagatccttagggccctcactgaggagaagctgattagtggagaggagagggctcccgctggatggagagagagtggagaggagggggaggtggctagggaggggggagggagagaggaggggcagtggacggagagggagttgaggatggggcgaagaatgagagaagcccgataagagcgaagaaagaggagacaagaaggggggagggagaggggagcgaccggtggatgagtgaataaggtcgacgcgtgcacttggctaccctggcttggctcagtttggattttatgggtaccaattttttagaaaccggtacctattgtactgtagttgtcggttttaattaaccaatacatataaaatattataggagacgtttcttttataaaatcattacctacagcattggtgttggtttttactgtataaacagaacctatagtattcaaaggtacccgtttcaccccgtcaagatacgaaaaggtatataggtgctggttttaaataaactatcacctatgtgccgttacctattagagttttttagaagtgtatgcgtacttctccgcattagaggctgaccagttagtgggaacacgttgagttgctggacaacagtgtgagggcagatgatatacatctctctgggaaaggatcgcgagctgcggaatagtgattaattattggagcatctgattgttctatatgtacaattttgaagttaaccaaacacacaaagcacgttccaaatgtgtatttctaaattcgtgttcctcgaacattggagagcaattaatgttagtacttgcacgtaataaactaaacaatataatatattatattgcatcatatatacacgtgtgaagccgctaataacttaagtcaatgacttatactagattaaagtattttataattcaagcacgaatcggcaatatacgtactatacacataattaacttgaatcaaaagtgatctgggcagatcaagccgtgcaggggaaaaaaaaaaacagttggattacttacgcgtcatagattccgtgtatatacgtgaagccgtgtggagcaatagaggcacctctgctgacagcagtgtgagaagcacgtacgtggacggtggagagggcgacagagcagatctgatcatctgatggaaccgacactcggcaatttctgcaaactaccaaattacacccttcgtcgttctacgtatgtaatgtatgtaagatgtagttttgcggtaaatcgaagaagcttattaactttctgtgagtttacagaaaaataattaatatctataataaaaataaatagaataaaacacattataacataacaacctatcagtgccacctctatagtgtctaactgtctattggataaaacatagcgccactacatgtcctctcaaaccatgtgcgctctgcagacaagaactagcactgatggcaccaaaccagtgccaaattctagtgaacaatcgatacttattatggagggataatcggtattggtttgtgtaactagccagcactattatctcactcattagtgctactacattgttattataaccacactaataagtttttggttgtgaaattttaaaacagttgatcccccgagcatttt

SEQ ID NO: 22520 - DNA, 616 bp, Oryza sativa
tatgggcacgggaagggtggacgaggccgggaggcggccggatttctcgccgacgtgggggagtggggagagagagttgggggggattcaaaccgaatcccgcccttacggggcgcgcgcggggcgggaaggcgtggggaagggggcggcgacgtgggcgcggcgacgcgggcgcggggcgcggagtggaggaggtggggcgccggcggttgccgaccggctggaggttagggaaggtgctgacaggtgggccccacctgtcagcgcccgagggagtgagggggaggcgacctagacttcgggagggggcggaagagatgggccggcggcccaaaggtggaaaagagggggaaaaggatggaaaaagggaaaaaaaaaggaaaaggatttctagggatttaaatattgcactttgcttattttaattggttaaaattatttccaatgctctgaaaattccactaaaaatcatgttagcatattttgacatgtagaatccaagaaaaattccacatgccgattccgattattatttgcatttattaatttgaggaattagctctaggttaaattgaacaatttcttcggtatgatttattttacaaattttaaagct

SEQ ID NO: 22521 - DNA, 3847 bp, Oryza sativa
taacaaacggagaaagacatgcattgttagcccatcgtaatgaagggttcagaattagacatcacacaagatcagtctcattagaagactcttctgcaagtgcagaactatccaatggtattgactccactaatcagccaaaattagtgtaacaaataacagtgagaatccaatcttaaaaatttggttcatgttatatattcggtaacaatgttttttaaatagacaatctatgtttaatataacaaggtaccaatgatgtacatcctccatcacaatcattcatcaatacaggcacagcatgcgcgccatgtttatgtatagtcacctatttcaatacaggtgatggtgaagtcatttttgaggttgatactgatgttgatagtatgtttcatgttgtgcaatttctcgtgtaagtgagatgtgattctaatttctacttcctctgttgtaaaatataataacttttatctatgtatctgcacaaagatatgttgaggtacttaacagattagtatgactactggacgtaagatatatttttgttttgcactgagaccacacagttcgaaacacactgtgaaactatgaacatcaccttgtcccttagactttacttattacactctcttctaagtttatggtgtattgttcttgatccactgaaacattggctcttcattttgtacagtttgttaaatcctatgagactaattgaaaatcatattggctggggcaatgcccagagttttggctagctaacctcccacatatataaattaaagagattaacattaaagacaagaagactataattccacttaattatttaaataagaggcatgtgtatgggtgtgtaaagacggttgggttaggtaagactgggtgagaaataaatgacaagtggatatatagctaggaaaaataatactcttgagccctctaatatcttggaacattttttttaaacatggtacagacgcatacgcgtacatggacaccctacccttataataagcatctttggaaggctgagctagcacgtctggagattgatgaagttactactaacgactcgctgttgacggaacatcgttcatcgctgaaagaataattagccgtaaatacgagaacatgtgtctagtctaggccttgaatctgggtgagctagtttcatgatttcatcacaaagaacctaaccagttcagctacactcatttcacttggaacaaattttgaatgtcacgatttgggacggaggggagtaaatattcagtggttacaaaatttagatatttattataacaattaatttgagttggaatattgaaaaagggttgtcaatttcttagtttactttttttttcttatatctattaatcatttcctcagcaaaacaagtagaatatttgttaatttttttaacttatactacacaacgaatatggaccgttcttgcttcttttatatatgcatttgagtgaagtcatgacaatttaactactccatctgtttctgaatatttgacgccgttgactttttaaaatatgtttgaccgtttatcttatttaaaaaatttaagtaattattaatttttttcctatcatttgatttattgttaaatatacttatatgtatacatatagttttacatatttcacaaaagtttttgaataagacgaacggtcaaacatgtgctaaaaagtaaacggtgtcatatttagaaagggagggagtataatatttttatgtgcatttctgttcagtaaactgcatttgtacgctttgtaattataaacttcaaattatgtctagtcgcaccgatatatacaacttctgtttaaaaacttctgaacgaacattaccaggagatcagccagaaaatgaagaatgttgtcatcaccaagtcctcgccggagctcgtcggcctgtcgaccaagccggcgccgccgccgcccggtgacatcagcctctcctccttcgacgaggctcttgctttcgccgccttcacgtcattccacatcttcaccaatggcatcgttgagccggccatggcgatcaagagggcactgtcccaagctctggtctactactaccccatcgccggccgagctaatttcgccgccggcgaacggaggctccgcatctcctgcaccggcgagggcgtgggcttcgtcgccgccacggccagctgcgctctcgacgacgtcaagctgttcgacccgccgttcgcggcggtgttgaaggagctcgccgtggactatccggcggagggatgcggcgaggatgatccgctgctgctcatgcaggtgacggagttcgcctgcggcgggttcgtcgtcggcgtgacgtggaaccacgtcgtcgccgacggcttggggatcgcccagttcctgcaggccgtcggcgacctcgcgcgcgggctgccccggccgtcggtgttcccggtgagctgcggcgatggcttcctcccggcgctgccgccgctggtcgccgccatcgagaagacgatgctgagcctggagaccaagcggttcgcgtacctcgacatcaccatcccgtcgaccatgatcgaacgcgtcaaggcggagtacgccgccgccgccggcaacgtggactccggcgagccgtgcaccgtgttcgaggcggtcaccgccgcgctgtggcggagccgcacgcgcgcggtcatctcctccgacgaccccgacgcgcccgcgccgctcgtcttcgcggccaacgcgcgcaagcacgtcggcgccaaggagggctactacggcaactgcgtcacctcgcaggtgcccgtgccgacgagcgacgaggtggcgaacggcgacctcaagcacgtcgtcaggctgatccggcgagccaaggaggagataccgttgcagttcaagaacgccggcggcggtggcatgaacgggaaacgcgtcaagcagctggccggcgtgctgttcgggtacagcgcgttctacgtggcgagctggcggaacatcgggttcgaggcgccggacttcggcggcgggcgggcggcgcgggtgatgtgccacttcgagccgacgggcgtgccgagctgcgtggcgtgcctgccgcgcgacggcggcggcgccagcgttctgtcgctctgcgtcagggacgagcacgtcgacgcgttcctcgcagaattggcaactctcggctgaatatttgggaaagttttctaaactctatatttttcccgtctcttactacgtgtgtattatattatatatctaaatagttattaaaaagttttaaaatattgagcaatatatatataatctgtcacgctcattgtcacgctcatttcataagttatcgatatctataagttataaccaatgttctaaaagatatttataattactactagctccatccgtccaaaaatataataacttagtatattagaacgaaaggactagaaaataatgtccgtgcactgcatcggccagtattaggtaattaaagattaacatctgttaggtccacctgccaggcaacttgtttagaatagcttatttcttatatgccactacaacttcaactaaagtttttttaaaaaatatatatataaaaactttcccgtgtactaaaatgggtccatccacataacgtatattgcctacatatattcactcgtccccattttaattttttttttgcgcggatcgccccattttaatgaatgaatcatatactgtaatcttgacgccgtgaatgcaatcaaaaaaggaagacaagattcgtgaaataagccaaccgcatattctaaacgagaagaatttgtgaatacaacctttaattccctgttctagcgatctaaaagcaa

SEQ ID NO: 22522 - DNA, 15098 bp, Oryza sativa
atatatatatatatatatatatatatatatatatatatatatatatatatatatatatatatatatatatatatatatatatatatatatatagggagcgtatcctatgtacacaggccctcgcgtgtacacaccgtgtacaccaactaaaaattatcacaaaaaattctaggaaaattcatacatgtactttcaatagtattacatctacgtgcaaagtcgcatcttcaaattcattctacatagagaataacaaaaaagataaaattctgacaaaattgcaaccttaaaactgtcagattttttgttttttttgttacggctaaaatataatgaatttgatgttaagattttaaccctaggtgtaagacaattgaaattatgtgtatgattttttctagattttttggtgatattttttagttggtgtgcacgtgtgtacacgtaagggcctgtgtgcataggatatgttgccatacatatatatatatatatatataaaagttgctttctattcattcataatgctctgaggtgattgcttttattatttttttagttaattccataatttgtgctgattaatttaatttctagatagaatcatgtttttatctctacaacagatttacttcaaatgacatgctaaagttaccttcttttgttttaagttacttctataatatatataaattacttttaggttttactgaatttacttttatatatctaagaagtaaattagtgaaatctaaaagtaatttagacatatcataaaagtaatttgtgatttttcatcaaaatataatcatgtgagatcttgttgtaaagatttaattgttacgaacacaacggtgtaatcggatcatagatcggataagtagtttaagagaaaattgtatttgaagtatagatggatgatacctcttatagatggagtggtagctagtttagacaaaccagctaccactagctatgtagttacgtccaacccggagacagtggcagtggggacaagagctcaagctagagagacgacggcagatccgggaggacgacgcctcccctgctgcgagtgacggcggcagcagcgtcctcctggggcttccacaggcggatcaagcggtgtcgtgcggcttcccgcgagcggatctggcagcgacggcggagtcgacggcgccgcgggctgatctagcggcgactgcggcttcccaccggtggatccgatggcaacagtggcatcggtggcttcccgtgagcggattcgacggtgacgaagatcaagataagatctctgtggtttttataatttttcctgttcgttttctctttggattgttggattggattttgtatatatctttgaatttgtgttttatccgtcttacgcgatgtgttactcgttcgtgtgagaacggatgccatcattcgatcggacttacagatggaaaattgatgtgacgaacggaaagtaacaaattatgtaagtaggtatatgatatgtgcaatcctttcgtacgctatacaattatatgtggtgcgagcctttctaatgtggcacacatgtatataaggcctaatttatagtctgtatttgtatttgtcacggttattcgtcgaatctctactattataaaaatggaagatatttttgccggtactttagtacgtcatccgtatttgaacatgcttttaagttacttgcttttggaaatatagatccgtgtttgggttggtttttaagttcattcgctttttgaaatacgaaagaagtcatataagaaatctcttaaaaaaactcgcatgctaacttgagactatatatagcacttctaattgaagctcatgattttgttaaaaaaaatatccaagcgaattcccacagcaaacttcaccttagctaaaccggttaataataataagattaaaatggcttcacccgtcgcaatgcacgggtatttttttagtcaacaaatatacatgaaaaggttgccgacaccgcctgcgtggcatctcggccgaaaacttcccacctgcagcacagccgcactccaccacagtgctgtctccttccaactcggaagctctaggcggagctaagcacaaacccaaggtcatcgtcgcctcccgctacctcttgtttcctccttcaaatccacttccctagccattggccccaccacgacctcgacgatgatgacctgcggcactgcgtgtctgcgtccccggctgacttgaggcagccgacgctattgctgaagggcgacgcacaagctgacgctgcatcagatcaggccgggttccggggcgcagtggcgctgtcgcattaatttggttgtggttgataattgggcttaatcagattgctcgagcagatcgccatgacgtcgcctcgatgcatccgcggactccatcacacagacatccttgcagagggcaagcgaggtgtgcgatgttgtgcaaggccggctggctggggcgcgcaatgcgaagagacaatgtaccaaaccacgcactcgatggatgaagcggcaagcggatagatacgacgatggaaaaggtatcgaatttttaagtaggtcagattagattttggaagggacgcgagagtaaaggggaaacccttcccattattttgactgccctatccatagttgtgacgattaattctgcagcaatggaagtgatgggctagaactctctgattttctcttatgtctctgtaatgcaacttctgcatgcaaatcttatattatagctacttaaaaattataacttatcgatcgtcaactattttttcttcgtcaatcacctatttttctgtccaccaatcactttttttttgttgtgtgcatctatatatatatatatatatatatatatatatatatagtaaatttgtttggtgctccatggtgcccgggcaccattgttgaaattgagtatatacccaattcaaatgagtatgaaactttttcaattacttaggtattaacattaactactttactaactagtttaaagcaagtttgaactgaatttgaacttgtttttgttagattttaattctaggtatatagcatccatacatataattagttaggtatgtaatcatggattgtgaaataaagttaaatttgagttgttttgttgataagtataggtatgaatcaaattattataactaggtatatactcacaatttgaaaattttgaaaaatttgagtaattttgtgcattagataccatggtgcccgggcaccatggtgccccatatgagtgtcctatatatatatatatatatatatatatatatatatatataggatacccatatgagactccatggtgcccgggcttcaaggtataaaacacacaaattctcttaaatttttaaaaatttacaaattgtaaatagatatctaggtatatgaatttgattcatacaaatacctaacaacaaaacaactcaaactcaactttatttcacaattcattattacatacctaacgaattatatgtttagatgttatatacctagaaccaaaatgtaacaaaaaaaaagttcaaactcagtttaaacttgtttgaacttgttagtacagaagttaatgttcatatttaaatatttaaaaaaaattcatactcattcaaattgggtatttcttggagcccatactccatgtagcacatatatatatatatatatatatatatatatatctagaaaaaaatgcccgtgcgttgcaacgagtaaaaatattttgaaattgatatacattatctagcttgcttggtttttttagttgaatactccttggttttaggctgaaagtcccattcatttcttttcaaccctcagccttgttcgctagctccatccgctcggcttgcctctttggcacggccagtgttggactcaggatgttgcggatgaaaaaatttaggtaaggacggacgaatccttacatacttttttattactagcaaaaatgcccgtgcgttgcaacgggtgaaaaaattctaatgataatatacgtttttcataaataatcatgtcaatggcaatgtttgtattttaatgagcggcttgttttttacaaacggtgtttttttcttgcgcgattttctcaaaccattcagaaatgacgcatttctttctaaaagatttttctaacatgatctttttgcttttttatttacaatgaaaaccatatttttctccattttttgcttttcttttctcgtgtgtttttttgcctttttttgccaattattttctcgcgtgtttttttgcttgttttttttcaaatgttatttttgttgctttttttaaaaacaagagaatatagacgaaataaaagccgtgtagtaggtggcaaaaaatcgatggatcctatccgactcggagcgatttttttaatagacggtgtttttttcttgcgcggttttttaaaaccatttgttaaaatggcgcgttttttctgacagttttttccttgcatgttttattttttaaaaaagttaccgatgatggaaataattttcctcgcgcgtttttttatttatttatggaagatggaaaacctttttagcgtgtttttttgcgctttttctgacttttttctcacgcgtttgtttgaaccgtttctattctctcgtgcatttttttaaaaaaatagttagattatattagagatagagaagagatatatattgattagaaatttcgccctttccatttttttcctgtgtgcattttttattttatacgaacaagcgttttattttttacgaaccttttttttcgccactttcttatggaatcggacaaacttttttagattttttttctgttttttttcgcctttataggaatccgactttttttcctgtttttaacggaatcgaatctagtattttttttttcacttttttttgccttttataggaatcagattttttttcgttcggatctacggttttttttttgccacataggggaaacggaacttttgttgttgttgtttttctttttttttttgcagctttcctttttctttttatgcacctttctgcttttgttctctcttttattattatttttaacaaaaacggcctcaagtaccttattgcaagattataggaactcaaatataaatataaaaattatagggactcaaaagcaaaagtacaaacccaaaaattaaaatcatataaaaatggaatgctctcgacctgtaggttctgttttattaaacagatctctaatccggcacatcattttgtttcaccaagatatgtgagatatcacggtatagattaagaatcggatctatagtcggactttttttctgtttctgagagggaatcggataggagtcggaccttttttttttagcttttttttacagacgaaggaaacatcttttattattttttaagtagtagagacagagatagagatagagatttttttcgcttttttgacatggaatcggattattttttcgccctttttttgggatcggacatttacggttttttttctcgctcgtccgtttttttggggcagtttttttgtcgccctttttcacagaatcggactttttttttcccttttttattggacagttacggtttttttcatttggtttttttcgccggttttttgtcgccctttttttcacggaatcgaattatttttttcgccggacagttacggtttttttttgcccggtttttttcctcgctcgcccggtttttttgacggacgatggaagcatatctttttaagtagtagagaagagatagagatatatggttttgatctcctgatgtgtgctgaataggacttggtacgatttaaaccaactcctgttcggttgatttacagccaatttggagtgttgattttttttttctatagtcagattttttttatgttatgctgaaccttttttagatggaaacttgttttttttgtcatggtggggtatcgaatcgattttcaaaggcggttaatttttttccgtgttgaatagaaataggacttttttttttgctgcgcctcttttttttttgcatttttctgccctttttttaaattttatggtacgataggaataggaatcagatgattttttggggcgcttcttttttttttttttgccttttttacgttttttttgccgcgtcggaatcggtctttttttgccgcttttttttttctcgccgccctttttttcacccttcctattttttttcgcgctggcctttttttttttacagtcggactttttttacacggacgaaggaaacactttgtatttttaatagtatatatatatatatttttgcccttttttattggacagttacggtttttttcatccggtttttttcgacggttttttgtcgccatttttttcacagaatcgaattatttttttcgccggacagttacggtttttttggcccggtttttttcctcgctcgccctgttttggtttttttcctcgctcgcccggttttttttcgccggtttttttgacggacgatggaagcacctcttattttttaagtagtagtagattaggtacatattaacaccataaaaagtgatcgtgggtcctttgcatgtgcagcaaccttttgtttctttcatggaaagaaagggcattaattttgtatacttgaatatgtattacatcctatatatcggtaagcatatatttatatatatttttgtgtatataatatgattatctttacttttcaaattaaaaaatggttcattataagatttcagaatcaataatttcgaattaaaaaatggttcattataagatttcagaatcaatctgttgaagaaagaggtgcaatagttttgatttttcagcaatgggatgtgcatggtaatatgatttgacacgaaggaaggaaagtagacttattctaggatgggcccatagacatagtgccagcaataataggtgaaaaaatgcgggagatttgacacgagggagggaaagtagacttattctaggaggggcccattagcccataggcatagtgctagcaataataggtgaaaaaatgcgggagaggaaggtgggaatcgaaccctggtcgccgggatgaaaactttcgatgttaaccatgtaagcagattactatatgtgctacgagattacatggaacttacatatagtatataaaccttggttttggagtagattgaaaattgtccgatccgtctattaatcagattaaaacggatttagctacacgtgtgggacggacgaaaaaaacgcccggaatccttacatattttttaattatatattaggtgtatatatatatatatatatatatatatatatatatatatatatatatatataaggaggagttgccccctccaatcctactggtgaaatcactcggatcatccctaccgtccatccacatctatctactaatctggaccgtccatcttcttctatcataatccgtttcgtcgtcctcctgatgagcggtggtcctcgcgcggctcttcctatcctactgccaactcccgcgatgaccgcgcgctgaccacgcctcgctcctctcgcgccgctcctcctcgctgattccaacagcgacggcgattccactgattccaccaattctgccgctgttggatctccactgattccatcgattccaccaatttcgccccgaagcggtgactccgccgtgcgcatcctctctcgctcgctcctcactcgaccagtgccgacccactggtgcaccgccacaacgccggatcagcgccgagccaccaccgcacaactgcatccccttccgccggtgccacgcccgggactgcccccgacgacgacggacgcacgctcccattgctcctccgcaaatagctcctgagcttcacgcgaagcccgtgctggcccggccccacgaaagcctctcctccgcgaatccctccccatggaagccctaagctcctctctcttcctcagggagcgtcgccgatccgtgggtcgctgctcaccctcccgtcatcggctgccacccggcgtctatcgccgtcgctgttggatgcaggtcgttgtccggcgttgactgctctcgctattggatcaaggttgtcgcccatcgtcaggcatcatccactgccaccgccgctcgccggctcgccgcccgatcgagcaggccagcacccatctccagtgcccaccaggtgagttcccacccttgcactgcagccaccctagccaccatgtccaattacgatgaaacattctcttttttccctctttcatgttctttgtaggtgaaccaggtatagaggatgtggtggaggcgtgggggctaatcactatcagtcagattttcgtggatcgagcttattacctgagttttctcctcttcgctgatggaaccggttcaggtgcgctgcaaaggtaatagttcaagcacccccagaaatcaagtagtttaaatacttatgtgttgaataaactagcataaacgacataacggtgattcagtagtttttgttgtaatagttgctatcgttgttttcttgcagatgaatgtgctcttatcctgatacggcatatagtgaatcattgtggaatgactgaaatctgttttactgtggaatgagcaaaaaatgtttacttgcgttgatgtcgagaaggttatataagtcgggagctgtttggaaagggttttatcggagcaacattattgggaaagtattttgcggagcagtttggaaagggttttatcagagcaattctggaaattgtacttttattggatcaataatgattggaaaggattttatcggagaaatcttgattaggaaggtatatgtacgtgtggtcagaaatttatccctttgcaattcaatagatgcattctctattttgctaacaggaattaatttgcatttctttggtaagaaaacagacgatgtgcattgaaagaattattgttctttgagatcttgataatatgtttcttgtccaggcattcccatgagttgcaaatccaaggaagttaataacacgacctgtctacagtattacaagctaatcgatttatcccattacaagctaaagcccactggtatgtttttgtttctctgccattcaccattgaaatatggaatgccatattcttttttccttcgatgcactcttaattgtctgttccaatttcttcgaccacttataatttgcagtttgatattgctttatcccgctgctttgccattagaaccaacaaaaggagaaatgcctttagctgaagtcctcagattcaataccaaagttgattgtttgattctaaacataattatcatggtttcttgtggtcctttaatggtgatattaagatttgggcaaaattggtacaaaagcaacatgtctaaaataccttggtagcttccccatttctattatctctccaatttactcttaaattgtatgatacaacattatcaaatttcatagtagttattttggactcacctcttcaaagtacctgtcatctgggttgggaggtaatttctaaatctcagctctactatgtgatgatctgacattcatattttactatatacttcttgtgactagaattcctgctgcatattacgtactagctaggtatttcctcttacaataatggttgtcagaattagcagcatgaaactgatcagctcaactccatgcttgaacaatttgtgagtttttctttactccagaacacctgatcagttgacatctatgatatatttaacagattatgttgattgcgcataaagaagtagcccaacatatttctgctatgcacatgaacatattggtacatatttacaattctttatttttacgaggcactatgctactgatagtctattgatgggctatagctgaatttagtttaaaaacaactactggtttttttttcacctacgttgccattcctccgttcctgcatgtccactttgttgcaaatctagaattgtggagaaactcttgatgttcatcatatgccagttcatacttttctaaattgccaaattgaaaagagggttacatatttattcagtcctatctgcaggttggaaattgtatgcagctagctagatcactttcttatcacaactcacaagattgccactttattagctatagtttgaatctaggatggtctgccataaggagctttaattacttctatgaattttgttaaatcaaaattgatccatttgtggcttttattgtttgagattgaaaaaaaaatcaggttgctgctcaagagcaaaaggcaataacatggggcagtgataaaactatttttgggcacagttagtctgtgactatgtcttcatgggcataaatgaaagagaaactcattgttaaaaaactgaaatggaaacaacttttccatggtgatccgattgaccatcgctcggatcttggatatcaatactgtaattcataaagtacagaatacatgattcagatggagaaaggcaatacatgaggaagatgttttgaacaatatattatcttaggttaaactaatgttttttttcacatctggtgttttgtacccttactaataataaatttgatactataaattctatctcattatatgcttggcaaaacatatatcttattttggttgtttgatttgtattactaaataatttctgtagcgttatcacggacagattactagttttatataaaggccggaggtaactcgtgtatcatcttgatataattaactgagtctaaagctttcattatctaaaaaaatcacctatttttcattcgtacgagctgtttttacacatccggttccgaactttccgatcggagaagttaatgggtcaagagagaggaagagagggaggctgggccaagatcggtgggccgtatttaggccgggccattttagctgggcagcctgggctggcgcgggtcaacgtggacccacgcatccgaggtggcaaggggcgggtcctttgggccgacgtggcaccaccacatgggtgtggaccgggtcttttgatggtgacagcggcttctggagggaactccggctcggacgtctgatgtttggaaaaaaattggacactgacgtcagcatgacgtcaatgtccgatttacgtgcaaaaactactttaaactgattttcctcttaaattacttatccaaatcatgattcgattgcaccattaaattcgttgcaattaaatcttcaaaaaaaagaccgcacatggatatattccgacgaaattttttttagcttattattgaattatttttaaatgttgcacgatgttccactaggtatatcgtaattgtttcactaaatagatcgaaaatgtttcactcgtttaaatcgggtgttgtttcaccctatataaaaataatgtttcagcaaatagcgaaagaatgtttcagttcactgcaacatttgatccatatatagtgaaacattataagtacactaggtgaagcatttttcggtggaaaaaaatgaaacgtattcccttgtagggggtttccaaaatatgtgggtttttttattgcaatggaatatttcagttcactacaacattagatctgtacacagtgaaagattatgagtacactagataaaacattttttgtaaaataaaaaataaaccaaattcccttaataggggtttccaaaatatgtaggtgatttgttacaacggcgtgttccataatatcaaaatccactgcaacatttgatcatcatatgcaacattaaaaaaatatcaatagagaagctaaaatatttttttgtcgaaatataattatgtgtggtcttgttgtaaagatttaattgcaatgaatataacggtgtgattggatcgtagattggataattagtttaagagagaaatcgttttaaaactagagctgcaggaggcgcgggagccgaggcgtccgattttttctttgacgtccgaggcgccggagccgaggcgtccgattttttctctgacgtcggacgtcaggcgcgcagcattttccgtggcttccgggaacagccgcgacatcgacatgggatgagcagaaacgttaccggcgtttggattgcatgcaaagccaaaacagagctaagagattctatcttatacccaagaaaataagttccaaaaaataaaaggaatagaagaaaagacatattatagtcagaaatatgttggtgttaggggctgtttggatgcttgcttcagtttatcaaagttctatagctaaagtgttggtaaagatatgtgtctataataagtgggatcataaaatcaaaaagtgtgacatgataaaaatgtggcaaccaagcaaacacactaagatggtcaaaatagcttaccaaagttatgggaaagtatagtcaccatccaaacaacctctaacagtaaacattctatgtgatgctacagtaaacattctctaattatagattaattaggcttaaaaaatttgtctcgtgaattagcttttatttatgtaattagttttgtaagtagtctatatttaatactctaaattagtgtctaaagacagggactaaagttaagtccctggatgtaaacaccacctttaatctctggattatatatctaccaatcaattatacattatacctattggactgactaattttttacgtgaggaagttgcagtaggcgagtagctattagaagtaattgcttcgtttttaacgtataaagttgttcgacattttacatggtattttactatttgttgtattcagaaaaattatataaatagctttttttaagtatgacatatattgtatcatatttacaatatttttgtaataaaaaatatgttcaaacgttatttaaaagtttatggaattatctatgtaagaacgttaatactacagtaccatacatcatcgagaaatgtatattatacttactagttactaggccaccttattattcgattctccggtggatgagcatggatcactcggtggctctagtagacaaagttacctaaaatgaaatttcaaattctaagtttacttggttaaatcagtcagccagtggataccggcaagtgacgtaatgacgtgcgtgtgctcgtcgcaagaaataactaagcttacgaacttaatatatatactgattttgaacgcttgactaagaactagtcaagtaataagcgaagtggttatttcaagatagtggaaatatctggtttagttcaatgaatggcaaaaaaaaaaaaaacgaccacgcaacgaactctctccattccagaattaccttttctccatatacatcatcagaaaattattactatattttaggatttctctatatacataatcagaaattaaaattattatatattagtacggaggcagtagctcggtatatacagatatggtcggaaaatacatgtacaaatctaataggatgagaaaaagagagattgaaattaagacgaaaaagaaagaaacgtcagattgaacaatattagcccactgtactaactgaagatcgatcagacgcagttctgaaacacaaacccaaccgccgacgccgacgccggctgatcgttcacgaacggcggcatcgccgggtgccaccaccacgccggtaacctcgtcttctccacggcgacgcaccgcccgccgccggcgaccacctccgtcagatggcgcgcagtacggccgccggacacctgatcggacgccgccggcgccgcagggacggcatggagcggcgtgagcagcgggattacctcggcggcggcggcgacggcgtcgtggcagtactccgacgcggcgctcccgtcgccggcgccgccggctcgcacgtcgatggatcccggcgcgagggcgcgcagccgcaggctcccttgccttctgatcggctgcctcgccgccgccggcttgacgacatcctccgctgcatcaacgacgccggcgacgtcctccatcaagaatcacggtcaattcaaagaaaccaatcacacactcgcacactgatgactgatcttgctggttaattgcaacagcttctactgaatatgcaatacatatataggtagatgattaattatgcagataaagcagccacgcagacgcagcagtgtgttggtcgttgggtaggtacgtgtcgacagtcgacacaaatggtctcacaggatgcttgcagttgctgcaggtggtgtccagacttatccagtagctttgactttgttgaccagcagagagaaaacaagcggcgtggcagcaaccagtgagcagtaaccagtgggctcgatcaggctacggtattaactagattccacacctacaattatatggtgtttatatcttagaggtaaaattttagcttgttacattgctatgatatggtataaaattttagtgtgagatctaaacatgcccttatatgtagtaaagtgttaagttacagctatatgcaatacaagaaattttcagttacagcagaattttttttccttccctgtttctgcacaacttttagttcaatctccgcacaaattttgggtcagcttcaacagaaatttagttcagttacagcagaattttttttccctctctcagctcaaattttggttcagattcagaagaaattcagttcagtatcagaagaaaaatttggggggaaggtttattttctgtatgtaatggcatgatatattcagaacatgttaacaaaaaggtcttcttttcttcactgcaaagttacgtatttatacgcatggatagataatactccgtccgtttcaaaatgtttgattcattgttaattatttattctttttatatcatttgattcattgttaaatatactttcatgtacccatatagttttacgtatttcacaatttttttattaagacaaacggtcaaacatgtgctaaaaagtcaacggtgtcaaacattttgaaacggagggagtagtctttaatatatactccctctgtcccataatataagggattttgagtttttgattgtaacg

SEQ ID NO: 22523 - DNA, 35800 bp, Oryza sativa
gccattgcctcgtctcctctctcccgccgcatcgaagcaaggctccaccgccggcgtcgccctgaagagagatgagaaagagaaggggggcatatgtcatgtgtttgcctttttcttgactagaataccacatcagctaaaacaacccttaatattatcatggaccatgatttagacggtttggttaagattagatgaactcttgtattacgatttaggctgtgttcaggacccctccttcctagcacgcaaaacgaaactcgtattattgcatgattagttaagtattaactattttttttaaaaaaaatcgattgatatgatttttttaaaacaattttcatatacaaatattttatataaattacactatttagcagtttaaaaaacgtgcacgcggaaaacaagaaaggtgggttgggaggggagggggagaacacagcctgtgtaaatgaaagtggacgtaaagatgaagacgtgactcccgctcgagcgtcccatgggaggaggttaaaatcggacactgacgtccgatttacgtgtaaaactattttaaactgatttatctcttaaattacttcaaatcatgattcgattgcactattaaattcgttgcaattaaatcttcaaaataagaccacacatggatatattccgacgaaaaaaattagcttattattgaattatttttaaatgttgcacgatgtttcaccaagcatatcggaattatttcactaagtagatcgaaaatgtttcactcgtttaaatcgggtgttgtttcaccttatataaaaacaatgtttcagcaaatagcaaaagaatgtttcagttcactgcaatattggatctatacatagtgaaacattgtgagtacactaggtgaaacatttttaggtgaaacaaaaaataaaccaaattcccttactagggggttccaaaatatgttggttttttttgttgcaatggaatatttcattcactgcaacattagatctatacatagtgaaacattgtgagtacactaggtgaaacatttttggtggagcaaaaactaaacgaaattctcttaatagagagtttccaaaatatgtgggtttttttgttgcaaaagaatattttaattcactgcaacattatatctatttaaaatagtaaaacattataagtacactagctgaaacatttttgtgaaaaaagaggagagataagttggtgggcccaacaggtgcgcgcatgtggggagggaagcgactgattttcccacctcctccggtcgaccgatgttgggcattctcctaaagatgagggatgagaagtgaacttgggccctagcccatagagccattcggctctaacataaatagatgggccaagcctccatttcctcctcttcttcttcccccgcgaccgccaccgttgcagccttctcccctctccgccctccttccgccgcaagccacacgaatcaaggtatgcgcgcttctcttcccctcgccctcctcctcctcctccggtcgccgccgccgccgcttcttcctccgcgacgcgtgcgtgctggtcgaggcgggcgagcggattcgagaacaccgatccggatcacttggattggttcgatgtttcgttcgatttgttgattgatcaggagtgaactgcctgcttgcttgggtttgcgctcctcgactgctgcttgatgtggggaatcgaattgagcccgaattgctagtgctaatcctttagtagtttagttgttctctccggctcagttaattttgtcgccgatttattcgatcgctgcgtgttgattggagtgccttagttactgatccaaagcttgtttccaacagaaatttgctggccgcgcttcctccgagcttttgttccctaatttgcttcattttttgcggatttgttcaattgctgcgtgttgaagtaaccagttattcagttactaatccatgtttatttccaacgaatagttgttgctagagttcacaaactcgcttctctgttatgctagctgttgatatgaaggtccttagatggtacatttcaccttggaagatttgattgccgaaaattgatctggttacaacatgtggattgtttgattgaacatgtcaaaccatttttgcttatgaggaacagtttttgcttgctgattttgataaatcgagcataaactgtgtatatcttcctctcgttgttagctacttgctgtggagcagtaatgatcttcctctgaacaacttttgggttggtttcagtatttcgtgtcctgcttaatttccttgtatttctgtttgttaattagtaatggccaattaggccagaatcgactagcaactgtgtgtacttctttgttgtgatatctccatgcaagagtcgtaaaaaaaccatctgcacagagcaagctatttatgcatacatagtgtttgcaactgtaatctgtacatacaaattaaactggaaatgcttagaagtatatcatcttcctaatatgatgattggaaatgcttgcacaggctaatctctgctcgaagcatgtcaaacgatcagcatcggtcatgccgttgcgtcaagtcgaactgtgtcaagctgtatgcacacatacttcgatggatctgaaatacattccattaattagtttattgtgaagttttgttcttactgtgtaacgtctattttctgtactgtgttatatgcagctattgcccgtgtttcagcgcgtacggctattgttcacagaactgccgttgcactaactgtaagaacagagagtactatgaggactttgtggaggagcgtgtggacatgatcaagatgaaaaatccgagagcatttgatcccaagattgttagggttcaagatgcaagtgagattgaaccccagagctctaatgcagtgccggtaatgcattcttctttcttggagcacccccaaataattaatcttatgctgttttgatttcaaattttcaataatggtttgtagtgagaactcatgcacataaagtaaatttcaggaaaatgagcatggatgtatgctaatgggtgcagatgccagaagtccaagtgcctcgtacattcgtgtgaatgcctcaaggtgtgcataccatacatatttgttttgacttacaacctatatttactactagaagtaatcatgcgcgtgctaagcatgtgtttgccaatatgataaaacaacatattgcaagcacaataatttgtgttttttttaattgcattcatcacagcagtcaattaacattgaaaggggaacattccagcagtgttcataatacataataaataatcaaatctctttctatgcaattggaggtgatttgacatttgttttattctaggagttttatttagtttcaattaatttatattaaatttggatgtccacatgatcgcgttaactagaataatacttaaactgataatgtagaattttttatgcatagataaatagagatatgattaattattccaaacaacttatgttgagaagttgagatgtttcatgtgactagcgttttgtgcatcctactattaatgatctgatcttgtcctgaatctgatatgtgtgattgcaaacaacattgaaatgactaagttatgagccctactcttgagaaaatgaaatcaagtagtatcttgtgtctgtttaagccagagagtagaggaatatttgggtgtgcctctgcacatcagattgaaaaagatttttaagttcgcaaatgcagttgagggtgcgatacaaataaaaatacccaagtattattacttggaatgattagatgatgatatggctgttttgtctcttacagcacgaggtgaggtgcacttcaaaatgccagtgtatagattgcggtaacggccccagaacaaagtgtgagtatactagactgttatttctgtttccttgtcttatgacatccaagtgtgtaatcaattgctttggaatagcttggaagcatcgtattttgattttgttcttcacccatgtcattttctttgtcttgaatatatttatctgacttactttatacaaaacagatgattcaaacatcggaaaagatcagagtgatgttagtggcctaacctatgaagagcccacgatggacaccatgcaatctgagcacactctgaatccaaacaaacgcccaaaatattttgcaagtttttggctccttcacacttcgttaacataatttaccagtgtagaatgtaaatgtaatttcaaagtgttggaaattttcaaaggaaacactgatgatctgctcttttatgcagtgatatctctcgcagatcgtgatgctttaccatcctcaagacaatagccactttcttccaaaaatgcaactgtaaatacaaacaggtttgagtatcccttgtaacgaaatcttaaagcacggtgatcggtgaggccttgaactccatgatacttcaaatcttgtcgtccatttggtagtctcagtgggttcagttgaccttgcgcttgatcaagaactacgaagacagttcccacctatagctaatatcatccatactgttaccaaagggccggggtgtatacatttcatcccaatatggaattagttgttttggcatgcaaatgttcctgcttcttaatctctcatgttcttggggatattttgatcatgcctgaatctgtgaatccttcagtgatgagagcacaagtattatgaggtatgatgatgattgcaagtataagtagcctcgattgtattattgacgcagagcatcgactgatctctcatattcctgtaggattcaacctcatccactgcaagaacacacataatttagaacagaaacggcacatgaatcagtaggagtaatagttagtgactactagtaagtatactgttcctgaagggatggttacatggattaatagcttaatctgatacctcttccatgacattgtaagatatgcagggaggcagctcttcttgcagccaatgtgtgagctctccatcttgctcctcaggatcctagaacaaacattagtcaaggaaaaagtagtctcaacaagtgttttggcagaataataatcctgcattggatatcgaagtgtttacaaaattttgaacgaatttacactagagaagagttaaggaggcttatttgtaacttatcggagggagggcagcatcaactaacacaaaccgaccagccagtgatatcccttttttctgttttagtaaaaggattaattgttttgacacgaacacgtgagatatcaattcaccaatttgtgatgatgcggaactaagggcctgtttgaaatagcatattaacagtatgcaaaacgacgcttcttattagcatataattaattaagtgttaactactatagtttaaattacataaaatgtactgtttagcagtttaaaaaatatgctaacttaaaaagatgaagttgtaatttggagtccaagtttagaattcagcttataatttgtttatttgtggaggtaccccactaggctacgttttgcagataaggatcgggagaaaaaaaatatctcgttctctgtgcgcacgtttctcaaacagctaaacgatataattttttttctaaaaaaatctataagaaagttgttttaaaaactcatatgaatcctttctcaaattgaaaataatcaatactcaattattagttacctcattttgcatatctatctttgtttacctttcctctcaaacaataacaagataatccttctgtgccttccaagcgggccgggccgggtaaaaagattatttgggccgcagcccactctgccattcggccctaaagtacatgggccacgcacgcctccatgtcctcctcttcctcgtgagcgcgagcgccgattgccttctccggccgcctcttcgtctccgccgcatgccgccgccgcctcggctccctcaaggtacgcgcgcttcgctccccctcgccctcctcatcctccccctcctgcgctcgactgctgtttgatgtggggaatcgaatcgagcccaaattgtttagtattttggtgctgatttgttcgatcgctgcgtgttggagtgcctagttagttacggattcaagtttgtttcgagcaaaaattttgttcgttagggttccttcccgcgagctttgcttccctacttctccccaatcctcgttgttacggattttgttcagtcgctgcgtgtttatttccaccgaagaaagttgccgctagtgttgttcctgggcttgattccctgttatatgctactacgaagtagttggcacgcgggtcctcgggttgtgcattttacctaggacgatttcattatcgagaattgatctggtacaaagtttgggggtgtttgattgcacatcgcaaatcattttggatagggcaatcgatgcaagggcgccaacaggacagctagaacttgtgagaaacagtttttgcttttgataaaagtggtagaacagacactgcagtagtaatcttcctcttaaaaacttttgggttggtttcagtattttgggatctgcttaatttccttgtatttctgtttattaatcctatgctattttaatttcaataatggtttgtagtggcttgagaactaatgcacattgaggaaatttccgggagatgagcaatggatgtatgccaaagggtgcacaggtgcaggaagtccaagcgcctggaacttgtgtgtcagtgtgtgaatgcctcaaggtgtgcatactgcatatctattgacatacaacctataattactattattagtaatcattgcatgtacaaagcatgtcatggtcaatatgatcaaacaatatattgtaagcacaagaattaatgtttcttagaattgctttgttagtaatcatgcatgtgcaaagcatgccatggtcaataatatcaaaaaatatattgcatggacaagaattcacgtttctttgaattgcattattagagcatctccaacaatctctctaaatcccactctccaaatatctattttgccaactctatctaatttagctagtcaaacagtcttttactccaacagccttcccattcatcctctctattctgagtctatgacagtagggcccacatgtcagtctctaccactttcttcttcctccccttctctccaaatccccttccctctcccctctgttaccgccgccccatccctattcgcccatcgccaatgctcgggctccgtctgccggtgcccttctagccgagctctcaccggccgcctcgtctccctcaacctcgccgtcgagcaacgccgccaccgccactccctcccatctccaacccacccggcggatgaggcggcggcaggtctccggcgtgcgcggtaacgacgctctagcgcgagtcgacggccggcggggcggcggccgcgggccttcctgctcccttgtgcggcgagacaggtagcggccgtgggtttccggcacgacgaagacaggcggcggtcgcgggggtcctgacgcggcgaaggcaggcggcggccgcagggttccgacatggtgaaggtaggtggcggcggcggggctcccggcgcagcgagtcaagcggcagctaggcttccggcgcggcaaggtaagcagtggcccgggccttctggcgccttgccagccttcctcgttcctccctcgccgtcgagccgccccgtcgccctcgtcatgccgccgatggccgacgccgaagaaggactcatgcgtcgtcaagccgccccgtcgacgacagcaacggcaacctcggggacgacggcagtggatggcgatgactggcgacagcggctggcgacctcgacgatgatggtggcgcttcggcgtgggttcaagatgcacggcgcctgcgtcggtggcagcgtcgaggtcgtggctgcctgcgccattgtagagaagagccgaaggagatggggggggggggggggaatctgtgtgggtctcatggttggccagtgatttttgggctggccaaatttggctagtggaggggggttttgggcagccgcggatggctgcttagccatccggttggagaggctgttggagcttttttttttttttttttttactagaatggctaaaatttggcttggagagtgggatggagagactgttggagatgctcttacagcagtcaaataacattgaaggtacaacgtactctctgaatatttcagttgctttcattgtataaacaataattaactaaatctcttcgtacgcaatgggagaacattatcacactgatgttcctgctgcaaaacaaagagacataacattttagtcttctagtaaaccagaaggaccagaaacggaaaaaaaaagaattcagtttattagtttagaaattcgaactctgatagaatgatattttctaattcatgaaatccaaaaaaatgtacttgacatacaagtcaagattcttgatttttgaaggggtgatacctgttctggaacgaagggggaaaaagggattcattatggcaacagcccacataacttatttctagattctgttatttttcattcctcttcattaggtatatatgatgatatggctgtttttttgtcttacaacacaaggtgagatgcactgcaaaatgccggtgtatagaatgcagaaacggccctggaataaagagtgagtactgtaagctgttatttttgtttcctcgtctcatcacatcataagtgtgtagtgtgtactcaattgattttggagtaacttgggaaggaccccattttgttcttcacccatgtcatttgttttatcttgcctatatttatctgacctgacaaaacaggtgattcaaacactgaaacagatcattgtgatgctagtggcctaacctatgaagaatctatcgtggaaaacaccacacaatatgaggggacttcgaatcgaaacaaacgcccaagaaattttgtaagttctctactcttttacacttcacttacatagtttgccagtagaaactgtaaatgtaatcaataactgcattgcgttaaaaaaattataacatgttcaaacaaaacactgatggtctgctcttctgtgcagtgataacaaccttcagatcgtgttaccttaccatcctcaacctcaagacaatagccactttctgccaaaaatgcaactgtaaacacaatcatcccttgcaaaatctcaaagcacggtaaggccttcatactccatgacccttcaaacctttgcgaaatctcaaagcatggtaagaccttcatactccatggcccttcaaaccttgtcacccactcgatagtctcagtgggttcagttgacgttgcacctgatcaaaaactatggggacagttgtcaccttcggttagtatcaaccatacttttgccgaagaggtatataaacatttcactcatatatgaaatgcttttttttgtcatgcaaaggttatattcttgggtatccagaatctttgaattcttcagtgatgagagagcacaagtagtatgaagtataaacatgattgcaagtacaagtagcctcaacagcattatttttagggaaagtatcaaacaagtactaggtcacatatgcccacttcttacaagtagcagagcacaatactagaagtacactagcacaacgacagcaaaagccaccattaaggtgagcatgttgtattacaagctaccaagccaacattcacctctacatagtaaaacactcttccatgtactgttgcgacttccattagcgtgatctgtcgaggccaagccttgagctgagccatttgccgacatcgtccatctcttcagggatggtatagtggcctagcctgcatcatcatataacttgttaatactgctataattttgggagagtaaaaaaggtgttttgtaatgtgttatgtatgcatatgcatttgtacccattgtaggatttgaaattcagatacaagaaccccgagttacgcagagtgtcgactgatctctcagcattcctgtaggatacaacctcatccactgcaagaacatacagaatttagaacagactgatgcattgactaggagtaataattaactagtaaattatactgtttctggagggaaggcttttcatggatcaacagcttaatgtgttacctcttccatgacttagtaagataggcaaggaggaagctcttcttgcagccatgtgtgagctctccgtcttgctcctcagggtcctagaacaaacattggagtcatgaaaaagtagagacaacgtgtttggattaatatttctgcattattggatatcaaagtggcacctggagcaagggagccagccactcaagctgatgaccgcactgagtgtgattggatatggcatgctattcgcgaatttgccgtgagcgtagcacgctgcggagtggagggcagcagctgcacccatgctgaaaccgccgatcccaagcttcactgcactcgcaaaatatgaaaatcaatggaaggaatgatcaccagggggattctgtagagtcactgaagaacattatcttacttggtgctaattcggtacaaataaggatcactttaaaaagaaaaggaagaaaaaccaattaataggatggtaatatatcttggtagctgcacttaggagtaacatgggtgattagattgaagtggtactggaactagtaccgtcaggtggctctgacgacaacaggtttgcaatatgtgcagctgaagcatccagtccttcaatgtcatcacggccatccactgaaatgtcctccacatcaaaccctatttcagttccatagaaacgttaaccaatcagatttcagacttaagagtaatggtaatgcctcctaagtttgcagattttagagagatggtagcatagtgatgatgaagaagaagctcacacgcagtgcaagggaatccgccgaatgccgtgacaggccgggttgctgcagttgggcaaatccacttgatctacatgacataagctttaaggtgaataaactattttgcagtaagaatcgtttctagttgctgctgaacatgataagctacagtgatctggagacagttacaggcttacagctgttgaaagagaccgttgtgtatcactagtggaataaggaaaatgtatatgtcatgtctatctacatctatcatctgtgtatgcgtgtctgaagtacaaagtatcgatgcttacatttggcaatgaaagagaatccaggagctgggaccagctgaaaagttcagaatgaacaaaacagagaaaagggaaacatatcagtgcactatatcaggaaaagcattgcagctgcaagcaactagtaaagatattctgttccagattctctgaaatttatggattaacacatcatatatatgtataaacagaaaacgtcggctaaaagtatccaagagaaaagagaataggggagagtggagataggaacatctggaactgcaaattggaatatatataagatcaaacagaagaggaaacagaacagtagtgaacaacttttttttttcaacaagttgagcaagttgcctgaatttcatagcttatctgaagggaataaacgattagcttcctttcaaagaagataataataatgtgtaagtagaccagttgttgatcttttcagttactggagataaaggggactaagtggaaaaagaatgagcaatgggtatctgcagctgaggactgagggctgaggttaacttggtaaatgcatggtaccaaacgaaaacgacactcagctagttacttttcattttgtttgcacccggagccagtacttaccattaaaaaaactctactccctccaccccaaaatataagaatctaggactagatgagacattttctagtattacgaatccggacaggctacctgtccggattcgtagtactaggagatgtcccatccgatcttaggttcttatattttgggatggagggagtaatttttaatcgagtgatacttcaatttagtgatttatcataaatatggtgttctttacatgctttgtgcagaccttgggacaggaaattaggcatctttcatgagcgacctacttttatgcaatattcatataccattagcccacatcaattagaagtacttgacattcctctccacttctggatggaaagtgagagcattatctatgtccttggtggcgcagaaggatattaggtgtgttgtgtgaagaaggacaaggaaaacatttactttgggtaaagcaatactaggaatatatgcatgcttggacacacaaaaaggagggcacttcaatcatttctagcagaaagaaacaagggaataaagtgtttgtatccacaattaccatgatctagctctcctcctagcttgctttccaagtatagtttatttgttattcttttgcatttgcagaagatagcattgctcttttttttttcaggaacgcgcaaaaggtagaaggtaccatgcttgaaggagcatgagtaaacaagcaaagtttggaacgaagaggcagtggctgtatatcaagctagccactatataataccttgcaccattgtcacctagaccatggagccacacaatggtggcttggtgccttccctttggcctcactatataggtcctcccatactcgactctccgactgccccatccacctgaatcaaaaatcacatcatgctcagcattgttctttggcacctgtggttatcatgaggacttgaggttagaatggagtagtcagattaccagaagagctgcttccataatagctcatgatgttttctgcaccaagtgctctgtttactgatgctgctaaggtatagaactagttgtgtatgcactgaatttatcgaagagtatgaagtgcacaaccccagttggtctgtatttatagtgaagctctgaagagggaatatatgtcggacaatcccttgaatctgcatcgcaggacagtgcggcttttcgcactgtgctcgctgcaagctgtcatgggatgagcatcttgagtctggaatgctcaagggatgggcaggataaaaaggatttgaggcatttttctctggagctaagaatcctatgcaatgctgacaaaccttgcacacagagatacacacatggtgacagatgcctaaagttcccatgcaagcaaactaaggcgatcgatttatattgcacacagatttatcatgatgcatctttggcagtggagagggaaccataatatataaatgttgtttcctgtcttttttaatctcattttgtgtccaccaagcatttctatgcttattgcatggagtactaatgcccactgccttctgcccacaaattggtgcaactccgtatgggacaaccttagataaaatgcaaggaataatcataaacaaacttattgtccggccattgagcttttcttttgacatctagtttccagttactgctagatggaactgataagttattgctagaggtatcgtgcataaatccgtggactttcagaaagacagaaaacttattccaatggaggaaattcgacgcggaagaaaaagcagaaagaattgttttttgggaatacatagaagaattgtgcatcgttgcactaagattaggagaaagcaaagcaggaagaattatataccacaacttgtgtcggtataccatcacaattacatcgatagaaatatctatcaggtgtcgacaccaaatcaacatggatatgggaaccaaatcaggtagaaatgaaagtccacttgcaggttgcagcatgaacgtggtgcactcttcatgaaggtacagatactaacttgcaacaaatgttcttaccgtgttgctgctacagttaaatcaactgctaaatgcaaacccttgaattagtctaggcgcttattaggaacaccatctgattctttttcttttgtaaaaaaggaaatactccccacatcaataagaagagtacagtggtgaaatacaaatcagaaatgttcctgattttgtgtaaaaagaaattgtctcagccatgatacaatatttcctagtgaaattggtcctgtttacatgtttagctatgtgaatgaatgctactaaaccagtatggaaactataatcttttttttcctcatttgaggtgagtgtgcttttctctaggtttacttgccaataaaggcgggtacctttgccagtatgcttgatgcttttgtaatatggagcacagttgataccttctcaacaatacaaaataaagatgggggtagagaaaatcaaaagtcaactaaaactgacctctaatgaaaaacgtttgcatctcttttttatttaagaaaaaggtttgcctctggggttctactgtgatagccccactacaaacagtaagaaccatatgccattctcctttttgttttttaatgattgggatgggtaatgtggggggcagctcaagccaaaatatgtgatgtatatgtcattcttgtctctatcttagctagcatcagaggtttgaggctgcagcaagctagatgaatctatttcatcagattgggtcattagccacctgatcttgctttctcaactgcaaattataggcctatgattgtgttgtgccctagtactaggagcctgcacattccttcctatgcttatagtccatttctttattgcacatgcttatatgaagagcaatgttttatgtaaagtcagaaaaaaatattctcaaaaaggccatgcacaaaatatgggatttgttgttactaaaaaaggcatacagttaaggaagatatgagaacaggaaaggatatattgtgctttacgtgttctccatttcattcatgcttaactgagtttacataatcggtatgctcactcctgtactactgctgttaagaggaggatacagatggcagtagccaagaattcttgtgactacagttccttgcgatcgggtttcttattgcagattcagttaggtaggatctcctgattcagcacccactaaggtcaattcactgaacaaagcaggcaaatattattcactgtaataagaagtccacatcaacgcttaacagaagtcaacttacaggatgctaagagggaatgttcctacatgaaagatcgcggctgccattaggtgaggaattaatgccttttaaagtactgggtcattctgtatgcttctaactgccttgctttgatctctgctgaaattatttggtaaaatctcatcctctcatttctatttcatactttttttgagataacattttctatctcataccactgatggttcaagtaataatatattttcttaatttttaggtgtgattttccatgtacatgttattctcccatgctcttttaaccttttagacttctgaaaagtactttggaagagagaaaaggttaaaaaaaaagcaaaactgatgttaccatcaccaactcaccatagtgtagaattaatccctttgtcaaccttaggcaatccaaaacaaaaggggatattgtttggttgttggtttgaattttgagatagagcatatataatccatgtcctatgggctagagaatcaaagacttgatattgcaaccttttcacaataactagtgaatgaagtcgcacgttcgcgcgacaataaccttcctatctattaatcgttattgtaattaacaataaaatttccaccattcagttaaatcaataattagatgttaattttctaaaattatttaattagtcatctagtctaaggaccgtttgggttgattggccaagccaagcctgtttgggaggccaacatgagattacaatgagaggcaatgagtggctcaaactcttccttctctatgtattttaccacttctagaagattcctcatttcaatggctaggatttttccttgctattttatcattttgtgaatccaacggctattatttgacggatgatgtggctaattctggttgctttttgagttttacttttcacttagatagatagatatgatcatccataggttaaaatagaaatttccttcatggattgcttactattctgtttttttatggtgctaaccacaatgctatgttctcatcaggaaaatgaaaagagaaagaggctgaacgtaatctgagttactgacttaccaagtggagaatcttccaggacgaagccgtgcaggaagcccaactcgcaattttaatccgatgcagtctggtgcactttgagttggtaaacagttaatcatcatcagggataatcttgtcttgcttgttgtttgccacttttgtcggatgtactacagtagcttcttggtttattttgttttcttgaatacatggagatctgcatattttaatactaataagaagaaaacaatgaggaaaagaaccatgtacaacacacgctaagttccaagaaccatgcgtttattttttcttctgttacacaacatttctagcttgcacttcgatatggaatcgtaagaatggaagagaaacaaagaattcagtttattattttcacttctttcttaattctatatgaatactatagattctattaatacatggattgaaagattacacctagaaatctctcaaccatttccctcataatagaaagggcagaactccagccattctttttcaaaacagaaattaccaacttaccatatagtttcatgactataatatgcaaaacatcactttcggcatcagaagcaattctgttccctggtgcgtgcgttgcacctgtaaaagaatagaatatttatgattgaagcaattgctttctatcgttgttctgtttaaaggaatgtgcatatatgatttgcagcttcagcatccaaaacaagttaatctaccatgtgatcatcttaggctctatttagatctcctggcaaaaattttcaccctgttacatcgaatgtttggacacatatatagagtattaaatataaatgaaaaaataactaattatacagattgcgtgtaaattgcgagacgaatcttttaagcctaattgctccatgatatgacaatgtggtgctacagtaaatatttgctaatgacggattaattaggcttaataaattcgtctcacagtttacagacggattctgtaatttgttttgttattagtctatgtttaatacttcaaatatgtatccgtatatccgatgtgacacgtcaaaactttacaaccctatatctaaacagagccttattgttctcacatgacttgtcttagaagcaagcttgcatgttaatttaatcacttcctgtttgaaggaaactgtgagcaggcataaaagcgaagatgggatatatggaatttatcacatcattcaatcaacatatgggtgctctagaaaacgtgattactagacgagagtttatgtattcattacttgttttttcggttgaagtttttaatttgagcttacatcatcatcccaacatatgtctaaaagacaaactatttaggttggctacataaaacaagtgtactaaaagattgtttctgatgaggacacgattagctcggatataaccatgactaccttatgtattaatcaatcaaaagtgcatataatctatattagatttacttgttatatatttgaataaacgttgctacataatgagttttgtgtgttttcgtttgcagaggtacttgtttgggcgaaagaaaagagaccgagtgtaaggaatgcatagatgattgaagaagttttacacgttttggattcggattcgggccttctgacagcatcaacttcaaatggacctagccgctgatctagaagaaatttcagggcccataagtacttattggaaagcttatggagtctactttcagatgattttggtcccacgtcaaaattcctaccaagctgccaggaatctgcaaaacaagccacgtatctcatctccagtccgaatctgatttgggttttgggccttgtaattgtgtcgtgggcttagcccaagggggtgtgcatcctagggcaaccctaggatgtccctaatcatacttaatcagtagccgtcatcgcctaggacatccctaatcatacttaatcagtagtcgtcatcgtttaaagtagggttttgcttagattaatctgtcaagaacagtttcgccgctagatcggtttgtagaagcccaaattagagtgcttaattattcatatgcaattgtgttgcaatctatcttgttcttgcttgtgttcttcgattcgcatgtagggaaccttctcggcgaggccaaccaggtttcggcacggttgataaccagaggagacgtggtgctgcgattgcagggctcagtagcgtgttcgttcagaaaccggatcgagttgtgtcgcgactccgcccaaatcgactgtttattagtacctatcggaagatcaggacataacaccctcattagtttccatagtactagaaatgtatgttttacactaatacaatttttgggtaaattttataatactacaaatactttgcctaaactatagcaaaactacatagttaagttaagttagtgtatcaaaaactacaaatatcatgaaactaaatattgatgcatctaagctatcatagaactatagattttagagtcacccctagcaagaattatttcaagattttggtaaaatttatgctaaatctgtaattttgcgatactatgcttcaaatatgtagttccatgataaatttggtgctaaatatataattttattatacattgtcttaaatctatcatttagttatagtttagttaaaatatctatagttttgtgaaattcactccattcaataaccaaatgatacttgggagaccataaaaacgaataatatcaagtacaaaagagtatccacccaaatctaagatgttggaaaacatgctcatagttgaaaaagtaaaagaatcagaccattatctctaagatgtggcctataagcttagagttactagcatgtaaaatgtcaagtgcatagcttgaaggaagaggcagctccaataggatgtccaatagtcactcttgaaaatgtggtgcctgattcatcttgcacatagacaaaaatacaatggaaataactgcatcataattttcttctctctagggccgtgttctttttagctactttgccaggttattcctatggatcatttgctccatgcctctaaaggtatttttgtaaagaaaaaaaatatttctaccgcattatatagaccacttgttctaagatatttgtcaagtttatttttttaaaatatttaatttatccatgtaatcaagtagataatccatactaataataaattaaataatctattttaagtagggccttagtacatttaacgctcataagcagagaatataaagcaaacttagattttactagggataataaaaaataaaatacaaaataaactgtacatttataagcaagaaaatgtatattttctgttcttaaactattgacctgagttaattagttttcatttctcacctacaaaacaaagtaaaccccatccataaattctcaaatcatgtaaaactcgtactttatgaatttgatcattgttttgatccatatatatatggtgatgctaaacctgtcatacgaatggtacagccatatgaatatatgaatatatgataattatcatatgaatatatgataatttgtgtaatatataatggagaatgattgtccatagatgagaaagcttgttctctacgacaagcaggttatacgccctatgtagttcaaaatatcaatcaaattggtcgatttatttggttggaaaatgatacaagtacaaacaaattcttacaaaattttttaaaaaactgatgtggtacactatgattgcatcttgacttgaataaatcaaatggctaagatctttgtttggtaaaagttttataagaattttttagtacgtgcagtattaatctatctcattgtactatagttgatggatgggttttaccaggttgtaattgaaggacaatactaccgactagggtgcgttttaaagcttgtttatcatgtttatcgtttaaagcttgtttttcgaaaaaaaaagaaaaaaaaactaactagccaggaccagcgatagatgggcctccctctaaatgggcccagaaagcccactaatcccatcgcattcgccatttcgcctccactgtggcggaaatatctcctccgcttaaacccccacatcgccctagccgccgccttccccttcctacctcgccgccgccgccaccgccgccgccatggccgccgccgccgccgccatccgccgcccgctcctccgctccgtcgccttctcctcctccaggtcccgctccctcctccacctcctctcccgccccctctcctactcctaccccccttccgcctcccccaaccatctccaccacccccaccagcagcagtggcagccatcgcctccgcctccgcctccgccgccgcaaggacctcctccccagtggtctcctcccggaaactaccaccagcagcaggcccctccccctgcgcgccactactacggccccccgcagcatcagcctcgctacaactacggccctccgcagccacaggcgccgccgccgccgcgcaacgactacgggccaccgccgccgccgccgcagcagcagcagcagcagcgggaggctgtggtggggccaggggagctgatcgggctcggacgggaggggcgagtcaaggaggcggtggagaagctcgacaagggggcgcgcgccgacccgcaggccttctacgagctcgccgcggcttgctccaaccccaagctgctcgaggagctcagaaagatccacgacttcttcctccgctcgcccttccgcgccgacctccaggtcaacaacaagatgctcgagatgtacgccaagtgcgccgccatgaaccacgcccgcaggacgttcgaccatatgcctgaccggaacatggactcctggcacatcatgatcgatggctacgcggtgaacgggctcggggacgttgcgctgcagctgttcgaggagatgaagaccaagtatggaattgcaccgaccgcccacactttcacgctcgtgctcaatgcctgtgccaactcggaggccattgaggaggcattcctgtactttgatgccatgtccagggatcatggcattgagcctggtgtggagcactatgttgggatcattgaggttttggggaagtcggggcatctcaacgaggctgtggagtacatcgagaagcttccgtttgagcccactgacacggtgtgggaatcgctcttgaaccttgcgcgcatgaatggagacattgaccttgaggatagggcagaggagttgctggtctcgctcgatccaaccaaagttaatcctaagaagctccctactccacctccgaagaggcgccttgggattaatatgcttgatgggaggaacaagctggtagagtacaggttgccgcccaagatcgaaaagaaggtggtgaacgaacagcggtatgtcccagacacaaggtatgttctccatgacattgatcaggaggcaaaggagcaggcactgctgtaccatagtgagaggctagcgattgcctatggtttgattagcaccccagcaaggactccacttcgcatcattaagaacctcaggatctgtggagactgccacaatgctatcaagatcatgtcgaggattgtagggagagagcttatcgtaagagataataagcgcttccaccatttcaaggatgggaagtgctcttgtggtgattattggtgaacatggcttttgttcagctgaatacaatggtctgaaattgccaatacgatgtattgagcacttcttttttcttattattaggattgcagccatcctatatgaatatatgctggcagccatgcttttagcgcataaacaatatccagttatctgatggtagtgttagtactcctgttatccatctcattatgatcatgaagatgaatgtgatgcttttattcttgatggcctattttttttcagagcttttgatgaggtttcttactaacatgttagtcctattttggggaaatgtttacattgcattgatgataagagaggtttcctgcaatttcataaagagtatgtgttgttggatattggtgtattatgctgtacgctaatttaaatctttgaagatatctcttaaatttcctttcaatacagatataggaaacatatggaattactagcctagagcctgtgcgttgcaacggaaaacaatttgagtttctatcttgttaaattaatcaataaacacttatttagtccaggtaatactatgattttccttattaaacaagtaggcgattttgaaatttgggaagagccaatagtgaaacgggagaggactcattgaaaagatggtgtaacagtatagattgtggggccaacatttcagtggtaagggtggtgtgggaatcggcaccaccactactaacatttgaagtagcatagaatagtttattttattgttaactgttgtcctttgttcttaatcttgcttttcatcttccttgactaatcaaaccggatgtgttttactggacatgttgcaaatgtgtgttctattcatccacaaggactgcaattataaatttatttttcgtcaatttgttctcaaatagttctttttacatttcttttgctattccttttgattttgctatatgaggattattttgttgcgactctttattgatcttacacatctgaattcaaaatgttatttattttccatattgaactgttcttctatcactcttcagcttatggatcataatgtcctgtcaattttatcaaattcttccatcatgaattcatatgattcattggccattgaaccccttattgcaaatcttcttgatagaatattaaatctgattgattctggtatggctccatcaaaaaatttcacctgtgatttcttgtctctccatccatcttatataacttttcatgtgtcttgttatgtcgaggtccaggagaagttccagattgtggggacatagaattctgtgtttctagaacaaagcacatatgcaggtgaaatcttcattatctaggcctacgatgacaaagtgtagtactttctgtatctgaattatttctgtctgcttcaatgcttaaaatacttgctaactttgaaattctctatttcattgacctgcaatctttgcatgtgtgaatatttttgcattattgaatcacactgctttatccattgtctatctgaccaaagatcagttattttttaacttctttattcttgagttgtggttgccattctgtttctatttcttataatagtgtatcattttgtcataccatgtcaatgctgttatactgtaacgtgatattactcaagaagcgtgccatatgtagtgtggtgtggtccaacgtttctcttggaccttgcattaatttcttcacaagtattttaaaaaaaggtctacaaggctgcatacaaggaacggatgccaaaccttataccgcttaagccgcataagtggtcgattacactgcataagcatctgattatgccgcataagcgctacaaggtggggtgaccacacataaactacatgctattttgaacattgcttcgtataaagttgtattttgtgtaaaagaacagaagtgtctctggtaaactacatgttattgaggaaattgatattttgcggctcaaatcttgtaatattgtcatattcatcatatgatccttttttcttcttgaaaaatgttccagatttatttaaagcattttgcgagatatgaaagttgtttctgtatattgtgtttgaaaagatttttgctatagctggtttccttattatatcggccctctcctgtttattcttaccctgtaacaatttggatttaggaaacctggttgtgtggttaggctgtgaaattcattgtatttgagaaagatctgctagaattgtgattggttgttttcctgatgctggcttcataaatgcctggaaaaatccattcaaatgtttcagaaaaacacatcccgaaatgaatgtttttctgttttcattagctgtaattccatcaaaggtgcaaaggtgcaaaggtacattatttatttttctggaagcattgtgtcacacgaacacaatccccatattttcatagcagtctcttgatcttccataagtttatgttcctttctgttctccaaaccaaattcatataaaccctgggtcattgtcttgaactcttggcctggacactccccacttaggagcttagctcctgtgggtgcgcatcgcatcggcaatgttttttttctctttttttttttcgggagtgttcatttgtgaagtgctctgctgtacatactttctcttctctttagtaaaatgaaatgcatatggctcttgcgtttttgagaattttttttcttgctttcttctggaactatctagaactcgcatcattgctggaagtttctctgtgaattgacgttttgacattgctcataccctttttagtgtatggtaaagatgtgagtctctcagggcagacagaattggaccctgtagacgtcagtaatctaccacaccattgcttgaactaacttattctttctttgtatatgatactcttccaatgttcttatcagcagtttttcctctgttgacaagtagttatgacttatgagatctgagaaatcttttttctcctgttctggttagttccgtgttatcctctaagtccagccatgtaatttaccatctcttgtaattttcttcctcactatcatgacacagacacttttaactacctcatttatgtacctttccgaaacaactcagtagatctgacattgattcagaatttgttttccattgtccgttgcatctgaatgttactttggtgacttccctgtttcttttctttagcattatttccttttcacacttcccttagtcagaattcaagaaggtttttgtatcttctgttagcttttggtcactcttgccagcttctgaaatttgattctaaccagtcctgattctgttccactgctagtctgctatcttgatttggatatgcataatttgttgcttgtattggattagtcttgattttcgtcgaacaaccttagttcctgcaattaatatagtatattggatgttatggaattttctacctagtctttttgtatatgagtcatcattttcaatctcctgacaattacaatgatataacaacatatatatgttactgctcccttttattatattgctgttggaacatttttgtgaatcttctacgtattgcatacctgaataattcttttgaggaagaaattgtgttgcttaatttggaaatggctttccaaacttgtttctgtttcagtgaaacacaataaacaaaggcaaaagtccattttacaccctcaaaccggtaagcttgtctacaatacacacccgaattactactaatacacttgaatagggatggcaatcgggcgcgacgggcacgggtaatgtctacccatacccgtgcccgtgagattatttttgcccgcggacatacccattactacatgacggacaataattgctgcccatgcccaccacccgcggacatcacatgcccgcttacccgccacaactagaacagtgcaacaaaatttcacaagtttagcaagttctccacctcggtgttgtgtcctcttacaacgatggagtaaggggaagagaaaaaagggagataaaaaagaaaccgtagaaaacaaagaagatgagttatatatcctagtggattttactcatggcccacatgtcagttagatttcacgggtaaacgggcaaagcgggcatgggtagtcatttcccatgcccgtgctcgtttacccatagggtacagtttttgacccaataagaaacccatgggtaaaaatggagaacatacctaatcctaataggatttttacccacaggttaatgggcaagaactattaatatcggacacttaacacccccaggctgtttttatcgtggtttttgatatgccggatgccacgtcagcctttgccgcgtcaatgcataggattatatgggccaagcccatattggctcgatctgttttgacctagcctagcattctcatgagcaggctgcgatggcagggttgcgcggaggcttgctgggagcggtggcactgggaagaagcatctctgataggctgcgcgctgtcgctggtggaagcctatgcgcgtcgccgcacgtgcccttggagatggctgagcagagaagaagcaactccacgtggggcggaagcaacgacgagctagtggaatgttcagccgacgaaacaagcaaatcgaggggcacgagcacctatggaaatggcagcatatccagtcaaggtagaagcgtgcctgttcgtctgccacttcagagaaccatgaatagggggagagagagagcatgtgtgtgagagatagaacctcgacccatacacacttgagccaatactgtgcgctgatgttggcgtgtcaaaaaccactgtaaaacctgccagtttggggagggggggtgttggtggtggttaagtgtctggtatcgacagatcgaggatgcagtacggtttcatagtttaggggtgtattttagacaaccgtaagagttcaagtgtgtaaaatggacttttcccataaataaatactagcactgttcaatgagttgagtagtacgaaccaattccgaccattgtactctttggctgagttcggcccgagttgaaaactcatcccacgcatacaaaacggaatgagtcattagtacatgattaattaagtattatttttttaaaaaaggatcaatacgacatttttaaaacaaattgcttatagaattatttaaaaaaattataacgtttagcagtttcaaaagtgtgcgtatggaaaatgataaagaggagttgggaaatatggctgccgaacacagcctttgtgtgtgttttgatgtgtactagtacttctaactatgagcagattccgttaaaattagtacagcctgaaagcaagttcgtaatcatcttaagttacatgatgcatttcagaattaattggcttgaatgttccttatatgcacaaacatgtagtccgcacatttttctgtattatactttattgaagagtaatttttttttaaaaaagtttttgggcattcgtgacataaaatccttgttattacattttgtttcaacatgtatatgaattcaaagacatttcatactgttctttttatgattattatacataaatatatgtgaggcaaaggaatggtataatcttgctccttgggttttactaaacatttttgtcccaatatatgggattgcttggaactaatcacaataccatggcttttacattatggagcccctaaaacttagggatttgaaaaaaaatgatgtaatattttctgaatgaacatgattgaaggattgatgtataattaggttttgccccattttatagatttggaagtgtttttgggaagaaacgtacatcaactcaattttggattttggaacatgattgaagaattttggatgccattaatgaacgaagatgttctcatccttatggatgtttttttttttcctatggtagatcaccttatttaccacagtgggcattagacatcgtggacaatatccagcatttactactacttgatattgagatccaccctactactaagagcatgtacaatagcatgctataagctaattataaacatattttaaatagataaatgaagatagagaagagcagcgggttacaaatccgtagccaactacagcacggactccaagacgtaatgtgtgtatgacatgtgggattagatattaatagtatagtaagcaactattgtatgaattaactattacattggctgtagatgatttggagctagttgtgggctatactattaaacttgctctaagttgcaaaagttacattgtggttgctctccttgcggtgttcttcagtaaagagcacaaagtttgaggatactgtagcaaattttatcaaaataattattcccctgtccgttaaaaacttcaaaatgaaacactctatcctatttttaacaaatgataaaatggtaaaacaaagtcccaagctcgtgcgtgcactcacgtttttttcaataaccatgacacatgctgttgtggtgctattcgaatcatgaacatctcgaatattttcatatataaaaaatgtcaccaccaaatataattgaacaaacaactcgctttacctgcaagaaccgaaccaaacacgtcggtatcatcgtgttcgtgtaggatataaatataaacacaacaaaaatgatgtaaatatatatgtgaacacaacaaaaggttttgaacgatgaagacttaaccgaaactacaaaaatatattttgatcttgacaaatttgtagatgatttaacattatttgtttttaactatacgcgtcccacacaagctcatcataaaagtactccctaatacacgctcacaaagaacaaccacaaatctttggtcttcgctaaaaaagctatgggcgcataatatctatggacattattatttaaaccttaaagggagcagtaatacaaccacgatttcaccgctgttctaccggtattaatttcctgatttaacaccttattttagttcataattacttagggactagggtttgcattttcgatttcagccaaaatttcggtagcaccaaaatagaaatttcgtgatttttggcacttgtcggaccaaaattagttgaagtacttttacatgttttgactggatttgaataaaacttgaccaaattcaacaaacatttggtaaaatccaaaaatttgggtcgatatatttgaacatgcacagatgtagcctaagggggggactcaaaaacaaatcacagcggtaaaattcaacaggcctggaatctcctggtgtagaacaccggaacttccggtatgttcagacagtccggaacttccggtgttcttggaccggaaaacagacgaaattcaaatttcacttccagaaatttagccaattctcaaaagtagaaacacacaggtgaacagaaaagcaataggatcacagatacaagcatagaaacatcacagaaatggacaaggaggatatttttttcccgaagttcggatctcgcgatctactctccgttgaggagctccaaagagttgggggtatcaattaaccccttgcctcacttgtgcaaaaatcttagaggaaatccacagccttcaaccccaacacctctaggtaattttctagaattgagtgaccacctagatccaacttaacctacttctagaaaacaccataagtgtgagttgctctattaggaaaaccactaggactttagcataagattctttactcacttacctcgttcccttacggaggtgaggaaaatattcacaagctttcccgggaaatccacaattgcaaaggaagctcgcgggtgacacctaaccatctaggagatgatctccaagagtaataagcaccgagatgtcagcccacaagataccccaagtgctcacaccaatcctagccttcacaccttctccaaatcttctccttcaccctcaaaatctcactctctcacaagaatggctcaaaattgggcggaggaggcaaagaaacacctgggagaggctagcaacagttatggaatggaaaagcaaaagtgaaatggccaaagggtgagctggggacgattgggatatatataacggctaggtgacgtcatctagccattactcacatttttgaactggaaacaggtccgaaacttcctgtcctccggaagttccggataacacttagctaggtaaatttcaccattcatcgatccggaacttccgggtccaaaggaccagaacttccggccgagcagatctgtcctgggcagagctattctcaaaaatattttgacacttggatctcactaagagcacttattgtatcccagaaccacacttggaacccctcttaatagtacttttttcctaaaacccgattgcaaaaagtaaactagcctatgcacacttcgagttccattcgttgtggggggtctccaagcatctcttgaccacacaatgacatcttgggactaaagcacctgagtatagctcaataaaactcattagtcccataaccacattgttattaatcaccaaaacccactagggggataaatgcaccttcaattttgatttgccagtggggtatgaaattaccggaattgcaatcactgttagggacaagcaccgaattgtagtcctgtccacttacctaataatgtaacatacccaaaatttaatcaaatttggaaatacaattgctcctgaaatttttaaagagtttttcctttgaaaggtttggtcaataagaaaaaaatgccgaagtaattaaaccaagtaggaatatcttcagattcaaataacagccccaagtaactatataaattataacaagctaggatgctaaggaagacaaattgtgtcaaacaacattttaattgtcatgactgaatatgtggtgaaatatttgctgcaatcggtcccaagccttgagtgctaagagcgtgtaggttggtttgatctacaacaaacaagagaaaatagaaaacataattagatgaacgatagccgatcggccgatagggccgatgacgtatcatcaggacccagccgatcaatctaacttgatgcatttttataaagaaattcgatcatataagtggcaaatatacataaacagatcatgaaacatgcgctatcatgcatattaggtaatatcggctgaaaccctgatgctatccttaattatggttaactccaggtcagtttttatgattctaaatatggctagggatgatgcatcacaaagtatataaagaagcataaagtttaaacaatcaagaagttaatcactttttaggatggtagatatcttagttaatctaatctagtaagacgatttagctgataccaacataaaccctaaaacgagtatcaaccgataggactaaatcgagatactaacactatattaactaggatatatgatagcaatgactacgataaaatgactaatacatctaaaatgacatagtagcccagacaacgcaagtcatcgagacaagttacctcttgtcgagagatcgcagccgatgcgctgactcgaagcaagaactcgtcgaaaagtaaagcaaaaaggatggcgatgcgccgaaagttgtattgattggattcaatcccttattacaatgatttggggcttatatttataccccgagtacaaaacctgtccattatggacgtgattcaaaactttgctaaagataaaatttgaacaagtccacatggctgactattaccatatctctaattcaaaccggtataaatatcctaattaatagataaaattaccttaaattagctcaatctctatacgacaatatcagttattccaatctaggcccaacccgagcctaaatcaatccgtattggctatctggcatatcggctaaggctctgttcgggagtgagggttgggaaccctcagtctccggcacgtaaaacgaagcagcgtttagtacgtgattaattaagttttatctttttttttaaaaaatggatcaatatgattctttaaagtaactttcgtatataaactttttttaaaaaacataccgtttagcagtttgaaaagcgtgcgggcggaaaacgacaaggaggagttgggaactactcctaacgaacgtagcctaagtctgtttccatctctattttcagttgatacgatgtccagccgatgcacagcctatctcctaatccagttcgattccgcaccaaatctgcctcgatttgttcctcctccgagtatgatgcaaaattctgttgttaacaaggtgccgattttttagtagattgacacctgtaaaaaccaagccgtgagcattgaggagcagaaaaggagaggagccgttacctctctctctctcacgcacctctctctttctcgagaggcagtggcagcagcgccttccctgtctctgccagatccgatgggaggggaggtattggcagcagtggcggcgccctctcctccactagatccggccggaggagaggcggcgacaacggcgggctctccacgggcagcggcggtgggctacgcacgggcgatggtggctcttccctccgccagatccggtgggaggggaggcggcaggatacccacaggcgacgacaactctaccctctgccagatccggtgggaggggagacggcaggctacccacaggtgacgacaactctcctctccgccagatcttgcgggaggggaggccgcaggtttaccacggtgtggctcccctcctctctctctcccctggcatcccaccggcggctctcctcctctccaccgcagtggggtgctgccttctccgctattaccgcccgtggtctgctctttgccactagctgctgtgacgcggctagatcgacgacggcgatggtgggcatgtgtttgtgtttgcaattttcttcatttttgtggctgtgtttggatgatttctgtgatgattttgattgtgtttggttgatggggatgatgctgatatcatcgatgatggagagctgcccccacactactacacaaaatattttcctggacaccgaacccttttgttttcaggcgggttgtaagtgaaactgcacgggaaaatagggagactggcgccgggccgtcgcccgcacgggaaaactcattttcccatgcgggcgttttaatccgaccacataggataatccccattatcctgtgcggtcgacttaagaggaccgcacggaaaaatcgattttcacgtgcggacctcttaagtggaccacacgggaaaatacattccttcttttccctcacacccacttcaaatttttcacactctctctctccactcttttccctctcacccacttccaatttttcacacaatctctcttccttttctttttattctctcccacacgcctctttcctctcctcccctctctcatgttctctctctgccactttcctctcctcacatccccctctcctctctctctctgcctcccactgagcgcacgggcgtcatgacgacggcgatgacgagtggcggcgcgatgatgagcggcagcgcgacgacgacggcgcgaggacgacgactgctggcggaggcggagcgatcggccagcctttttcttcttttcgtcatggttttgcaaactttgtgttgcgtcgcacagtggatcggctggttgccgtttctttgctcgagaaatggtagctttgggattaggatcgagaaaggctagctatgcgctcaggtacggctgcctgtgcggggttggacactggactaaagagagacgacggcgatccgatcggattttttcgattttattttttttgtccgttttttttccatgcgggtggtataacttaaccgtacgggataatcgacttaatatgaccgcctgggaaaatcgattataccgtgcggtcatgttaagtcaaccgcacgggataatcgattatcccgtgcggtcagcccgcccgcacgtgaaaatgccaatttcccagacacgcggctgtagacgggccgaaccaccgtaccagataatcaaaacgtccgcacggaaaaatagggtatgtagtagtgccaccatcgccgatgcatcgagccaatatatatatttttaatttatggagcctcaaaagtgctagttcctaaatcggcacctgtttttcatctacatcaatgccgccttctaggtgccggttgggaaatccgacatctttgttggtttgcagctagcacgaatgatagtttctgctgttgtgatgggtctttaacaactctagggagatcgatttttgtaggtgaaagcaattatgatccacctgcaacatagaaaatcaattccgtagtagtttttaggccatccctaacccagaaactatcaagtagtttctatacttgccatgtcatatagacactatgtgtaaaaactatgtattcaatggatggtgtcttcaaattaaattctcatccaatcacttctcttctctcttcttttatccatccattttcttgtttttattcttggttcttgtgtagagatggtttctttattttttttacctctctactcattaactctcttaccacataggattttcgtttatgtggtaatatatttaatgctatagaaactagataataggtaggattcgggatggccttatttcctctcggaaccgcgtgatcaattcagctcgctgtaactttagcactgcaaattgatatacgggactgcaaattgaactttatatgctcgggacattacatggactcgtcgccaactcgtaacctataaataacttaatctaaagcaatcctgtcgatcatatgacatgtaaggcacacgaacgtacgtacgtatatatagtacagggctgggacaagaaagcatccaataatctacatcttatgctgagaagctacggattcaacgagcgagtgctagcgtacgtaagcatgcatgttttcttctactactacttaattaaatcagcattatctaaaaatatatatctgtatcaaaggatgcaagttaaatagactctttcatgactacggttaattatcgcagtcctcactcaacaaaagagtcatatatcatccgatcaatcatggatgtgtcgtaaattaattaaccacactttatttaatgaattaagtctttcatctatcaaactacactatttaacggagaaacattgcgtcttaagactgatcacatgactacaaaatttcatcgtatgccgataagtactgataaactattttatctgcaagattaagttaatgctgacccatgtgattacgttcgtacgtgagctagaaattaaaaaagcagagagaccagcattcttacaaagagtgtttaaacgctctctatctgcatacggtagcccctatataaacaaaccagttgtcgtccagcaataacgaacatcaaccaacacacaagaaaaaccaccagagcctctcttcatgcagatggcgccttccaagagcatcctcgtcgtcgtcttcgccctcttcgccgtcgccgcctcgctgcctccgtcggcggccgccagggacgcccaggtgttcaagcccaccgtcgccgtcgatgtcgtgcatcaggaacaacaacaacaacaacaacctgcagtgaacgccattgccgacgtcagccagccatctacatctctggttggattgccagggctcccgccactgccacctcttccgacgatccaaatcccaggactcccgccattgccgcaacttccgacgatccaaatcccagggctcccgccattgcaaccacttccagcaatccaaatcccggggctcccgccattgccgcaacttccgacgatccaaatcccggggctcccgacattgcaaccgcttccgaccatccaaatcccagggctcccgccattgccgcaacttccgacgatccagatccctgggctcccgccattgcaaccacttccagcaatccaaatcccggggctcccgccat

SEQ ID NO: 22524 - DNA, 9742 bp, Oryza sativa
attgccaccactgccatcaattcctatcactcttggatcaccaggagcacaaatccccataaactcccagagcgcactgtcaacgtctaccacaccacaggtgatcacagagtgcctgtcgtcgctgatgcagctgatgccatgcatggagtatctgaccaaggctgacgagccggctcccccgagtatcggctgcgacagcttcaagtcgcttgtggagaaggcgcccatctgcctctgccatggcatcaacggcgacatcagcaagttcatgccggcgccgatcgatttcgcacgtatgatgtctcttccggccacctgcggcgtcgccccgcctgtcgaggctctgaccaagtgcttcagtaagttttaattagcttcttttctctattgtttgctgcaacttatttctgaatttcacctgtatatactttttttttcaattgttttgtgtggattcaatcttatgtatacatgtaatgtttgtgttcgaaaagattgatttatccatgttatatatgtttgacagcgggaccagtgccgccgttgatgcctgctcctactcccgctgctgctccatctccgggtaattaataattaacaattcattctggaaaaaaactgagatatgctaaactttatctatcctgaattaactctacgataagttctgtacccttacttgttcatgttttgctttaattttattctgcagggccatctgcgtaagtttatatatagcgcaagagagaatggatgctgattaagtaggtgccgtcaagatgaagattattaatagaattttgatagtttatatgagtaaatgctgtctagtttttgttagtttctgtagtcagcaagacgttatgaatgaggttataattaattaggtctagggaggaacaataatatatatggatcaggtcttagttcagaacagtgtcattttgtacgtactctggtacaaatatataaatctacaaatattgttcaatatttttatttcattgtagtcgttctgttgacaaaagtatacacaaaattataaaatgtaatccctgaggtcatatattgctccattcatatatttcagatcgattgaactttttaccatcaataacttctcaaatgcttagttttaaaataaaagattttcttcaaaaggagtatcacagtattttcgtacttttatcatcttttttaaatataaaattgatattcaaatctaagtttgaaaaattcaaccaaatcttttctcaacgtcaaatatctatgtgagaagattatgagatttccaagtactttttcaaaatatttatgactcaaactacaatgtacaggagttatttaaaattttcagtgttgtatatagaacttgaatgctcccctccacacaatcatttttctgcccgaacagccagtgttaatccatcaccaatggttccggatgaaccgcagtgctaagccactgcgtgtagttgctctattaccaaatggtactaattgaagttagatctatatattttgagaatcagaatttgatatcagagtgtataaataacgaaccatttatttgttttcagtacaaatttttttcatgtttttaaatcgactaaaatttttgaggtaacgttaatttatagtttaatttacatttttacagttctttgcaagatatccgaatggcaaaggtacctatgttctacgatttatcattaggtactgacattaattcatagcaaagatatctacgttgtacacacaagtatagagagatagctccaaatatataccttctatatctatctatatctataataattgagcactttctacaagctcccaagttaactaggaaaatatggcctttgatcaaatcgataggataatcttcaccgttggtcataaaatcaaatcgcacatcacacctttaaagcgatctaatatccatccaattttaaagcccgtctagagcccatctaaccattacataaccgtatacgtatctcatcatgcaagcttttgaattatattcgtagacatcgtcttgctaatatatctctgtcccgactcgagatgtggccatgtcgaactcccttgcaattgacaaaaccccagaagcaaaaacaacatgatctgtagctatatatatggacggcaatatttagaggactagaaccctggaattaaccttcgctgaattgtgcatttgtgttgttccatgcacctaggcgatggttgatggtagatcctggagtcaacattcgatgaattttaatgtaattgtgtggcatctaggtggtagcacatggtgtcttagaggaagaaacaattatgtttaaaggaaagaggaagcagacagatagattaacaaaaattatgcatgcttctttgtatggtcgagagacgtcccgttgagtagagatagaagctaagttcagattgatctccatgattggcttatatgtatgtgtcacacccggagttttcccctttcccgtagtttctaattcgtcaataaattatctatagaaattactttggttaaccgggagaaaaccttaagtaacaatgtatttaataatcgaaaatgttagggagaatttttttgaattctctttgctctaaaatcattaacgggacttaaagcggaatattcagagcatcgggattaatgttgttaacttaaactggcaggatttgaattaataataattatttttttcttcttgcctttggtcgtgaatcatgcccaattcactcctctcttcgtacgtgcctccgcgttttcgttttgcatgatgagccaagtccgatttcgcttccggttccatttccgttcttttcccaaaacggcaccgtttttcctttccgatttaggaaagtcctaatcctaatccaacccctcgccctctccctctcggccgctgccctccctctctccctctcggccgtgcgcgcccctcctccctagccggccgaaccgagcccctcttctcctcctattcggttcctccctcttctcctcccaatcctagtcctagtaggacccacctaatccatatattttccccctatataagtcttcatacccctcaattttattatttccctcatattgcaaaaccctagacctagccgccagcgacccctatccccgccgccgtcagtctgctgtgccgccgcctgccgcgtcgtcatcatcgccgttgcgtcgccagtactccattttccctctttattgatgtgtttgccgctgcaaccatcaattcatcattttaatctattcagtttgtttctcatctagcgtcgccgtagcctctgtgtgttactgccggatcgtcgtcgccgtctccagctcgccgatcgtctcggtttggtgaggaaccttctcgtgatctcctagtttaggtgttaattctttaagcgttgttgttgtaaccctaaaagtgtaaccccaccaaaaccctagcgtcgccgccgctaagcaccgctgccgtcccggccatgcgccgctgccaccaccgtcactgccggccgcgcgccgccgccgctagccgagtcgcattgccgtcgccgtttagcgccgcacactacaagaaatgtgatcttctgtgacaaattcctcatgacgatggtgctattcgtcactatgccatttcgttttatgacgtttgatagggggtggtgttaacgaccaaatttggtaagtaatgaaccaagttcggcatttgaatcgaagtggattcggcaaagggattgtgatcgaagaatagagtgcgcatcggctgcggaggtatcggctagagtctgcatcggctgagatgacattggacaggggacagccgatacagccgatttcattgagatggttatgaaatcgtttctgggatcgatcagagtgctacgaaaggattgccatcatagagataagctcccagataggcaattgtatctattaattaggatattttaaatagtttccttagagatatgtttgggcaaaagtctgccgtaaagacttatgtgtatcttagagtttgttagagataatagtcgtgtccggcaaggacatatcatgtatctcgggtataaataaaaccgaacccatgtaatttaacaacaaccgttcaataacaatctcggcgcattgccaccctttttcaggttcgtttgtttcgacgagttcttgctttcgggttgagctgcatcagtttcgatcttcaactagaagtaaacttgtcatggtggcttgcgttttcgggattagtgctttcatcttcatgacactctaatcctgtttatgtaattcgtcgagttattatatacactttataatctttattagtgattctatctaacccgcaatcggttggtttttactgctaaatagtagccgatagagttagatcttgttattaatctagattatacagcacatctaccatcttttagaggttttcatcatcttgcttagatcttacatttatctttacgcttaatgctgcatcggttaagttcgatctattaagtattatctataactataatatctagcttgttttatgattatcaattgagatagtgtcggagttttagccgatatttcctgatttagcatcttttgccttcatatgcttgattgttatgctaaatctgccctttgtattaagatctcatcgcaccagagtatattaggctttcttgtttgatatattttgcttattttaatatcttagtataaagtggtatcggagtattagccgatacatgctagatctatctgatcggctatgctataaatgcctatataatcattgcttttatgtatcttttgacttgagtgatttatactatctcggcatggcgaccgatctatcccaatcacttagtttaaacatacatcgaaggaaagattatatatcactaatatctacagccgatcgagtagatttagtcttatcttattcattcattactgccgatcgattccaacatgacatcggcttgaagataaatgatatgtcatcggcaactaaccgatcggctatcgtttatggatttgaccgtggttttttcttgtctttctttcttgttgaatgcaggatcaaatcgccttgaacctaaaagcacgatttaggacctgcacaggagttaagcagatcttccaggccagtgtgtgtttttcgcatcaacacgcttttggcacgcccagtggggcacgagttgagcgatttttcatcatgtcgggcggcaagcaaaatcccccggctaccaagcaagcgtccgatcaaccagcggaggttgacgttgagaacatcatcccaatcacttaatggcaagtacttgaagaaatcttacacaagtgtatggattaattcatgatcggctgatttttgccaatacatgctagccgatgtgatgatatcgcctttagatggccgatatggattatatcgcccttagtggttttttcttatcataattggttgtggtttgccgatgtatgatgcccgatatgattatatcgcccttagtggctttttcttatcataatcggttgtggtttgccgatgtatgatggccaatatgattatatcgcccttagtgtttttttcttatcataatcggttgtggtttgccaatgtatgatggccgatatttgatatatcgcccttagactaaattataattttatgaatgacttcagcattgcaaaattaggggggcaaatatatatgaaacgtggatttcaaaaacaaaatttaaaggaaattcgcgacaattctaaacttgaagttctttacagcccaaaagtttacaaatttaaagttgaagttacaagattagctcatccagacacatatttttggatggccgatattgccctctgcctaatctgatatacttcatctattatttgggcatcggttgcgtcagtgcttgagatcaccttcagagatttggtcaggtcagtcaagtgcttgacatatgcttttaattttgacttctggtcttcaatggctttcggtaagtcgacaagcttttgttcttcaagagtgatttgtgcactgcattgctccaactcagccaagagctctatcgtccgggcgttcagccgattgatgttagcttgagtagaacttgggccagcctctaattcatcaagtttagctttctcttcgttgatagaagccctgctaacttggatggtcacctcaaggtcccttctctcacggcgatcgacaatcctttgtttggctttctctagtttgagccgatgttgctcaaggtatgccgctggggtataatcgcatcggctaattcgtctgggattttatcatggactacatgaaacctatctctaatggatccactgctggttaccagagtttccagagaaccttctagtcattttgagatgtccagcagggttgctttcacatcatcggctaggggcaccaagactgtgcttgtggtttcttctttttcatccatgaactgcctgatgtcgaaggagaacatatcggctaaaacctcaaaaggaatacattattggttaacaaaagtggcatggtagccgatatgatttgtggattcaaaacaggaacttacagggatagcatgggctggtgctgctacttcttcttcttcttctatgtgatggcttcctgcagccgatagggtatgctcacttgattcgggaataggagttggagtacgacgagcctgagaaggaccaatttaagttatcatcggttattcaaaagttgaaaagaaaattaaatgggatttagaaacttaaccgatggaattggtgcttgtggttttttagaagccaactttttttctgcaaagtacaagattaggaatcagcatcaaatattaaaacagaagatgaaaagagaacacatgcatacccttggtttgtaactgggacgcactggaggtgatggagttctttgaggagcaggaatttcaggtggaggagtttgcacccttgtttcactaagatttttagccgcttcatctacagcttctgccaattcctcaccctccaggaattcttctatgtctggatctacggttggtaggtcatcaatagcagtcttttgcttcttgggcttcttctttgcagccgatggagcagcagctgattttgtttttctcttcttgccaacatcagctgcaatcagcacacgcgacagaccatgtagtagagttgaggtcttgggggcatgatagccgatgactgggggagctaagccaccaccattgggaataagtcctggagcatattggatctctacaccacttttgctgcgatggggaggagaagattctgttgtctgcagaaaagaaaaattaaaagttaagattgatcaatcggcttacaattgttaacaaccaaatttggtaatttcagtatcggagacaaagataaaatcaaagcggaatccaagatggagatcgtcccgcaagaagagcaaaaatcggctaaagtccgaatcggctgcgaccaggatcggcagagtccgagttggacaaggttagccgattgagccgaatccgacaatatgacacggcatacgttgtcgtgttgggttaatgtgcttcatgaggattgccatgcatggacagagtcctgagaaggcaattgtatctattaattaggatatttcatgtaatttccttagaggtatttttgggcaaaagtctgccgcaaagacttatggtatcttagagtttgttagagataagagtcgtgttcgatatggacatgttttgtaatctcgggtataaatagaccccgagccctatgtaactaatctaacacacgttcaatacaatctcggcgcattgccacccttttactttcgttttgtttcgacgagttcttgctttcgggttgagctacatcggttttgatcttcaactagaggtgaaacttgttatggcggcttgtgttctcgggattagtgcttccatctttatgatactctaatcttgtttatgtaattcgtcgagttatcatatattctgtataatcttcaaaaataccgttatttaaccttcaatcggctaacatctatcattggaaggcagctgattaggttaaatatctatgttgtcttagattgtacaggatatccaccactctatgaaacatccaacggcttgattgtctagatattgttcttcttttcatacttatagctgcatcagtggagtttgaccttataagtcgtgattagaatttcaatctctagcctacttttggttgtcgattagggtagtatcggggtttcagccgatcttatctgattttgccttattatttcatgcgcttaattgacatgctagatctgtcttttaaattaagatcttattacaacaaagtatattaggcttctgtttgatatattttacttgctttaatatcttaatatagagtggtatcggagtattagccgatacgtgctagatctatctgatcggctatgctatgaacatctataatcttgttgttaatatatacttcgatttaagtgatttgtatactgtctcggcatggcgtccgatctatcccaattacttgatttaagtatatatcgacatagagattatatactgtcaatatctacagccgatcgagtagatttagtctcttcttacttatttatatctgccgatcgattcaaacatgacatcggctcatagataaatgatgtgtcatcggcaactagctgatcggctatcatttatggatttaaccgcagtctctttgcctttatttcttgttgattgcaggatcaaaccaactggcacgctcacgaatctaaaggcaagatttttggacctgcactgaagttaagcagattttccaggcctcgtgtttttacatcaacacgcttttggcacgcctagtgggaccgagttgcaataacgttctctcatggctgagaaaccaccaccatcaccgtcttcgattggcaagtcggaggtcccttccaagactgatatcccaaagcctagtgggtttgaagttcatgagggaaacattgttcccgtcactatagacaaattaacaccggaacaaaagaaggagctcgatctgatgatgcagcaaatacaacaccagttcttgaattctttcatggagacccgtaagggaacagttgtttagaagtataaggtaaaattagttgctgatgttcctggaacaggttcttctaagaatggagaagtacaacaagttccggctggtacagttgaatcaagtagtaaaggcattccagagggctcgggagataaaggtgatggttttcagggggtacaagttgaagatcttagaccagatggcaatgaagtacaaccgcagtttaacaacttccaagatcggattgactatgccgtgcaacatgctttgattaatcaatctggagtgctagtgtcacaccccgaagttctcctaccaagcctaaaatttaatttataaacgaccccaagaaaatgcaggtgcaatcaagagaaaaccctaagaaagtaatgcaaataataatcggagttgacatgtggaatttttcttgagttcttcatgtcgaaatttattaacaggatttttagtggaattttcagagctctagaaataatttttaaccaattaaaatggagcaagcaatatttttattctagggaaaatcctttttcttttttttctttttcttgggtaccgagctcg

SEQ ID NO: 22525 - DNA, 3272 bp, Oryza sativa
cccacctccaacctcccacgtcgccggcgaaatcgggctcgcctcggccacgtccgtctctcccgagcccctataaagcatgcccgcactcccctccaccttttttctttttccaccactctctcccgtgccctccattgctcccgcgccgtgcgcccatccgctgccgcctctcccgctactccggtcgcctctagccaccgctacactcgccgccgcaccacgccgtcgccgccgatggattcgcgcggccgaggtccacctcgtccatccctcctccgtcgaggttcgccgccggagccccatccccgtcgtgcgccggtaagtgacgccatggccgccgccttcggccggcgttttcgccctctcgcactctcctctctctctctaacccctctccttttgttcgttagaaggttccggagctcgtcccgccgtcgccatcgtcccccgtcgcccgccgtcgtcgaccgatgtcggtgaggcctctcctcctctttctctctctctcccgcaccgtttacccgttgcgccgccgcttagccgcgtagctgccgctttgcctctagccgccgctctccgccgccggtcggtcgccatcggccgccgtcttgcgccgctgccgcatgcgcgccgcgccgtcgcgcgccatggtcgccgggccggtttgcgccgtgcccgcgcgcaccggctgcgagctcccgccgccgtccgatctacccttgggtagatcggggccgtcggttcggctgtcgcgtggccgccgcgtggcgcgccgctcctccccggtccgtggacccgatccgccatggaccgccctccccgagccgctgaccggtggggcccgcttgccggcgccgcgccccgccttgatgacgtcagcactggaatatattgcgcaataaatgatttaaggtttttcttgtatagtaataaacacagtgaatcttctaaaattcataactaattcatccgagctccgtttaagcccgttcaagtctcagtaaatcaagaaaaatgtgtagaatccattaaaaatggttttgttccctgtttcagtagtcttatagcctgtttgcaatgtttgccttgtatgtcgctagattccggcactcccgacgctccggtgtacttcgaaatagtcgccgaggttcctccagcagcagagcaaggcaagtcatgcttgtcacttgaacatgttgatcctatattgcaaatgctctattgttttctttcaaatattgcattgttttatattgatactatgggttgtttacctattgtcatagccatgctattgttgaaccatgtctctttgtcagcttggggttctaacatgattagggttaggactagggattgcttagccatgcttagttcaactagttcacattggggaaaatcctattaatgtttagactgttggttctaatggtttttgttggattagtgacaccgctttggtgttggttaattaaaataaatcacatggtgggctgtgggtgcatggttttgctggtcgcgcccatggcagttaaggaccggttcgcgggatgccctggaagaacttatcgtacttaccacaagccagcgtgggcaacggctgggcttgtagtgtagctttcctctagttgacgcatccaggcaagggtgggcgtgatggagcggggcaggccctgtgacagcctctgtcgcttccggattcacctaggcatgagaggggactgcccgttgcccgctggggacgggggtgacacctgaggtgtggtgtgcttggctagagggggttatgcgaagggtcctgtcacggcctctttccggtatgtcgtggtggcatgtcggcgcacggaaacgtgtcgtggggctgtgtcttgtgggtacagttgtacacctctgatcagagtaaaactattcgaatagccgtgcccgcggttatgggcggtcaaccagattcaccgtgattagtctcactctagtgtaatcttttgaaattggatagtttaggtggatggttgggcctgtcgcaacgtgagttagcgttggacagtggatagttaatattaattaattattacaactgtttaatctttcaacttctttttataaatgctcgctttatgcaaatgaaccactttagctcttctttgatgattccgtgcatcatacccctattccggtatgacttgctgagtacagtgggtagtactcagtcttgctctccttttcccaaccccagagttcgagttcgggtcagatgaaggtttctccgaggagtaggctccgtccgtgccgtcgaggatgcctgtggagtggtgttccgctgcagttctagtcaaggcttagctcctgttgtctttcgtttttccgctgcatttatgtaagactttatgatgtttgtaagacgtggatctgaatgtcaacattgtcgtttgtgtaccccggctggtcctggacgggggttttaatgcacattctgcttgaaattctattcgggaatttctaggcgtgacaagttggtatcagagccgaccttgaccgtaggacaagccaaatggaaaaacctaagagccctctgaatccttttcattgcatatgttctttgcaattggatttattccgggaaaattgggatctgttcttgtggttcaagggaaaaatcttggtcgctcgtttaagtgagatttttcaaaacaagtcagtccagggttttagtaaaactgttgagatttattcgtcagtcagttgggatctgatgggtgaaatgcattaggtcatagcttaggaacatgggttgcaaggtatttatgcttttattgttattattagtatgtatctaatttctcattattttatcgttatgtgagtctgtcttatttattcgctctcatgcaaaatgatctatgcataaaaatttcgctcttattcgattcccttatttgagtttttattgctttatttaaatttggatttgagcatgcattgatcctactcctttgtcttctctagatgggcggccacccacccaaccaccgcggagaaggcatgatcgactttgtggcggagttggcacgtatgacactggtggtgggctaccccaacgcgccagagtacacgacgattccaccgctcagtggcgagcttcctcaccgtgttcgcctggaggtccacggctacgtgggtacctgcctagctaacatggtggttgaggcatctggaggcacagcagatcacgcctgtcaggaggcagcatacctgatcatggtcagagggta

SEQ ID NO: 22526 - DNA, 6502 bp, Oryza sativa
tatttatgcttttattgttattattagtatgtatctaatttctcattattttatcgttatgtgagtctgtcttatttattcgctctcatgcaaaatgatctatgcataaaaatttcgctcttattcgattcccttatttgagtttttattgctttatttaaatttggatttgagcatgcattgatcctactcctttgtcttctctagatggccggccacccacccaaccaccgcggagaaggcatgatcgactttgtggcggagttggcacgtatgacactggtggtgggctaccccaacgcgccagagtacacgacgattccaccgctcagtggcgagcttcctcaccgtgttcgcctggaggtccacggctacgtgggtacctgcctagctaacatggtggttgaggcatctggaggcacagcagatcacgcctgtcaggaggcagcatacctgatgatggtcagactacgggagcgccacaactacatcttccacgacacggcgtaccgatttcaccctcgtcgagccagtgatgatgatgtcagcaccttccgtccgacagccggcgagaacgacaccacctttggtcacatgtgtgctgtgatgaggggattggacaggatgcactcggacctgcacaaggcgaccaaggccttgaacgatgggaagctcatgaggatcgtcactctgaaggacgagatagcgcgcctgaagagggagaatgctcagttgaagggtcttcccgcgccaggaggagtccggatccgcactacgccccgcaagacgatgactgcacccgtgcgcatccagcttgcgcccaggaacccacctccatcagcagctcccgcagcacctccagttccgcccgcagttcctgcagctccagctccagctcccgcgtccgctctctccttcgctccagcatcagccgccaggggtccagccagtggcaccggaggttggttgtctgctactcccagtggcagccgcgatctcagcagcagcagctccagtggctcacagtcaggcagcggcgagacttatctgccaggctccgggagtcgctcagagagacctggtgatgagcaggaggacgccttcgactccaccgaccgcaggagccgttccgagcattaggctcgttttccattagtttatcgactgtctagcttctgcttgttagtttgtgtgtttaggctgcttgtttgggggtcagtcgacggtcgatatcatgtgcttatgatatggctgtcttaataaggatttttttttgcttgttttttttagtgttttaattcagattagaacaattgcagtttaaattcctttgtaataaagcttagtttctgagcatctgtttttcttcttttccccgtctgcttttccctccagatggtctacaccaggaatggtagccgcgcgacaggcgagggcagcaacggcgaagagcgcactgatggggcgcatccccacagcgattctggccatggtccgccgccacttcccaagaatccgacgctagcccaagtgatggcacatcagacacagatgatggcagccatgatgcagcagatgcagcagcagcaccagcagatgcaccagcggatgctgcagcacgccgaacagcagcaccagcagtttggtccccctccccctcagtccaagttgccagagtttctacgcgtcaggccacccaccttctccagcaccaccaaccctatggaggcgaatgactggctccatgtcatagagaagaagctgaatctcctgcagtgcaatgatcaggagaaggttgctttcgccacacaccagcttcaaggtcctgcgtcggcttggtgggacaatcacatggccacccgcccaccaggtactgaagtcacttgggcagagttctgccgtagcttcaggaaggcgcaggtgccagatggggtcgtggcataaaagaagagggaattccgggcgctccatcagggcaacaggactgtgacagagtacctccatgagttcaatcgcctcgcgcgatatgcaccagaggatgtccgcaccgacgccgagaagcaggaaaagttcatggcgggtctggatgacgagctgaccaaccaactgatatctggggactacgctgacttcgagaggctggttgacaaggcaatccgtcaggaggatcaacgcaacaagatggacaggaagaggaaggccgcacagttcagagcacctcagggaagtcaccagaggccgcgcttcgctcccgggcagcagggtggacctaccaccatgatcgttcatcagcaccgcccgttcaaccctagcaactttccccagggcgccagtggcagtcagaaccaccatggaggtcagtccaatcacggtgcagctccacgcccaccaatggcaccggcacagacaggcccgcccgcgcaatccaagaaggagactggagcaaaaccagggtcctgcttcaactgtggcgagcttggccacttcgctaacaaatgcccgaagcctaggcgtgccgggccaaggtttatccaggctcgtgtcaaccacgcatctgcggaggaggcacaagcagcaccagaggctgtactgggtacgtttcctgttaactcaatccctgcaacaatactttttgattctggtgcaacgcattcgttcatttcaaagaagtttgtcgggatgcatgggttaataagagaggaacttagcacaccaatgcgggttcataccccagggaatagctccacttcagttcaattcagcccttctataacaatagaaatccaaagatcaccatttctagccaacctcattcttctcgaatccaaagacctagatgtcattcatgggatggattggctgaccaagtttaagggggtcatcgattgtgcgaatcgcacagtcaccttgaccaacgagaagggagaaaccgtggtgtataaatcactagtctcaccaaagcgaggggtctctttgaatcagattgagacggaaattccagtggacactgtggagaagaatttggggaaattggaagatatacccatagtctgcgagtatccagaagtgttccccaaagaccttactaccatgccacccaagagagagattgaattccggattgacttggcaccggggaccgctccaatttacaagaggccgtacagaatggcggccaacgaattagcagaggtcaagaagcaggttgatgagcagctgcagaaagggtacattcgaccaagtacttcaccttggggtgctccggtcatttttgtggagaaaaaggataagacgaagaggatgtgcgttgattatcgcgcactcaacgaggtcacaatcaagaacaaatatcccttgccgtgaatcgacgatttatttgatgaactgaaaggagctaaagttttttctaagatagacctgcgatcaggctaccaccagttgagaatctgggaagaggatattccaaagacggagatcaggctatatgagtgcacggttatgtccttcggacttactaacgcacctgcattcttcatgaatctgatgaacaaagtgttcatggaatttctggacaagtttgttgtggtattcatcgacgacatacttatctattcaaagtccgaagaagaacatgagcaacatctccgtctggtactcgagaagttgaaggagcaccagctatacgccaagttcagcaagtgtgacttttggttgacggaagtcaaatttctgggccatgtcattacagctcagggtgtggcagttgatccatcgaacgtggagtcagtcaccaaatggaccccaccgaagaccgtgtcgcagattcgaagttttcttggacttgcaggttattaccgccgattcatcgaaaacttctccagaatcgcccgacccatgactcagttgcttaagaaagatgagaagtttaaatggacagctgagtgcgataagagttttgaggagctcaaaaagaaattagtatccgcaccagttttgattctgcctgaccagatgaaagacttccaagtctattgcgatgcatcccgtcacggacttggatgtgttctaatgcaagagggcagagtggttgcgtatgcctcgcggcagttacgtccacacgaagggaattatccaactcatgacctggaattggcagcagtggttcatgctttgaagatctggagacactatctgattggcaaccgctgcgaagtatatacggaccataagagtctgaaatacatcttcacccaaccggacctaaatctccgacaacgaagatggttggaactaatcaaagactatgacatgagtattcactaccacccgggtaaagccaatgtggtggcagacgctttaagccggaaaagttactgtactgccctgtgcatcgagggcatgtgtgaggaattgcggcaggaatttgagcatctcaacgtgggaattgttgaacacgggtttgtggccgctctggaggcgcggcctacgctcgtggatcaagtcagagctgctcaagtaaacgattctgaaatagcagagctaaaaaagaacatgagagtcggaaaagcccgggatttccacgaagatgaacatggcacaatctggttgggagaaagattgtgtgtgcctgacgacaaggaactgaaggatctgatactcaccgaggctcatcagacccagtactcgattcatccaggcagcactaaaatgtatcaagacctcaaagaaaagttttggtgggtcagcatgaggagagaaatagctgaattcgtcgcactctgtgatgtttgccaacgagtgaaggcagagcaccaaagaccagcaggtttactccaacctcttcaaatcccggaatggaaatgggaggagattggaatggactttataacaggactgccccggacatcatcgggtcacgattcgatctgggtagtcgtggatcgactcactaaggttgctcacttcataccagtacataccacatatacgggcaaaaggttggcggagctttacctttcgagaatcatgtgcctacatggagtacccaaaaagattgtatctgaccgagggagtcagttcacctcaaaattctggcagaagctgcaggaagaattggggacccgtttaaatttcagcacgggctatcacccgcaaactgatggtcagaccgagcgagtcaatcaaatcttggaagatatgttgagagcttgcgctcttgattttggtggagcttgggacaaaagcttgccatatgcggaattctcgtacaacaacagctaccaggccagtctacagatggcaccgtttgaagctttatacggccggaagtgccgcacacctctcttttgggatcagacaggcgagcgtcaactgttcggaacagaggtattagcggaagcagaagagaaagtcagaatcatcagggaaaggttgaggattgcccagtctcgacagaagagctacgcggataaccgccgaagggaactcacttttgaggcaggagattacgtgtatctttgtgtcactccgctccggggagtacaccgttttcagacaaaaggcaagttggcaccacgcttcgtgggaccatacaaaattttggaacgaaggggagaagttgcttatcagttagaacttccatccaatatgatcggcatccatgacgtgttccacgtgtcccaattaaagaagtgcttaagggtacctgaagaacaggctgattcggaacacattgatatccaggaggatctaacatacgtggagaagccggttcgcatacttgataccagtgaaaggaaaaccagaaacaaggtcacccgattttgccgagttcagtggagtcatcattcaaaagaggaagcaacctgggaaagggaagatgagttgaaagccgcccatccgcatctcttcaccagctcctccgaatctcggggccgagattccgtttaagggggtaggtttgtcacaccccgaagttctcctaccaagcctaaaatttagtttataaacgaccccaagaaaatgcaggtgcaatcaagagaaaaccctaagaaagtaatgcaaataataatcggagttgacatgtggaatttttcttgagttcttcatgtcgaaattcattaacaggatttttagtggaattttcagagctctagaaataatttttaaccaattaaaatggagcaagcaatatttttattctagggaaaatcctttttcttttttttctttttctttttcctccctttttcctccttttttcgaatgggccgccggcccattctctctttcctccccctcctccctgctgggccggccgcaggccgcaggccgaggcccagccaggccggccgcctccctcctctccccggggtcgccgacaggtggggcccacctgtcgggcccttccccaacctccggaccgccgcccacgtcgccacagccgccaaaaccgccgctctctctctctcttccccacctccaacctcccacgtcgccggcg

SEQ ID NO: 22527 - DNA, 2318 bp, Oryza sativa
ttctgttaaaaatgctcgctttaggcaaatgagccgctttagctcttctttgatgattccgtgcatcatacccctattccggtatgccttgctgagtacagtgggtagtactcagtcttgctctccttttcccaaccccagagttcaagttcgggtcagatgaaggtttctccgaggagtaggctccatccgtgccgtcaaggatgcctgtggagtggtgttccgctgcaattctagtcaaggcttagctcctgttgtctttcgtttttccgctgcatttatgtaagactttatgatgtttgtaagacgtggatctgaatgtcaacattgtcgtttgtgtaccccggctggtcctggacgggggttttaatgcacattctgcttgaaattctattcgggaatttctaggcgtgacagctagtcactacctttttaaacatggtgaagtcattggttgatggttcaatggctgagtatcaggctacaggaccggtatatttaccaggggatgttttcccaaattatcggcctctgatcacaaataatcagccgagtacttccagtgtaccaccagcagcaccagtatcagctcctgcacctgctgcaccatcatcggcgccaaaacaaattaccaatcctcgcaacatactggacaaaaggtcaatcggctgactcaggaacatgttgctgctatgtttttgccaaatcagcctactgtcgaaccagtacaacaattgccgattcagtagacgccaccaaggcagcagattgctcagccgattcaacagcaaggtttgctaaatgcatcggctaggttgaggacgcctgataatcagccaaggcagcatgttacaactcaagttgtccctgagcatttggttcataatgtgcaaccagatcaatcggtgatacctcaagttattcccgaacatttggtgcacacattcagccaaactttcagaattatcaagggggcaatttgaattaccaatatcagcctccatcgccacatgttcagtataagcaagggggatcagctcagccttagttcgctcctcggtacaatcaattcgagtctctaccacaacaagcacaaggggtgcctcagcagagaccatgggccgatttgattgcagatgtgatgagggagcaatttgggcttaagccaaaagacactggaaacttataacggcatccatatcctgaatgatttgagagggttcaattgcctaaccgatacaaagttccggattttttaaaattctcaggacaagacaacgtttctacctatgagcatgtcagccgatttttggctcagtgtggtgaagcatcggctgttgacgctctgagagttagattgtttcctttgtccttgtccgaatcggcatttacttggttttcttctctaccatacaatttgatcaacagttgggccgatttggagaaacagttccatagctatttttatagtggagttcatgagatgaaattgtctgatttaacagcgattagacaaaggcatgatgaacctgtgcaagattatattcagagattcagagagatgaggaataggtgctacagtttgagtttgactgactcccagttagccgatctggcttttcaaggtctgatagctccaatcaagcagaaattctcatcccaggagtttgatagtttgtcacatattgcacagaaggtaactctacatgagcagaggttttgcagaagccaagaaaaaattcaagaagatcaatcatgtctatccttacatatatggatccgatgatgataatgatgattccgaagtagcagcagccgagtgggtcagaagcaagaaggttataccatgccaatgggtaaaaagttctggaaaagaagagaggtatgactttgactttaccaaggctgataagatttttgacttgttacttcgggagaagcagattcaacttcctgctggtcatattatactatcggctgaggaacttggcaaaaggaggtattgcaagtggcataattatggttctcattctactaacgactgcaaagtttttagacagcaaatacaggtagccattgaagggggaaagattaaatttgatgactcaaagaagccgatgaaggtcgatggtaactctttcccggtcaatatggtacatagagccggtagaacagccgatggaagcaggagtaaaagtttttagatgaattcggctagaattattaacaagtatcagaggaaatatgacaagcagcaataggagaggtattatgaagaagacaatggcggttttgatcctcgttgggactgtgagttt

SEQ ID NO: 22528 - DNA, 663 bp, Oryza sativa
atatatataggacactcatatggggcaccatggtgcccgggcaccatggtgtgtaatgcacaaaattactcaaatttttcaaaattttcaaattgtgagtatatacctagttataataatttgattcatacctatacttatcaacaaaacaactcaaatttaactttatttcacaatccatgattacatacctaactaattatatgtatggatgctatatacctagaattaaaatctaacaaaaacaagttcaaattcagttcaaacttgctttaaactagttagtaaagtagttaatgttaatacctaagtaattgaaaaagtttcatactcatttgaattgggtatatactcaatttcaacaatggtgcccgggcaccatggagcaccaaacaaatttactatatatatatatatatatatatatatatatatatagatgcacacaacaaaaaaaaagtgattggtggacagaaaaataggtgattgacgaagaaaaaatagttgacgatcgataagttataatttttaagtagctataatataagatttgcatgcagaagttgcattacagagacataagagaaaatcagagagttctagcccatcacttccattgctgcagaattaatcgtcacaactatggatagggcagtcaaaata

SEQ ID NO: 22529 - DNA, 544 bp, Oryza sativa
atccttatttgtaccgaattagcaccaagtaagataatgttcttcagatacagaagctggtgatcattccttccattgattttcatattttgcgagtgcagtgaagcttgggatcggcggtttcagcatgggtgcagctgctgccctccactccgcagcgtgctacgctcacggcaaattcgcgaatagcatgccatatccaatcacactcagtgcggtcatcagcttgagtggctggctcccttgctccaggtgccactttgatatccaataatgcagaaatattaatccaaacacgttgtctctactttttcatgactccaatgtttgttctaagaccctgaggagcaagacggagagctcacacatggctgcaagaagagcttcctccttgcctatcttactaagtcatggaagaggtaacacattaagctgttgatccatgaaaagccttccctccagaaacagtataatttactagttaattattactcctagtcaatgcatcagtctgttctaaattctgtatgttcttgcaggggat

SEQ ID NO: 22530 - DNA, 1469 bp, Oryza sativa
ttttcgtactaatcagattgatcaactgtgtttatgcattggtctgttgtcagtcgaaacgatcgcctccaagcgcagccacgcaccgagacagcccgtcaggtgacgcgcgtgcaggtcgcacttccacgcgagcagcagccctgctggtcgtccgtactggagcgggagcccgcaaggcgccgacacatgcgcatgcacaagcagtgcagattgaaaccagctgatgaaccaagaaatttcttcgtgcaagcatccgtgtgtgatccaatctacgtccacgcaaggatcgatcaacatgtatgatgcatgtaccaatcgatattcaccaacacccatcggattcttcaacaatcggacatcatcacgctgatacgctatgcgttggcatccgcggatcggcgaactttacatcggataaatgagatgagtgtcggtttcatcaattctaatactttgcaatagcgagagtaatatgctagatcatgcctctagttgttttattttctcgcatgaatagatgtatttgtccggcctttgcgccgactcttctcttgttatatcgccgaccacaaagtttggcaccacgcgcccgaacgcgcttaccgtgcacacaagaaggtgcacatacataatccgttgaattgaacgatggagtgctatcccaaacgacgtcaccccatactcggtaacacacgacaccacccagaagttgtcgtctatctagctaatatagtcgttgatctatgaatatattaacacacttgtcatcaccgatcttatggatcagcgcgcttgggacactgttgattgtgacttgtatgttaatccgtcatattgctatctgtatgaagtagatggtaacaaatccgagtcatcggcacctgcatgcgccgccgctgccgcctgcacgtagcgacaccttgacgccaccgcatgacgtcttcccctttgtcaatggttgccgaatcaatccagagactttccctcgtcaatccgccatctgaaacgccgactcgacggcctttcgagaccatctgcaacgcaattgacggccttcgcccgtagcgacgccgaggagcttacgcccgcctcccctcgccgccagtatgcacggcatgcctcccgcactaccgcacgcggccgggacgagggtcgaagccgccgtgagcgcccgtcgccgatagccgtccgccataccagcctgtatgccgagccgagtttcgtcgacacgtaacatggagctatgattgtcggatgccggtcacggcttgatgccaacgaatgccggtgtcggtgctactagatgttgcaccgccgttccgcctctgagcatggcaacttgctatagtcgtccatctctactaagggctcactagcacgtttgccattggttccatccgtcgtctccattgaagaatggcaattggatcatacctcacccacttcttgtgggagaaggtcgtaat

SEQ ID NO: 22531 - DNA, 36758 bp, Oryza sativa
aatcttgcattcgttcttttgagataatattttacaatacacgagttacattatagtttagattaagttcaacatgaagaacatggttaagctcatgtagagcatctttatcttttgctttaggcatagaagcttctgcattagattactgaattttttttttatataggtcatctcaccttacctatattgcctttttttacctatagtaattctttaaccttttgtggaataaaattgtgaattgtatgtctaaaattgaatgtaaatatttgtcttgcctattatttgaagtatttttggcgaatgtattcttattatccactaagcctcaatcaaccaagtaggttgatagttctaagtgcattgacgccatattggcatacatgtaaagttgtttacttatacacatgaacaattagaatatttatggttaagcattgaagcttaaatatatccacccgcaaccacattatttcttttagaaaagtcgtaccatgaagttacaacaaatatgtgggtttcacgacaactattttgtaggttttcttacgattggcgtgaaaagggggaggaatatgtgtatttttgcaatttatttcagaatatttgtgataaagaagcataagaaattgtggatatgtggcaggcaaattggtgtgttataggtcaaatgctagaagcaaaaatagcccaaactattagcgaatcttatttgggataattatgaattattgttacacaatgaagtgtgttatttattggccattgaaaattgcatattcatcaaggaagtatgaaattgcatatagctatttgaaagctattggtttacttgtagtatacaatatcctaaataattaatgaccttttggattcgaatgattctgaatgatcaaatgacaccacatttactttggcataatgaataaaagttagacatatcacccaattaatttattggcatattcaagaagaataaatattctcgtaggataaatgtttgggtgatttgaaaagttccatgatggttaaactatgttcatagatcaatattttagagttatagttatgttcttgaagacatcataaagttatataatactaacacatccatcttatgatcatatctatgttgcataaatataaacatgaagtttattgatccaacttaattcaagaattgaatatagtatcagtaattggatcaagtcttgggcaaataaaaagagctagaaaatagagtaattttgtcgactagtggatatttgtttgggcttcattgtcgcagaataataaccctctatgaattgggataacctacagtattagggatgtgcaatttttcatgccattgcattaatttttatgttagctcactgcatataatatatttaccccctttattttatataagtgcgtgttcaatgaatgaacatttccttcatatatcaccaccatagcatacatatatgggcctccacatgaagttggggatacaaatagaccgaattccattaatccagtgcctatgataggggatttttgtgatatgctattagataaagatcaaatatcggcatcagggggagaaaagcccatgtgttaaagatgccttatattttcaagaagaaaaagatctttataagtaagaataacgcacaagccaaactaaactagaaggtttagtttattctcctataagccagaagcgggagcttgccagataattatgaattaaaggagtaatcaaaagttatgtttacttgtagtaaactttctgctaacagtggtataccctgggttttgaatagtatatccacaaatgcagagtgacatgttagtcaatgttctaaaatctacggggacgcctgcggattctaagatctaatgactattgtcaatgtacccattaataactccttacaactcttgtagagtaatcaccatgaaaaggtgaattgcttcatgaagagattcatcatgaagatgaaaacccagaattaaagcgcgcacatctatctaattctgggatgcggaacaaccatacatcttatgtttgggaaatgactaagatatggtttataataaattaacctcacgaaatgagtatgtggagaaaagaatagttgtcgacaacatcgcctttatgattgctaatatttctctaataagaatccggatccggaaccaaagtccatggcagagttgcatagtagcactcatatcaggtctattgaagaaagcaatgaggttgaaccatagtcgctaaataagtctatgtgaacatggaagttcagaattaataggaaatgaagtggtgaaaagcgacggtttatttggtcatgggaaagactgatattcttctactataaatgtattaaattcggctatatatatcactggtaaaaggcatgaatgaataaatgatatgcagtttatgggttatgaaaatccatatgaagttttcgctagaaagaaaacaatttcgcaacatatatgtaaatctcatactaattagtgtcatgaagcacactatattatcatgaagagaattgcaagactcgtagaagagtttatgatgactcacaaagagtttttctcctagaagtgagaatatttctcatagcagagaaattgacttccggaagaacaagttgatccttgtaggactacgctaatgtatgaatcaccggttaatctccacataacaccaataactcttactcccatgaagtggacagacccgttcaaacgaataaatttgaaaatcacatccactagcatgcaagtggatcggtagttttctacatactatgaaggtgtaagattttatatatcatgaagatatacttatcaatggtatttggcaatcttattaattcccctaatgccaaaatatagaccggtttatgtcactctaagtggtttaagctaattgttgaagattagtgaaacaatcaaattggtaattattgataaatccactaagagaaagttgcataatatttaatctcttgtattgagctaattattttatacataccgcatatgtgtatcgttgcaacttattttcccatagtcctccgtaaggataaaactttgtttgtattgcacatttgaataagtggttatacatattgctcctatacgttgatttatttctcatgttcatagtagaacttatgaaataagtaaacgaaagattaaacattgtggtaattttattttcattattttacacattaataaaaatgtggttatgatattggaacatggaagtttcaacggatctcttcttgagggggagcatatatgctaaacattgattatcatacttaagacttggaagtcttatttttgatttaccaagaattaatcaaattaatcattgttttgataatttaccttgaaggttactaccgctatattgttgtgttaatccaagttgattaatataataatgcatatagatcattagctatttatgaagaatagtcgatcttaaagattatgcgatcaagaagatcatgtgttgtactctttttcccttagtgagtttttacttgaatatttctcacgcaaggtgcaacaagtgcaatataactagcgtgtacgatgtactcctttctcctatccttttctcccactaggtttttggatggagtttttaatgagacatgtgtatagcgcggtattcgtccaagggggagtgttatgaaactattatctcctgccagagataaatatgggctcataccaaatatatggatacgtatcctaataggactcttcctattatgggtatatataccgatagagaggtagagagatatgaatgtatccacatatgagaaagtaataaagctgtgatgcctctccctatatccgtgttcattgtttatctattatgtgcttgtatgagagatcgtcgtcgtctactccggatcagcaaataggccactagttattcaatagaaacaatgaaaacaggttgacagtgatttctctctagaatcttgtcgcccatctcggctaatcttctggttgtaatattctcactacacccttcacagatctactgccatctggaacatgatcatctcttccgttatcttgttgattaccctgcttttgaaaaccaatcgatctgtttccctctttccaaatatcccacaacacaaagatgaattagatcggataccttttctttgtgttgctcatccggcccattcgactgtccgcactagtttcaattagtgatctgttccctgatacagcggctgaaagaaaattctgcccaattcttttgccaaatccctgctccaactgctagcgagtatgagaaatctttcaaaaggtgttgcatcgtccccatgttccaaaacataaatatcaaacacaatagttcttgttcggtcatcctcgactttgtagtcactctgaaatccatagccgattgtagtacagcagccaagcaaagaatctttggttagattgtcctaggtttcccaaacggtttatcattttccttggactaaatgccatattacacaagggtggggtttgtagtatctaactctaaggtgcttagccagcttctatcactatgaactggcgttgatacatgttgcggcttaaaaaccagtgctaattataaatattagtgccaatacgttcttagttataactggcactaatggacaagactacatcatgccagataaaaaactacaaaatggtcttagctacttattttattgtatctacctcatatagaaggagtaataatcgtggttttgctttcatacaaaacggtcttagctacctaatttaatacatccgcctcatatagatgaagtagtaatcgtggttttgcttgcataaataatggtttagacaattgcaggcttgtagctgactcttgaagctcaatcctgtcaccacctggtggtatgctccaactgaacccctgcagaagccttgcaaatagcatcattgtaattgatgttccgagtgacacggcaggacagccacgcctaccagcactgaacgatacaaaacgtaactctggctcagctagcaccacagtaccagtatttttcagatgtcgctctggttggaattcgagtggtttatcccatgctctagggtttcgaccgagcccaattcggcttaacatgacatggctaccctttgggatcatgtatcccgcgacggtggtgtctgcgatcgcgacatggggtgggttgaatgggtggtaggggtggaggcggaacgcctcccggatacatgccttgaggtatgtgaggttgtgaatgtcggattcctcaacaagcctttctctaccaacaaccatatcgagttcatccactgctttcttcatgacctttggattgttcaccatctctgccagtgcccactctacagcatttgatgggttgtccacggtagcaaggattatttcctgcggccataagatcaaattaaaacagtgttggattttcatccttcaaggggcaacctctaatatgcctttaactctttatacaatcaaaattttcatgagaacttttggaaaattgacaacaatattaagtatgtactgacatctactgaggtcacaacagtcaaatctagactggacaaatatatagaaaacagaagaaatccagagatgaacactacaatgttaatgttcatatatagttttgatctgtcccttttgtttcttgatgcgtgggttgagtttagaatgagataatagatatgcattatactagacttacaattcttttcaaacattttcatagctatttttcaaaaagaaaccatagatattttgcacgttcactatcaaatcatcgtaacggttaattttaacttcaaaatgaatgaaacccaccatagtatatctttacctataacgaaccaaaggcctcactaattatttctaaaatataatcgatcacttctagcattagaaatttggaccaaaacataagtacttcaagcatactatttttcttccgaggacatatctatatagtccaagtttgaaaaaaaaattaatagagcttattaccagcgtttctgccttgatctcatctactgacaaaaacggtttcccttgtgcatcctccaaggagatcaacacgtccagaatttagaataaatgttatattttttaataatgtttttgtaatttagaagctatatactcccttcgtcaaaaaaagacaaaccctaggttttcgtgtttaacgtttgaccgtccgtcttatttaaaaaaacttacaaaaaaaattaaaaagacaagtcacatataaagtattaattatattttatcatctaccaacaattaaacgttggatacggaaacccagggtttatctttttttttttttgacggggggagtagtcgttacatttggaatagtaccattcaatactctcaaaatgataggaaagaatactaattactctagttcggtaatactagcaaagtgcccgtcgtctcgccggccgccaacctggcgagcacgctggcatgaaccagctcgtcgttggtgccactgatctgctcccactccccctgacatccgcgcttctccccaatggcagcccgatgaggagcggaaggaggaagatgggccggtaccgatctgatggacgggaaagggaaggaagacaagaaatataagggtctctgaccggaaatgctaaggggcgatcgatcgcccctagagcgctctccacctggtttcctttttttaccgcattactttcctattttagtaaatttatgcacctaaagtttgtacatcttaattttacacatctaaagtctagagatccaaagtttataaataaaaagtttatatatctgatttaaatttgaatttgaattcaaatgttttttatatatagtatttctatacatctaaaatttatacacctaaagtttatagatccaaagtttataggtcaaaagtttacatatccgattcaaatttgaatttgaattcaaatattagtttatagacccaaagtttataagtcaaaagtttacatacctgttttaaatttaaatttcaattcagatttattatatatagtatttccatacataagttttttcaactttgtgttttttattttttaaaaatttatggtgtagtaggaagagaagaaggggagaggaaggaagagtagtgtattggggggatggggggtgattgcctggggcgatcacccgcccattaggcggccccatcactgacagctgggcaccataggatgactcagcaaattagaccaagtcaaagcaccacatcagctaaactgctgagggagacaaattacatcggttttaaagtgaactcattccatagaaaaaaagacctgccggagtgaatttggcccaatcggcccaacaagctaaaccaacccaattaactaaccctaaaactccggctctctctcccactacaaatcgcacgccgcctctctcccactacgcatcatgcgtcattttccctgcaccacatcgctcctctctcccactccgcatcacgcgctgtcgtttttccctgctccacatagcacttcctctttcgctctccgtagcggaccgtgcgtcggcatcgctgctgccgccaccgccaccttttctgccacggttcttacacctcctcctctatccgtacatcgttgttgacgcaagaaacacacactgccctgggaaatctgcttagctccagtgcaggtccaaaggttgacgagatgcgggtgtgccagtcaatttaatcctgcaactgacaagataagcaaatagcagatcaatgagccgatcagctgacaagccgatgtagtaattccagccgatagccgataccagccgatagcgattgggttttgaacaatcggttatatgtccaatgtagataatgatataaaggatgacaaataataataatataatccagtataaaccaatcggctaacaatatgaatagaacaagtattgatatgaaggttaaagcatacatcagctggaggtacgatgtcataaaatccataagattagatagatcaatgaaacctttattgtcatcggctagacccaacttatatattatgcaatccttataagcggatgcaatgtccataaaacatatcgactagcaccccgataaaacactagtatgaacctatcggctcatcaagatttatattatcaacaacaatctagtaggtcggacctaaccgatgtagcacgagattatatatgacaatctaatactcaatgagccgatagatctgtctaatgtgatggatataacaaatctatttgtaacaacattgtgattgtagagatatatcggctaagacagaagattggacctaaccgagatagtcccaactaaaccaatgcgtctctaaacacaatgcaactagagatagaattgagacattaggtaggcaaatatatcaaccaaactagagcgatccaagagatcgaagtgatgcagccttgaacaacaccaatatagccaacagattcaccagggccggcggaacgcagggcttaccccttcgccggaaattgaactgaaccgatccagccccacgttaggtgctagattctgccggttgataagtaaaaacctcggaaaagagggtggcgatgcgccaacagtagtattattgatcgagagatgttttacaatgacctcgggtgtacatatttatacccatgggaagatactagtccttgtaggacaaaaaagaaacttccctaaaagataaaaggaaaacataaagtccttataggacactaaacacactttcctaaagataaaaggaaactaacaaactattcctaattaatagataacttgccatgccacatcctccttgaactcggtcacttctagataagctttctttaatagattaatttccttaaccgaatatagcaggaatccgactattggcgttgcgataattctcttaggggcttaccaaatttccccgctaacacatgccccccaattttagagtatgagaactcatacttgaaaattatcttatgtctgatcttggtaactctaaaattgatcttcctttgcttcttgtaatcggctttcatgagccgatactgtttgcattagatgagccagattgtcaaactcgtggcaaaagaatatatctatgataggtgctgacaatccctggaatgcaagatctgctagttgctcatcacttaggtgcaaaccataacatcgactgcggatattacgaaatctcttaatattttctatagccgattctcctgcttgttgctgaactgatatcaaatctgaaagcttcatctcatcgacgccagcaaagaagtagtcatgaaatttcttctaaagatcagcccatcctatgatagaatgtgatggtagagatgaaaaccatgtgaaagccgatccagccaaagacaatggaacaaatctaacttttagagcttcttcagccgatacctccccacattatgctaagaatcggctaatgtgttccattgtagatgtatcatcctaccctgaaaacttggagaaatctggaaccttgtatcgatgtggcaatgaaaccctatcaaaccactcaggatatggtagccgatacacagaagtatgttccttaggtttgattccaaaccactcctctattatctttgcaattctatcggccaaatcttctccataccgatgtatttgaattccctctgaccgatattgttgatatgcctcatcatgtcgatactgatatgtttaccccccgagccaatattgttattgttctgcaatctgccccccaagctgacgtctttgaacaattaactcatcaactgtcaatttgatcaaattttgcaatgtatccgccaaaacttctgattgataaaatactagtatgaacctatcggctcatcaagatttatattatcagcaacaatctagtaggtcggacctaaccgatgcagcatgagattatatatgatgatctaatactcaatgagccgatagatatgtataatgtgatggatataacaggtctatttataacaacattgtgattgtagagatatatcggctaagacagaagatcggacctaaccgagacagtccccactaaaccgatgcgtctttaaacacaatgcaactacatatagaattgagatatcaggtaggcaaatatatcaaccaaaccagagcgatccacgagatcgaagcgatgcagccttgaacaacaccaatgtagccaatagatttactagggctggtggaacgtagggcttaccccttcaccggagatcaaactgtaccgatgcagccccgcaccacgtgccagattccgccggttgataagtaaaaacctcagaaaagagggtggcgatgtgccaatagtagtattattgatcgagagatgttttacagtgaccccgggtgtacatatttatacccatgaggagattctagtccttgtaggacaagaaagaaacttccctaaaagataaaaagaaaacataaagtccttatagtacactaaacacactttcctaaagataaaaggaaactaacaaactattcctaattaatagataacttgtcatgccgtattcttcttgtactcggtcacttctggataagctttttttaatagattaatttccttttccgaatatagcaggaatccgactattggcgttgtgataattctcttaggggcttaccagccgttttggtcaaatccaagcagcgtgcggtggggaggtggaccgagtgcatcgggtttcatctgagccaccgatggtcgtctgctcctccctgttgccccctcacgccggccaatactcggtgactcaaggtgagggtatggactatgagcagcaggaccgttgatgatttcaccgatttttatttcttcatttttctttttcaagtattatcggtcggtttagttccgatgcatgttagatttctgattgctcaatgggtttcttaatcgatgtttgatgttgtgatttgtcctccttatgcgattaggattttatatggatctctgattttttttttctttggccaccgaacgcgattacatgcttgcggagatggaacacgccgcttggtcggacttatggaaaaaaaaaattgtaacgatcagaaagttactgatttttcaattaattaagattaagatttggaaccttttcaacagaaaactattttgcctttttttgaaattttcatcttttttagtttagaacaatttatttaaatgtgatcaaattttgttcaacattaaaaattttattttggaccaaaattactacaattttcgaattttctgtcctatcagcgcagccaatagctatacacaaaccgatatatattaatcactgggcatgatgatgaagaggaagacgaagatgataccaacatgagagatacggaagttaatgaaatagtagaagatgcaaacacaatattctctaatgagaaaataaataaaacaatacagaagaaatctctaatagaataaaataaatatataccaaataaaaaatacgtaagggttctggtaaaatttagatgtcaaaatttagaggttagatgatacgtatagtaataaaagatagcaatcaaattgaactatattttgatggccgtattcatggtttcatcttgaacagtgatgaataaattccttctagaatactgaaataatagagattcgagaccatgtaccaagtccaaacctgtccttccaagaggacctaattattcctctgctgccagactgatagtacctaatttaattactcctccatgcacggtcaagagaaagacgtatacatctgaattcgattgatgatagatcccagcttttctacccccagatcaaactggtgacctccaatcactaccatctttgatcggtctgacaaaatccacaatagtctcggttccaaaaagaaccgagactaaagattgtttttagtcccagttataaaaattttgatctctagtcccggttcatcccctgtcagatgcatgtcagggggccgaggatctttagtcccggttggtgtcaataaccggcactaaaatcaccactttagtcacggttggtaataaagatcatctagatctttagtcccggttggtattatcaaccgggactaaaattgaacacgtagtatataatacctatcccttatcctcttctccacagttacaacttagcggatcgaatctctccccctctcctcagatctctcctctctaactctcttcgtcatcccctctcctccacctccccttactcctctcctccccctcctcccctaacggctgccccctcctccccttcacattcagcgggccggcaggcgtcaatgccgcgtgcggcagcgtgacgaaggcaggcaaggccgcgcccggcggagggcaacgggacctcggcaggcggcgggcggcggggccacggccgccggtcgtggtgagcggcggcaacggcattgttttttctttttttttaatttgtgattcactgagatgtacaaatttgtgattcattgtttggatctgtgatgtatttgagtaattttttaggattttgtgatgtatttgatttgtgtgtataagtaactttatgatttgtgatgtggatttggtgatgtgaatttgggatgttactttgatttagggatttgaggatttgcctacttgattcgggagaaaataaaaagaaaaaaaagaaaaagaaaaggggaccatctggtaacatcaaccgggactaaagagagaggatctttagtcccggttagtagtaccaaccaggactaaagatgcatctttagtcccggttatttcaaccgggactaaagatggacatctttagtcccggatcgttacttccggttggaaaaccggactaaagaggattcccaaccgggagtaaagatggtttctctaccagtgaatgctttcataccaatcaaccaatcagaacaatctgaccttagcttctatctcaattcgaggggacgcctctcaaccatacacagatgcatgtactccctccatccacaaaagttacacctattagagcaagtataatagtgagctataagcctactatatgcttttgtggagaagagaggtaacaaaaacttaagggggttggttctcatgcaagagctatcttaacacaatctccgagataaatacattaaatttataagtgagagatagagagaggaaaagaaaattgtagccaaccatatagctaatctattatatgtgttggttttaagattggctaatagtaggaagtaagctatactattatgcttgctcttacatttgtcaccaagacaaaaaaaaaataaatcatcttgtatgttataaaatcaaggagtgaatgcaatcatgcaaccaaaaagtatttagatgactccttgggttctaatcaaacatttaatttatctcctaatttaaatcttgaatgcataaagactataaatagaaacaacttatttgtaaaaactaaaatgtgaaatatgtctatcttttatatggatggaggaagtattgttttcgttagtctatctgtctggcttcttctttctataaacttaattacttcttcatatttctggcttcttctttctgtaaacttaattacttcttcctctgggacaccatcttctgccggctagatgccacacaaataaagtacaattcatcgaatattgactccaggatctgctgtcagctgttgcatggatgcattcaacaacacaaatgcacaatccatcgaagttaattccagggttctagtttctctaacctttgccgtccatatatacagcttcagatcatgctgttttagcttccaggattttgttaatggcgaaggatgtcgtcatggccacttctcgggtcaggacagagataaattagtgagatgatatttacgaatatagatcagaaacttgcatgatgagataggtatatggttatgtattgtttagatgggctctagatggggtttaaaattggatagagatagaccgctttaaaggtgttatgttcgatttgatttatgaccaacggtgaagattatcctatctatttaatcaaaggacacattttcctacttaacgtgggactcgtagaaagtgacctagtatagctattcatatagatggtatatattgggaggtatgtctctactcaacatttaaatactaaatcacctatccgtgttgaaacactaaaatagtaaatacgggagacgttgtattcaatgttagataacaaaatattgctttcaggttacaataagggaaattcatgatatttatattttcatcatagaggattttttcttgttccctcccatttggtaaatattgtaactcaaacaatagaaaaatagagattgaccataccacaaaacaatacatatgtgcatgtaaatcatcggaattcatgtatcaatagtaggggcaacaaccatggatggatcttactagctgcaaacataatttcttttgtggttcaacatctcgacgtctaaaatttacaggtcagatgataggcagagatatctagatgtaaaaaaatttatatacagtaataaaaagtagcaatcaaattaaactatacttttgtgtccatattcatcatttcatctcgaacaatatgaataaattcctttattgtaataaaataatggagactcgagactttgtccaaagtccaaacctgtccttccaagagttcattattattactatgttgccagccttatagtacctaatttaattactcctccatacaggggcaagaaaaagacgtgcctcttaattcgatggatggtacatccattcatcccagcttttctgcccccagtttgaactgtcgacctacaatgcttttatacgaatcagccattcacggagatcaatctgaccttagcttctacctctacttaactggacgtctctcgaccatacaaagatgcatgcataattttcgttaacctatgtgcctggcttcctctttccatgaaaataaattatttcttcctctgcgacaccatctgctaccgcctagatgccgcacaagtacagtacaattcaccgaatgttgactccaggatctggcataacccatcgtccagatgcattcaacaacacaaataaaaaattagtcgaaggttaattccagggttccagttcctctaacctttgacgtccgtatatacagctgcagatcatgttgtttttgcttctgcggttttgtcaatggtgagggagttcgacatggccatatcttgagtcgagacggggataaattagcaagatgatgtttacgaataaaaatcaaaagcttcaacatgagatacatatacggttatgtaatggttatatgggcattaaaattggatgaagatagatcgctttaaaggtgtgatgtgcgatttgattatatgaccgacgttatgattgtcctaactatttgatcaaagggcatattttcctagttaacataggagctcgtagaaagtgtccaattagtatttgtatagatataaaaggtatatatttggaggtttctctttactcgacatttaaatgttaaatcacctatcagtgttgaaagactaaaatagtagatacgggacatcattttatggagatcgttttattcagtgttaaataacaaaaaattgttttcatgttacaataaggggaattcatgatatttatattttcatcatagaggattagtggttcacgttcaattttgttctttcctcccatttggtaaatattgtaactcaaacaatagaaaaacagagattgaccacaccacaaacaatataaatcatcggaattcatgtatcaatagtaggggcaacaaccatggatggatctccctagctgcaaacatcagttcttttgtggttcaacatctcgacatctaaaatttacaagtcagatgataggcagagatatctagatgtcaaaaaatttataaacagtaataaaaaatagcaatcaaattaaactatacttttatggccatatatattcatcgtttcatctcaaaatataatgaataaattccttctattgtaataaaatagtggagattcgagactttgtccaaagtccaaacttgtccttccaagagttcattattattactatgttgccagccttatagtacctaatttaattactcctccatacaggggcaagaaaaagacatacctcataattcgatggatggtacatccatgcatcccaacttttctgctcccagtttaaactgccgacctccaatgctttcatacgaatcagccaatcatggagatcaatctgaccttagcttctatctctactcaacgggacgtctctcgaccatacaaagatgcatgcatagttttcgttaatctatgttcatggcttcctctttccattaaaattaattatttctttctctgcgacaccttccgctaccgcctagataccgcacaagtatacaattcatcgaatgttgactccagtatctgccataagccgtcgcctagatgcattcaacaacacaaatccacaattcgtcgaaggttaattccagggttctagtacctctaacctttgccgtccatatatacagctacagatcatgttgtttttggttctgcggttttgtcgatggcgagcgagttcgacatgtccacatcttgagagtcgagacggagataaattagcaggatgatatttacgaatataaatcagaagcttgcatcatgagatacgtatatggttatgtaatggttagatgggctctagatgggctttaaaattgtatgaagatagatcgttttaaaggtgtgatgtgtgatttgattttatgaccaacgtgatgtttctcctaactatttgatcaaagaacatattttcctagttaacgtgggagcttgtagaaagtgtccaattagtattgatatagatataaaagatatatatattgggaggtatctctctactcgacatttaagtgttaaatcacctatctgtgttgaaagactagaatattagatatgggacatcgttttattcagtgttaattaacaaaaaattgttttcaggttacaataagggtgttgatgcgaaaaacacacactgacctggtagatttgcttaactcctgtgcaggtcctaaatcttgctcttgggttcaaaggtgtgccagttgatttgatcctgcaatcaacaagaaagaaaggcaagaaaaccgtggttaaatccataaacgatagtcgatcggctgatgccgatgacgtatcgttcaaactatgggccgatgttattagcaatagatcagcaatgaagaataaagcaatataaaactaaatctactcgatcagctgtagatattaacaatatataatccttttctcgatctatatctggactaagtgattgggatagatcgaatagcacgtcgagacagtataaatcacatagatccaaagatacattaagatacgattatatgaacgtttatagcatagccaatcagatagatctagcatgtatcggctaatactccaataccactctatattaagatattaaaacagacaaaatatatcaaacagaaagcctaatatattctaatgcaataagatcttaatataaagggcagatttagcatgacaattaagcatataaagtacaaaatagctaaatcaggtaagatcggctgaaactccgacactatcctcgttagagatcataaaacatgcacatgccagatattgcaattatgaatattacttaatagatcgaactcaaccgatgcagcattaagcataaaaacaagtgcaaaatctaagcaagatagtgataacttcagaaagatggtagatatgcgatataatctagattaataacaagatctaactttatcggctactctttatcaggaaaaactagccgattgcgagttagataacgcaactaacaaagattatgaagcatatatgataactcgacaaattacataaacaagattagtgtatcttaatgatggaagcactaatcccgacaacgcaagctgccatgacaagtttacctcttgttgaagatcgaaatcgatgcagctcaacccgagagcaagaactcgtcgaaaacaaacgaaagtaaaaccgggtggtgatgcgtcgagagttttattgaactgttgttgtcaattacatgggttcgggttataattataccctagatacatgataggtccttgccggacacgactcttatctctaacaaactctaagatacacataagtctttacagtagacttttgcccaatcatatctctaagaaaaccacttgaaatatcctaattaatagatacaattgcctatctgagagcttatctccatcgtggcaatcctttcgtagcacgttgatcgattgcagaaacggttttataaccatctcaataaaatcggttgtatcggctgtcctctgtccaatccatctcagccgatgtagacttcagctaatgctttgccgaatccacttcgattccaatgctgaacctggttcataatttaccaaatttggttgttaacaaaggggaattcatgatatttatattttcatcaaagaggattagaggctcacgctcagttttgttctttcctcccatttgataaatattgtaactcaaacaatagaaaaacagagattgaccacaccacaaacaatataaatcaacggaattcatgtatcaatagtaggggcaacaaccatggatggatcttcctagctgcaaacataatttcctctgtggttcaacatctcgacatctaaaatgtacaagtcagattataggcagagatatctagatgtcaaaaaaaattatatatagtaataaaaaatagcaatcaaattgaactatactttgatgttcgtattcatcgtttcatctcgaacaataatgaataaattctttctattgtaataaaataatgaaggttcgagactttgtccgaagtccaaacctgtccttccaagagttcactaatattacaatgttacctgccttatagtacctaatttaattactcctccatgcatgggtaagaaaaagacgtatatcttaattcgatggatggtacatccatgcatcccagcttttctgcccccagtttaaactgccgacctccaatgctttcatacgaatcagctaatcatggagatcaatctgaccttagcttctatctctactcaacaggacgtctctcgaccatacaaagatgcatgcataattttcattaatctttgtgtttggcttcctctttccattaaaattaattatttcttccactgcgacactatcttctaccgcctagatgctgcacaagtatagtacaattcatcgaatgttaactccatgacctgtcataagccgtcgcctagatgtatgcaacaacacaaatgcacaattcatcgaaggtgaattccagggttctagatttttctaacctttgccgtttgtatatacacctacagatcgtgttgtttttccttccagggttttgtcaatggcgagggatttcgacatgggcacatctcgagtccggacagagataaattagcaagatgatgtttacgaatataggtcaaaatcttgcatcatgagatacgtatacggttatataatggttagatgttctctagacgggctttaaaattggatggagatagatcgatttaaagttgtgatgtgggatttgatttttgaccaacggtgaagattatcctattgatttgatcgaaggtcatatttttctagttaacgtaggagctcgtagaaagtgcccaattggtataggtaaggatataaaaggtatatattgagcggtatctctctacacgacttttaaattataagtcacctatctgtgttgaaagactaaaatagtagaaatgcgagatcgttgtattcaatgttaaataacaaaatattgttttcaatatagagattgaccatactacaaacaatacatatgtgcatataaattgacggaatacatgtatcagtagtagcagcaacaaccatggatggatcttcctagctgcaaacatagtttcttctatggatcaacatttcgacatctaaaatttagaggtcagatgataggcagagaaatctagatttcaaaaaattaaatatgttaataaaaaatagcaatcaaattaaaatgtacgttgatggttgtattcattgttttatatcatacaatgatgaataaattcctcaaactggcgacctccaatgctttcatactgtcacacccagaaattcactaacccaaatttcaagcagaatgtgtattaaaatctctgtccaggactagccagagtacacagacgataattgaaaaaatagatctacatcttacaaaaataataaaataattcttacaaatgcagcagaaaaataaataaactagacttaatcttcacgaccaaaagcatagcttcctccataaaccacaggcatcctcaacgttcagaacaaactcaatcctcatagaactcaccatctaaaccaatctctgcctcttgtggggaggaataaagcaagactgagtaccaatcatcgtactcaacaagtcatactaacgggaaggtatgatgcaagaatggcttattggatatttgcaataaaagtagcatttataaatcatattttgaataagtaaaataatatatgtaattatgcaatattaaatcattactttccaacgctaaaaccatgttacaacagatccaaccaaaccacctgaattacaccagttcaataagtcatattattacagtgaaactaatcacggtgagctggttgaccgcccaataaccgtgggcacggcaattcgaatagttttaactccgataagaggtgtacaactttacccacatgacatgattccacacatgttaccatgccccgaagtaccgccacgatactgcaaagggggaaatcgtgacaaaacccttcatataacccaccctaaccaagcatacccacatcaggtttcaccccctccttattccatgacgggcagtcccctctcgtgcctaagtaaatccagaaacaacagagaccaaaatccaggcccgaactgcaccatcgcctctacccttgccacggtatgtcaactaagttaaagttaagttatactctagatttagccttgagcccacgctggcttatggtaagtatggttagggaaagcggctaaggcggcagcagcttggctcggctctgctggcagcacggctcagggagacggcagggcagcggcagctggcacacggcagggcagggcagcagctgccactacaagagatcttatgatagatgacgcttcatttacgtcacaaacattgaatatttggtcacgtttcataatctgtgacgctcgcgtgacgaaaattcattcgacacctatcatgcgtctctaatggcgttctatgacgaaaccttatttttttcgtcattaatcgattgacgatccttctgtcggcataactttgtgatgctcatattcgtcattatctagctaaaaaacgttataaaatatctgatgacccattaaaatccatgtattgagcaccctgtttatgggcttagcccaatggcaagcccgactagattttagcctggcccatctatgatgtagcatattttcagcccaattctattatatccatttgcttcaatatcaaataataaatgggccaagtccattgcaaaagcccatacatgcccaaacattataccacaccattttcagcatgtcattattttcattatgttagtatcaaataacaagtgggctaagcccatataggcccaacaatcaaacacaataacaatccatatagcacaagcccaattagcatccaacacaacccgacaaacatccaatacaacacaaaatttacaacacagcaaatcagcaaatcagctggttggccactcgtgggaagtgcttgaactgcagcagggacaggaagtgcttgaattgcggcaggggcctcaccttcctcaggaaccccctatatcaaatacacaaagtgcaatagattagtcaccgattgactcattacatgataaaattgtgcctaaaaaatagctgaagtggaagaaataagttcaaaggagagaaaagggtgcaaccattgtttgaaataagtggtttcccgttgtccaagagcagataccaacgcatgcatgacaagaagtgcctatgtcgcttaaaattattttttgatctgtttattgttattattttcaacaagtcattgcaaaaacttaaataacacagattaacatctttctgagtttaaaattttgagactccttatttattttaaaagttttgacgacataatagctcatcaggaagtccaagcaacaagacatggaaaaaacataaatggatatgagtatgtccaattgtcacaaatatcttcgaaaaccaaatgtattaaagaacatgatcttattgcagatcaaaacgatgccattagcttgctatcttaacagttagtttgcctttctattcatgtacctttctactcatgtaatgctcaagctttaacagaaaaatgcaagaacgacaggaaccggtaagcacatagcataaataactaatcttctgtttataccacatatgcatatgctagcaaggtttgcacacaaagccctcattccctaaatgtttgacgccgttgacttttttaaatatgcttgaatgttcgtcttattcaaaattttttgtaaaatatataaaactatatatatacataaaagtatatttaacaatgaatcaaataataggaaaagaattaataattacttcaattttttgaataagacgaacggttaaacatgttaaaaaaagtcaacggcgtcaaacatttagggatggagggagtataatatttgtacaccacagattcacagttatagcagcatagctgcgctataatgtacagctccattatccatttgcaaacaagcctaaatagaagaataggcattgaaaaatacctcaagtaatgaagtttcggcaataaatcacatatatgaatcagggaggatagatatacatagaatctgaaaaaaggagagcaaggattgattagggactagggaggattgaatcgggaggaatgccacttgcttgttgctgctgttgctgcttgccttccgcctgttgcttcatgcctgctgcctgctgcctcgccgcttgctgctcgcatgtccctgccgcgtagccgcgccgccggacacgagcgctggatatgagaaacacataagattgttgacaaacaacaatatactatattcaaccatgaaactacttttgaggtgctcataatcccaggcgcccaacaaacgaacctaatattgcatcctcgatagatttacaggctttgagccttatgagcttcttattagatagagctatgggctttgagcccaaaagagcttctgagagctcatgagctagctagatctcggcttgttaagaagataccgactcgtttaattaattttacgagtcgagttgagcccataataagaagatgagaacaagcttaagcttttacagtaagtttgtaactgctaattggcatgttcttgtcaaaaacgttttctaagtggccatttttagcaacaggactaatccagaatgcatatacatgtaaatattattcagtaagtaagttttttcaaggcaatcatcagtatgtatgtttattttttcttgggatgtatgataaagtggttatgaagaactttggaacataaacggggtaaagaaagttgtgcagactcgtattaaaaaaagacagaattttcaaagaatcttttctctgaagcatactttgtcggtcttcatctccatgctcagttacttgagcgacctgctaacctcgtcagcatgcagagatccagagttagataagccaagaaatctgcacatgaaaaaagtatcacaatcttctttcatctgcatgagaaaaaggccaagagaacttcccagtttgatcagtttgggagaactaatgcagtttccctccctctgaagaaaggtagtcctatatctgaacaaataggatttttaatagatttatccttgcgatatgcccttgatgtgtttaaacatctgaataaattttgctccatgcatctgaaattctaaatgtctgatgctgcaatgtcgtgctaattgatgttattttattaagattgttccagtccagccctcgatggttggtactactacattacaggttacaaattacaagtctttgcccttttcatttttttttaaaaaagaagagatgataggaaaaaagaacagacctagacaggctactgcaagagaggacatggtgaagcagcagcagtaatcagccaccgccggtgctggtgacgccgaggtctggcttgccgtcgtcctcgctgcttgtatgaggccagctccaagaacccccgctgcttgctcctgtacagcagcctgcgcagcacccacccgaacacaacacgcccccccccccccccccgcgtcaacagggtgggggggggaaggggggggtgagatgcggcggcggctctcgtcgaaggagaggtcgatggtgctggtggtggcgccgttctgctgggtggtggggatgaagtgtgatcatcctgtctttcttagaccggacccacttaaatctagtagcttccataccttttataggtcataaactgtcctcacaagtcttttctgcacactttgtcctcactcgtgtgcacccgggaagaatttaccggtctgtcacctatctcaaattactccagaccaagtacgcttaacctcataattctttgaagaccagcttccggaaaagaagttgcaacctgttgatatgagtattctattaatcctattaagccctgggccgggatgttacatgaagccagagaggacgtggtgggctgggaaggccgcggcgaggaggaagagggcgccgacgcagggaggggagcacgcagcggaggtggaggtggagtgcacggctgccgaccctagcggtcgtgccgtcgtcggcgaacgagaggaaggacgaggcaggaggagggggtcttgtcgaatcccgcggcggtgcgggaagagaaagaggaaaggcgcttgtcggggtcactccaccacggcacctggtcaagcgtcacggcaagctccacctcgcccacgcccaccgccgccgccacgaggaaatttatgtaaacccatataagagatatgtaaattttatgaacaatgttcctatcggtttgtcgaatgatgaaataaccaaaataaaagttatagatattgatgagtaatacaaatttgttattgacgactttttcagttgaaatcatttagtatttgaaaatgttgtttgaaattgtcataatttgaaattcaaattttatataggtcaatcaaactcagatggagaaataaccaaaatacaaaattggtagatctcaataatttatacaactttgtttttggcaactttttcacataactttatttagtataataaaattcaattcaaagtttttaatattttgaaattaattgagaggagggaggcaaaatggacttctggctggagggaggaggggaaggagcagcttggcggctgggccggctggttgagtggcgcggcccatgaaggagtagaggaggcccgcagggccggctggttgagtggcgtggcccatggaggagtagaggaggcccgcagactcgggccgaggtgggccgaggagaaagtggggagagggaagggaatgggagtagaaaagaggccgagcgggctagcggggagtagaatcagactttgggacggattcagcccaaatgacaaaggaggattgtttttagtttttctttttaataaactctgttaattttttttatcgcttaataaatatttcggtgctctgagaaaattcaagtaaacatccaggacatattttagaccgaggagaacttatgaaagatactttgggtcacattcaaattttttcttgcacgtattttagtgtttagcattttcttttaggattttagtttattatattattccttttagcgaataatttttaatttgggtgaatttatcaggatgtgacaattattttagtgcgttacaaagggcagttcaagcattcgtcattttaaaaagaaaaaaaacatatgataaaccaacattgttatgaacttgtgacatttgttggttggtctcttatgacaaaataatattcattacaataaaccattagactagtttatgatgatctgtatttgatcttagtgacgacaaccccaattttgtcactaatcatcatcatctgttgatgcgaaaaacacacactggcctgaaaaatctacttaacttctgtgtaggtcctaaatcttgcttttgggtttaaggcgtgccagttaatttgatcctgcaatcaagaagaaagaaagacaagaaaaaaccacagtcaaatccataaatgatagccaaatccataaatgatagccaatcggctagttgccgatgacatatcatttatctttgagccgatgttatgttagaatcgatcgacagtaataaatgaataagataagactaaatctactcgatcggctgtagatattaacgacatataatctttccttcgatgtatatttaaactatatgattgggataggtcggtcgccatgccgagacagtataaatcactcaagtcaaaagatacattaaagcaataattatataggcatttatagcatagctgatcagatagatctagcatgtatcagctaatactccgataccactttatactaagatattaaaacaagcaaaatatatgaaacaagaaagcctaatatactctggggtgataagatcttaatacaaagggcagatttagcataacagtcaagcatatgaaggcaaaagatagctaagtcaggtaagatcggctgaaactccgacactatctcaattgataatcataaaacaagctagatattacagttatagataatatttaatagatcgaacttaaccgatgcagcattaagcgtaaagataaatgtaagatctaagcaagatgatgaaaacctctaaaagatggtagatactctgtataatctagattaataacaagatctaactctatcgactactctttagcagtaaaaaccaaccgattgcgggttagatagaatcactaataaagattataaagtgtatatgataactcgacaaattacataaacatgattagagtgtcatgaagatgtaagcactaataccgaaaacgcaatccgccatgacaagtttacctctagttgaatatcgaaaccgatgcagctcaacccgaaagcaagaacatgtctatacaaacgaacgtgaaaaagggtggcgatgcgccgagattgttattgaactattgttgttaaattacatgggttcgggttatatttatacccgagatacatgatatgtccttgccggacacgactcttatctctaacaaactctaagatacacataagtctttacggcagacttttgtccaaacatatctctaaggaaactatttaaaatatcctaattaatagatacaattgcctatctgggagcttatctccatcatgaaaatcctttcgtagcactgatcgatcccagaaacgatttcataaccatctcaatgaaatcggctatatcggctgtatcggttgtcccctgtccgatgtcatctcagcagatgcagactccagccgatgcctccgcagccgatgcgcactctgttcttcgatcacaacccctttgccgaatccacttcaattccaatgccgaacctagttcatcacttaccaaatttggtcgttaaaacatgccccccaagtccgcgatattggtaatgttgcggatttgctcaatttccttcccgagtagaactagggtttccatctccgattccgttttggccgttaccacgctttcttttaaatagtaaccactgcttggcacttttcacagcgtcagcttccgttttaaccgctctagccaaaactttccccaatctcttcctcgatctttccggcgacatctttgagctttccggcgatcccgcaagcgactcccagcagcgccgacctccatcaccgacaatgtcgacctccgccgatccttcgagcgcgccaactgccgagtacgtcgaggtaggtaccatcggctaaatcccctcttttacgtacaagattggttcttctttcgctcaatcttcgattttctttccctgtagcatctttctcatcaagttgcggttcctagcataaccgatgagcattaattctttcttggtccaatcggcaacccaaaccccaccgagttcatcaatggtgagaccaaccgaatcccctttagatttgccaaccccgatttaagtctctggaagaataccttcaaatcttggccctcagccgaaaaaagctagccagcttggtatatgagggtatcagctagcaagctaactcactgggcagaaattggcatagtccaagctttagctctgactgcagtagatatagccaaagatgaacccatgatgacagctgcaacctatttctagtccactaccatgaatgcctttctcttttcccaaggaccgatgactcccactctcctagatgtcacaatgataattggcctagatataacttcatcggctaacccggtcagcttgaatacaacatccacctttgagttcaaaactcagaacataggtggctggtcaggttttgttgcaaaaaacatgggcaatgggccagtaagtccaagggaacatacattcttccttctgatgtggttagaaaaattcttgttttgtggcctgagctgtggtcctactgccaactggcaacacatagctgaaaacctagtggagaagaaacaactccctcttggaatgtatctgttaggctatttgtatatcctgtacaatctaagccaacatagatatttaacctaatcggctgccttccaataatagatgttagccgattgaaggttagataacgatattgtcgaagattatacagaatatatgataactcgacgaattacataaacaagattagagtatcataaagatgaaagcactaatcccgagaatgcaagccgccataacaagttttacctctagttgaaaattgaaaccaaagcagctcaacccgaaagcaagaactcgtcgaaacaaaacgaaagtaaaagggtggcgatgcgctgagattgtattgaacgtgtgttagattagttacatggggcttgggatctatttatacccgagattacaaaacatgtccatatcggacacgactcttatctctaacaaactctaagataccataagtctttgcggcagacttttgcccaaacatgtcgccaaggaaattacatgaaatatcctaattaatagatacaattgccttctcaggactctatccatgcatggcaatcctcatgaagcacattaacccaacccgacaacgtatgccatgtcatattgtcggattttactcaatgggctaaccttgtctagctcggactctgtcgatcctggtcacagccgattcggactttagcttattcttgctctgcttgcgggacgatctctatcttggattccacttcgattttatctttgtctttgatactgaaattaccaaatttggttgttaacacatgccccccaagtccggaatatttggtaatgtttcgtttttgccatatcgtatctccgagagaatatcgcacttgccatttttccgaccattatcgctctgctttaaatacttgtccccgagaaacttcacactgttacttccgttttcaccgcttaagccaaatctcatgttctctttctccggcgatcccctcggtgcacaaggcgacttcgaagcaatctcccctccggccagacttccgcccgcagagatgtcgtcctccgccagtccgtccatcgcgccatcggccgagtacacagaagtaagtacccatcggctagatcttcttcttccgcagcagattggttttcccttgcttatcttgttttcttcttctctgctcttgtttgcatctgcagcacttgtccaatctggtagcaattccaagtttgtcacatgaaaaccactattttcttggtccaatcggcaatcttgatcctactgaattcatcatcgccgaaaccaatagaatcccctttagattagccaaccctaatcaaggtcattggaaaaacatcttcaagtcttggccatctcttgagaatcccccccccctctgagaaaagctgggccatgtggtataagcgtgtatcagctactaagcaagttcaccgggacgaactcggaattagccaggcactcgccctcaccacagcaaattcggctaaagatgaacccttgatggccgctgccacctatttctggtccaacaccatcaatgccttcctattcaaccaagggccaatgacccccactttgctcgacatcaccatgatcacaggtttggatgtgacctcatcggctaacccaatgagcttgaacaccaagaaccagtttgacttcagaactaagagcataggtggttggtctggttatgtagcagcatatatgggcaaaggatccgtcacctcccgagaacatgtagccttcttactgatgtggcttgagaaattcctcttttgtggatcaagttgcggccctaccaccaactggcagttcttagctgaagcccttgagacaaagaggcaattccctttgggcaaaatccttctcggctatttgtaccaaatgttaaacaacgcatcggctaagattgctgtcggctcaatcgttagcgcaggccggccatggtggttgctgcaaacttggctaaacttggtagccatgaaagctgtcaatcagccagccgtaacagaagctgaatttccgagattagagccgatcacaaatgatgatggagaagagcgcacccatcacagatgtatgtccgatggggagtatgcctccacaccagccgatgctggagcaaagttatcagccgaactgctcaaagactgggtctgcagtttctatgagggtttccaaagagatgctcgagtctggtttccatacgaggacttaataaactttgatctcccaggagactttagatttgaagacctcaactctgaaaagtatcaaaaatcaagagaagtcttctcaactgccattagcccatgcatctttcatattagcaccaaggaagaaatatacaagtgtcctatgaattctaccatccgatgagctcagctaggcaatttggaatgggacagctaccaatcggcttgttctttgccgataaaatccaatgccgaggagagatttcatcaaccctgatgatggatcggctactcaacatccgagagcaaaaactttgatagatggtggggagaatggaagcaaaacatattccatcagtcgacttctatgtatatgacagatctattcccagatgtcatctctcaggtatatctttactttgtcatttttgcttgaataattagtagccgacttgaatcttaactaatctatccctttaccttgcagaaaacagaatcttctcctccacgcaagagcaacagtggcagggatatagagtatgccccaggccttttgccaaacggtggtggattagctcctccagtcatcggctatcatgcccccaagacctcaagtctgtttcaagggcagatgagagaaccagccgatgttggcaggaagagaaagaccaaggcatcggctatagatccattggctctggctcccaaaaagaagaccaagaagaataagcctacgccagccgatgacttgcctgccttagatccatccatcgagcaagccttggacgaagaaaagattgaagaggatattgatcaagctgcagccgaagtaagtgacacagaaaaaactccatcggcttcacccaatcgaactcctccaactccctctgccccagctcatttctcaagggtacacctctctccttaatttcctcctgccattattttattcatagccgatcacttataaatctcatttttgcagaaaaagaagactgttgtgaggaagaaatcggcagtaacaacgcttaaaccggctccaccagtaagattgtcatatataaatcctctcacttatccgatcacagccgacattttacttaacgctttgtctttttgcagcctcctcctcctccttcaccacctatgcaacagatgtcaagtgaccgtaccccattggctacgggaagccatcatgttgaagaagaggaacaaccagccgctaatgccatcccagtaagtctttcattgccataagaacctagatcggctgaaactgtttgatatttaactgtcttcaaatttctcttttgcaggtcctggccgatctgttctcttttgatatcaaggattactttgatgaagaagtagaagaagaatccacaagcaaggctctagcgcctctggatgaaactgtcaagaaaacacttgaagacatatccattcggctagagtcatcattggataatctggtggccgactgtggttcgattcgggcacgatttgcagaaatccaagccctagtcccagacgatctagcaaacaccattactctagctgtgtacctcgagcaacatcaattcaagctggagaaggctaagcaatggatagccgatcggcgggagcggaaagatatcgaagccactatccaagccaattgggaactcgtgcatgaagagaaagctaagttagatcagctctccgccgggccgattcagtcaaacatagataagcttgaagctcgcaagattgatcttatagcccaacttgaagaatgcaatgccgagttgaatcttgaaaggcagaagctagccaatctcccaagtgctgttgaagaacataagtctagattgagatcggctataaaaaatgtggctgacatgaccaagtccctcaaattcatctctggaactgacacccaagacattcaagctattgaagaagtagatcaaattagacaacgggctgtgtcggctatccagcgttacttgtctagatgattggtcttgtaataggatagctcattttgtaatatatgtgcccccctaattttacaatgacgaaggcattaataaaattataaattgaactaagagcgatataaccatattggccattgtatatcggcaaaacacaaccgattacaatataaaaaacaactaagggcgatataaccatatcggctattgtatatcggcaaaacacaaccgattacaatataaaaaataactaagagcaatataaccatatcggccatctcaaggcgatgtaaacacatcggctatcatgtatcgacaacaccaaccgatcatgtattaacccaaacacttggttaatatttcttcaagtatttgccattgagtgctcgtccataaacttgcaacatataagcccctttggatacaaccttatagatttgaaacggtccttcccaattcggcgaccacttgccgaatttgttatcccgagtccctaacggcaaaatcaatttctacacaaggtcaccttccgaaaaagacttgggtaccacctttttgttgtaatgctgagcaattctctccttatctttggtgacttttgctagggcttgcaatcttgattgaaccaagtcttccctctcatcagccatgagattgtattattcatcggctgttaactcattttgtaactctatcctccttgagccgattcaaacttcccatggtaaaactgcctcatgtccataaacaagtttataaggatgaacttgaatcgaaccattacaagccatccgataggaccacaatgcttcggccaatctagtatgtcattgccgaggataatcggaaatcttcctcttaatcagtttaatcaaactcttattagacgcctcggcttgcccattagcttgtgcataatattgtgaagaattcaacaatttgatacccatgctatcggcaaactgaacaaactcatcggacaaaaagatcgagccttgatcggttgtaatggtttgaggaataccaaagcgataaataatatgctcttgaacaaatcgaatagcatccccagaatcaactttcttcaaaggaatcgcttctacccacttggtaaaataatcggttgccaccaatataaacttatgtcctttgctcgacggtggattaatcataccgatcatatcaatcccccaacctctaaatggccacgggtgctctttgaattgctccaaacttttgacaatcttgatatcctttgtactatttgaaacaatcgtccaacattgtcggccaaaaatatcctacccgccgaagcaaccacttcatcttatgagccgattgatgagttccacaaattccttcatgtacctcacctactacaaccttagcttgatcagcacttaaacatttaagcaacaccccatcaatcgtccaataatatagctcatcatccaacaaggtatacttcaaagccttatagcacaacttccgagaagccgattgagatggattctgcaaataatgatgtacatcgtacctccaatcatcggttgttatcgtggaaacttctattgtgacatccttcatcatcggcttgtaacccgatgccccttgagccaagtcattagcttcaatattttgctcccgagatacatgcttcaaagttaccagccgaaatcctttcatcaactcccgacacttctcattgtaaaccattaatgtatcatttttgcactcatattctcctgccaattgactaatcactagaaaggaatcacccataatctcaacagcatcggcttcaactttcttatgtaattgcaaccctttgagaaccgcttcatactcagcctgattattagttgcatatggcttgatagtatatgcaaactcaaaacttgccccccgaggaaaattataaccaagccgataccacaaccatgagtgcatactgacccatcaaaaaacaaagtccagggcacaatctcaaccgagccgattgagtcatcacgatgatcaacaataaaatcggctatagcttgccccttaatcgccttcggtgactcataccgaagatcaaattctatcaaagaaaatatccactttccaacccttcctttcaaaatcggagccgataacatgtacttgaccacatcggctttgcatattacagtgcattcattggataattgataatgccttaatcttgtacaagaaaaatataagcacaaacacaacttttccacaggagaataacttgtctctgcatccaaaagccgacgactcaaatagaacacaactctttctttcccctcgagctcctgaatcaagaccgagccgattgacttctcaccggccgatagatataacctaaaaagtatccccttttgtggaggaatcaaaactggaggagagctaagatattgtttaatattatccaaggccttctgctgttctgccccccaagtaaatttctgatcggctttcaatctcaacaacagtgtaaaaggttctaaccttccagacaaattagagataaacattctaacaaaatttatgttgccgatcatctcctgcaattctgtcttgtcctccggaggttgaatcttttttatcgcattaacactcctttgagttatctcaatccccctttcatgaacaagaaatcctaaaaattggccagccgatacgccaaaagcacactttgtcggattcatcttcaggccatacttcctagttctcacaaaaaccttcctcaaatcggctatgtggtcctctatttcctttgacttaacaaccgcatcatcaatgtagacttcaaccaaccagccgattagatcatgatatatgtagttcatagatcattgataagtagctccagcacttttcaagccaaaagtcatcacaacccactcaaacaagccgattgcaccaggacatctaaaagctgtcttatgaatgtcttcctctgccataaagatctgattataaccagcattaccatccataaaactcaatatcttatgccctgaagcagcgtcaaccaattgatcggcaactggcattgggtactcatcctttggtgtagccttgtttaaatctcagaaatcaatgcacaccctgactgtgctgtttttcttgataactggaagtatgttggaaacccactcagcatatcggtaaggacgaataaaaccagcatcatacaaacgtttaacctcagccttaataggttcgagcatatcggctttgcatcttctcggcggctgttggtacggtctaacccccggtttgataggtagccgatgttcaacaatggatcggctgagtcctggcatctcgtaatattcccaagcaaagcaatctctgtactcttttaagagctctatcaacttggttctgaat

SEQ ID NO: 22532 - DNA, 1205 bp, Oryza sativa
aaaccctgtccttgctggtcattgagatcatctattgtgtccttggtgtagacgttgaaacctccacgacgccctcaaaataatagcttgggctctccatcttcaatgggttgtatatcatcggacacttttagaaaatctccatcccaaccttttccagataagcaatcgataccgtccatctcccaaagagctaaatcggcactggcaacattaactgacttgtcggctagcacaatctcaatcttgttgccttgccattgaatcaaacattgatgcatggttgaaggaatacaacaattggcatgaatccaatcccttccaagcaacaagctgtaggaacccttcccatcgatgacaaaaaatgttgtagggatggttttgctgccgactgtcagctccaaattcaaaactccttttgtctctgacggattgccaccaaagtccttgagaaccatacttgtcttgatgagatcttcagtatttctgcccagcttcctaaatgtagcatatggcatcaaattcacagcagccccaccatcaaccatcatcttggacatcggcttctcattgacatagccgtttatatacaatggtttaagatgccgattctttgtcccttctggtttctcaaaaaccgcttgctctggtgacaaaaccaacctagccgaagcttcctcaacttcatcaacatcagcttgtttagctccgaattccgcaggcaacgtgaaaaccatgttaaccgatgcggtcacaacactcttccctttagccaacctttttgcttcatcggctgtagcagcttggttcttgacacgccactcctgccttggctttgtcttcttctgccgatgattaatctcttgctccacttcatgaaaacactctctgttcctcaatctttgaactcttctcttctgattcttcgtaaaaataccagaaggacaccattgagtttttctgccctcctcgtcctcttgatcatgatcttgatttactgggcccaatctttgatgaacaggaactcttgtcaacctcagccgattgcttctattgtgagatcggcttgaactttctgcaatatcactgcatctaggacaatcttcgatagatggcagcctcataccctcgttccagcaaaatctgaaaaactcacagtcccaacgaggatcaaaacccgcattggcttcttcataatacctctc

SEQ ID NO: 22533 - DNA, 980 bp, Oryza sativa
gatcgatgaatggtgaaatttacctagctaagtgttatccggaacttccggaggacaggaagtttcggacctgtttccagttcaaaaatgtgagtaatggctagatgacgtcacctagccgttatatatatcccaatcgtccccagctcaccctttggccatttcacttttgcttttccattccataactgttgctagcctctcccaggtgtttctttgcctcctccgcccaattttgagccattcttgtgagagagtgagattttgagggtgaaggagaagatttggagaaggtgtgaaggctaggattggtgtgagcacttggggtatcttgtgggctgacatctcggtgcttattactcttggagatcatctcctagatggttaggtgtcacccgcgagcttcctttgcaattgtggatttcccgggaaagcttgtgaatattttcctcacctccgtaagggaacgaggtaagtgagtaaagaatcttatgctaaagtcctagtggttttcctaatagagcaactcacacttatggtgttttctagaagtaggttaagttggatctaggtggtcactcaattctagaaaattacctaaaggtgttggggttgaaggctgtggatttcctctaagatttttgcacaagtgaggcaaggggttaattgatacccccaactctttggagctcctcaacggagagtagatcgcgagatccgaacttcgggaaaaaaatatcctccttgtccatttctgtgatgtttctatgcttgtatctgggaacctattgcttttctggtcacctgtgtgtttctacttttgagaattggcttaatttttggaagtgaaatttgaatttcgtctgttttccggccaaggacaccggaagttccggactgtctgaacataccggaaagtttcggtgttctacaccaagagatttcaggcctggtgaatttaccgctggaattgtttttga

SEQ ID NO: 22534 - DNA, 691 bp, Oryza sativa
aaaaccaaccgattgcgggttagatagaatcactaataaagattataaagtgtatatgataactcgacaaattacataaacatgattagagtgtcatgaagatgtaagcactaataccgaaaacgcaatccgccatgacaagtttacctctagttgaatatcgaaaccgatgcagctcaacccgaaagcaagaacatgtctatacaaacgaacgtgaaaaagggtggcgatgcgccgagattgttattgaactattgttgttaaattacatgggttcgggttatatttatacccgagatacatgatatgtccttgccggacacgactcttatctctaacaaactctaagatacacataagtctttacggcagacttttgtccaaacatatctctaaggaaactatttaaaatatcctaattaatagatacaattgcctatctgggagcttatctccatcatgaaaatcctttcgtagcactgatcgatcccagaaacgatttcataaccatctcaatgaaatcggctatatcggctgtatcggttgtcccctgtccgatgtcatctcagcagatgcagactccagccgatgcctccgcagccgatgcgcactctgttcttcgatcacaacccctttgccgaatccacttcaattccaatgccgaacctagttcatcacttaccaaatttgg

SEQ ID NO: 22535 - DNA, 722 bp, Oryza sativa
ctaaatgccatattacacaagggtggggtttgtagtatctaactctaaggtgcttagccagcttctatcactatgaactggcgttgatacatgttgcggcttaaaaaccagtgctaattataaatattagtgccaatacgttcttagttataactggcactaatggacaagactacatcatgccagataaaaaactacaaaatggtcttagctacttattttattgtatctacctcatatagaaggagtaataatcgtggttttgctttcatacaaaacggtcttagctacctaatttaatacatccgcctcatatagatgaagtagtaatcgtggttttgcttgcataaataatggtttagacaattgcaggcttgtagctgactcttgaagctcaatcctgtcaccacctggtggtatgctccaactgaacccctgcagaagccttgcaaatagcatcattgtaattgatgttccgagtgacacggcaggacagccacgcctaccagcactgaacgatacaaaacgtaactctggctcagctagcaccacagtaccagtatttttcagatgtcgctctggttggaattcgagtggtttatcccatgctctatggtttcgaccgagcccaattcggcttaacatgacatggctaccctttgggatcatgtatccgcgacggcggtgtctgggatcgcgacatggggtgggttgaatgggtg

SEQ ID NO: 22536 - DNA, 6916 bp, Oryza sativa
agacatcaaatttgaaacagtggtgtcattgtttgaagcattatcaagggttattgtcatgaccttatcctctattttcaattcaaccaagcaatcaaaaatagcctgagctatgacaatagcggtgtgaggaggctccacctcaacaaagtttaggacacggcatagcaaaacccaatgaacatctatgtaatgagccaccaaacacatatactgaaggttttgatttaatgtccacatatatctgtagttaaacttatggtctcagcctccctaagacttttcctgagatgttccttttcagattcatacaatttcatgcattcatttttatggccttgcgactagtgaattcatagcgaggattcatccacttcatcaaggcattaaaccctttatgctcaacaattctaaatgggtaatcatgttgaattatcataagggcaatcaaaagtttagtgtgatcatgatcatactcagtaggatgcaaaaccatagaaccatcagctaaaggaaaataaagtgtaccttgagctttagcctttgcaagcttgttcagatatatcgtgcacttatctaagtgacgattcagtgttgtagtggttcccccaaggtgatatgcctagctgtgatgacaaaacctacactttgccttacattccattttccctttctccttcttggagggaacattgatcaccttaaaatatttccaacaactagcacgctttcctcttgttatcttaactttggaaggagacagtgaaatacctacctttggcctttttgcaccttgtttttgagcctttgaagtgtcatgtccatcctctcccttattgccgcttcttgaagaaggtaggctcacggacatcacatcattcaagtcaaaggtgttttcttcatcctcccctccatctgaaaaggccaccatgtccatttcctgcacaaattcaattcatacacacacaaactgattactatcttctagttgccttggtagtaggtatagtgattcattcaaagctaaatgcaaaattcacagtggtacatattcaaagctaaataattttagatcgacttcacaatttcacatgactacatgtctatatcagtacatttgtactgcacaaatacatattcaagataattgaataaaccaaaaaggaaagtgattgtggaatttagatacattccacggtcgtggagacattagctcgtgatgctgatgctggtgacggcgatccaattgccccacttgcgattgcggtccttgccgatcctcgactacagccaacgttggtttcagcaatccgtgcggagcgtgtacgtgccgctgcaccttcacctgtagctgccgacgagattggcctcgcgcttgcgcatttgctctgggattccacgcttggtggttgaggcgcctcctccatggtagtaagaagcggcgtggatggcgagatggcgggtggcggcggcgtggagagtggcggcggtggcggcagaaagtggcggcctgactgcctgagttcctggcagtggcagcgctcacgcggtggcagcttggcgtggtgggtggtggcgccaacggcgatgggggttggcgcaggcggcttggcgcggtgcgcggtggcgctcacgcggcggcagcactgatggcgatgggcgagtgaagagctgtgactacgagcctgcgcggccatcacccgccccgtcagagacctgccgtcgacttgccgtcgccgtgcaagctagaacgccgccgcttgtctgcttcttgctgcgcctgctcgccgccgccgcgtggctgttgctcgtcatcgccgcgtggctgctgctcactgcgcatgccagaacccccccaccttgctgccgccgcacgggcgccgcctggctgccgccttaccggagtgccatcgcacgctcgccaccgcctcgcgcacgcctgcacctccgccgccgcctctaggtctagggtggtctggatgttcataggcacaaccacacttggtggggaggagagggattccacccatatccattcgcttagggtagaatggtaaaattgatatttcataaatctttttttaatttccatttgtatttttttaacacacaaacgtgggacccatcaaacaggcgttacaagtaggggcaaacggctggttcgtttttaaaaagttggggtaaaatttcaaaccctaaaaaatgggggtaaaatagaagttgggattagaagtgggggcatagagcaatggtccctatttaattatacaaataaatatgtaagtatatccaatcatcacccctcacattatttgcacaatattttaacaaatctatctatcatttttataatatttaacatataattattaataagttttacattaaagtgcgggtatcatttgtttgtttcataataagtgttgataaatcttgatgttttattatttttttctttttactcctagcttgattgtcgaaaaaaatatattgagaatcatttagtaattcctgcagcaaagcgttggaaatcaccatacaataaccggttagcatgcagagccggtcatccaactaaataaatttagaaaatagtttgttggtttattaaattgtttgattagcgcaattaatcaagccacgtaatcgggaaatggctttcccaacttcatgattagcgggctacatgcaaaacagaatttcaaacttagtgggaaaggaatatggtgaccgatttattttttcgtctcatccgctatagaacaattcagttattttattgcgaaactcataacatgcaaaacttatgcgttggtactacactttcggtagtaacatacactttcggcagtaacataccgaggaaaatatagtaacgcataacatgcattagtaacggtattgccacagtacttgtgcatagtaaaaattttaaatctcaatcttgtgcaaagtacaagtgctaaaaagtgcatgtgcaggcttttcaaactgctaaacggtgtgttttgtgagaaaactttctatatgtaagttgctctaaaatatcagataaatatatttctcaactttgtaataattaaaacacaattaaatatatgttaataccaccttgtactgcataaaaaacttaatcatcatcttcatctacatgagtttcaaacaccacctaactactagcgatattttttaatcttttacaaaaaatatctctcacaccatatattaaatttgatggtggaaattttagaattctaatcttttaaacgataatatctctcacaccatcaaaatttgaattagttttcgtttttttaattttccgaaaaaattcctttctatactttccatttctgaaaatatatctagaatccgaaaacttttcagaccgttttcatcccatcagtgtgatgtaatcacatattgtatgttttgtatgacctaggagtcgaaatgctccttgttcgtatgattaactagtggaaaaagttcaaaaaggctatcgcatgagcgatcagttctgttttctaccatttttggcctgtggtccgattcctctcttttccttttaggccgtgttggtttccttctgaaattcctatctggcttgttatgtgtttcgtttcttgattgggcttggcattcatttttctggagtgagctgaatctatgtggtatactattgttaacgaccaaatttggtaagccatgaactaggttcaacatcggaatcaaagcggatttggcagggaatcatcttccaaaaacatagtgcgcatcggctacgagggcatcggctgagatggatcggatagaagatagccgatgtagccgatttcattgatatggttgtataatcgtctccgggattgatcaacgtgctacacaaggattgccacgatggagataagctcacgaataggcaattgtatctattattaattaggatattttaaatagtttctttagagatatgtttcggtaagagtctgctgtaaagacttgttcatatcttagagtttgttagagataagagtcgtgtccggcaaggacctgtcatgtatctcgggtataaatatatataacccgatcccatataatttacaacaacagttcaataacactttcggcgcatcgccaccctttttctactttcattgtttcgacgagttcttgcttttgggttgagctgcatcgatttcgatcttcaacaagaggtaaaacttgtcatgacggcttgcgctctcgggattagcgcttctatctttatgacactctaatcttatttatgtaaatcgtcgagttatcatatatgcttcataatctttattagtattataatctaaccctaaatcggccaacatctatcattgaaaggcagccgatagagttagatatagttgttaatctagattatatagcatatccaccatcttttagaggttttcatcaatttgtcaagatcttgtatttattcttatgcttaatgctgcattggttgagttcgatctattaagtaatattcataactgcaatatctagcttgttctatgatcaccaatagagatagcatcggagtttcagccgatcttacctgatttagctactttattctttacatgtccttgttatatgctagatccgcccttcatattaagatcttgttgcattaaagtatattaagcttactgtttaatatattttgtctgttctaatatcttaatatagagtggtatcggagtattagccgatacatgttagatctatttgatcggctatgctatgaatgtatacataatcttcatcttaaagttcttttaagcataagtgatttatactatctcgacttactgttcgatctatcccaatcacttagcttaaatatatttcgggaaaaggattatatatcattaatatctatagctgatcgagtagatttaactttatattgctttattcttcattgccgatctaatgccaataacatcggtttaataattaatgatatgtcatcggcccttagccgatcggctatcgtttatggatttaacctcgttttccttgttttatcttcatgttgattgcaggatgaaatcaactggcacgcctttgaacccaagagcaagatttaggacttgcgctggagttaagtatatctcccaggccagtgtgtattttttcatccacaactatccatgtgcatcgcctagaatcgggtggaaggcggtgttgtggatgatggaatatggatatcggacggagagggtaccgctaaacgattaatcggagtgcggacgattaatcagaatttgacgaaaatttaaagttttggacaaatatatgtacgtaactcataatagcttgttattttttacagataaatgcatataactacatatacacctactattcttaaataaaaataaggataacataacattagctcgatatattgtaaaatataggtctgaacactcatagttgtgcatcaaatagtgatatgtttggttcgtaatgcataaaggaaatatcgaaagcaggaaacactatctaagtgacactaaaacaaggtcctattcgagattcaaacagaagattaaaatgaggacaacaaaatatgggagatggatttgaaagaggattagatgaaaataactaaccctagactcgcaggttgcagcggcaggaatgagcttctaaggttttgggattgcaaacgtcgttttgctacctacttatatggtgctaggttacacaactagtgggatagtatgttatcgtgggctggctgggtagggccttgtcacgtgattaggcccggttattcggccgattagttggtagtgatggtgattgtacgttccgaaacgactaatgtgcaccattttgctaaaacgtgacggagagaggtcggcgccaccgttttaatgtcgatatatatggccgtatcaacctttatccacgacactgcaaaatactactagttattaatggaaggagagagcatgcatataaattatagaggcaaataatgaaaaggacgaaactgttatgaaactattatcttctgccagagataaatatgggctcataccaaatatatggaaacgtatcctaataggactcttcctattatgggtatatataccgagaaagaggtagagagatctgaatgtatccacatatgagaaagtaataaagctgtgatgcctctccctatatccgtgttcattgtttatctattatgtgcttgtatgagagatcgtcgtcgtctactccagatcagcaaataggccactagttattcaacacgttatcagcacgagttcgctcgtcccgctgatccgccgggtaagctttttactagatcaatttgttttcgtactaatcagattgatctactgtgtttatgcattggtctgttgtcagtcgagacgatcgcctccaagcgcagccacgcaccgaggcagcccgtcaggtgacgcgcgtgcaggtcgcacttccacgcgagcagcagccctgctggtcgtccgtactggagcgggagcccgcaaggcgccgacacatgcgcatgcacaagcagtgcagattgaaaccagctgatgaaccaagaaatttcttcgtgcaagcatccgtgtgtgatccaatctacgtccacgcaaggatcgatcaacatgtatgatgcatgtaccaatcgatattcaccaacacccatcggattcttcaacaatcggacatcatcacgctgatacgctatgcgttggcatccgcggatcggcgaactttacatcggataaatgagatgagtgtcggtttcatcaattctaatactttgcaatagcgagagtaatatgctagatcatgcctctagttgttttattttctcgcatgaatagatgtatttgtccggcctttg

SEQ ID NO: 22537 - DNA, 554 bp, Oryza sativa
aatgcgttgcaccagaatcaaaaagtattgttgcagggattgagttaacaggaaacgtacccagtacagcctctggtgctgcttgtgcctcctccgcagatgcgtggttgacacgagcctggataaaccttggcccggcacgcctaggcttcgggcatttgttagcgaagtggccaagctcgccacagttgaagcaggaccctggttttgctccagtctccttcttggattgcgcgggcgggcctgtctgtgccggtgccattggtgggcgtggagctgcaccgtgattggactgacctccatggtggttctgactgccactggcgccctggggaaagttgctagggttgaacgggcggtgctgatgaacgatcatggtggtaggtccaccctgctgcccgggagcgaagcgcggcctctggtgacttccctgaggtgctctgaactgtgcggccttcctcttcctgtccatcttgttgcgttgatcctcctgacggattgccttgtcaaccagcctctcgaagtcagcgtagtccccagatatcaggtggttg

SEQ ID NO: 22538 - DNA, 1497 bp, Oryza sativa
tgggctcgacttgctggtcactcatgcacaccgatgtggatcttgtaaatgagaccaagctcgatagcgagattaagtcatggcttgcttttgctgcccaaaaagtggttgaagtgaatgcccttgctaaggcattggctggacagaaggatgaggtatggtactcttttttgccctttatctattctcacctcttaattagagcctgagcatagtactcattactcaatagcatttgaagaaacttctgctcatttatacatttgtgaacaatattgtacaggcttactttgcagcaaacactgctgctcatgcctccaggaggtcatcacctcgtgtgacaaacgaggaagtccaaaaggctgtaagtaccttctgtttttaggctgcatgcttgattctattcaacataacttggcctgtttttcttaatatcatgttatattgcttgtgcaggctgctgctctgagggggtctgaccaccgccgtgctaccaatgttagcgctaggttggacgcacagcagaagaagctcaaccttccagtccttcctacaaccacaattggttcattcccacagactgtggagctcaggagagtccgccgtgagtacaaggctaaaaagtgcgtaacagtccacatcaacgcttcaccgttttcccccttttttttgtctatattgctaattacaattcctgctacaggatctctgaggatgagtacgtcagtgccatcaaggaggaaatcagcaaggttgttaagatccaggaagagcttgacattgatgtgcttgttcacggcgagcctgaggtcagtatcctcgtgtactacttgtgtttagtgtttattactagactttacacttggctgtttgagaaaacaatattattagatttattgactcattaacaaagtttggtttgttctgcattgaagtaagctaactggcatgtattttacagagaaacgatatggttgagtactttggtgagcagctttctggttttgcatttactgccaatggatgggtgcaatcctatggatcccggtgtgtcaagccaccaattatctatggtgatgtgagccgccccaacgccatgactgtgttctggtccaagatggcgcagagcatgacctctcgccccatgaagggaatgttgactggtcccgtcacaatccttaactggtcttttgtcaggaatgaccagccgaggtccgtgcctgttgttgatgatgcaatgctaattattcaggttgcgattgagctttctgttgaggctgacattttcacacttgctcaggtttgagacatgctaccagattgctcttgccatcaagaaggaggtcgaggaccttgaggctggtggtatacaggttggacctgttctataattttgttctcaagtgaatacgcaaaacatgatcattttgcttacggctttttaattgtcctttacaggccattcaaaacgatgaaagctgctttgagagaaggtct

SEQ ID NO: 22539 - DNA, 4149 bp, Oryza sativa
ttagtccctgtctttagacactaatttagagtattaaatatagactacttacaaaactaattacataaataaaagctaattcacgagataaattttttaagcctaattaatctataattagagaatgtttactgtagcatcacataggctaatcatggattaattaggctcattagattcgtctcgcaaattagtccaagattatggatgggttttattaatagtctacgtttaatatttataattaatttttaaacatccgatgtgatagggacttaaaagttttagtcccatctaaacagggcctaagatacaacatcatcccccaccaattattctttttattttattcacgaatgcgaaaaaaaattgcacgtcaatatattagagaagaaatcagagatttgattaggggcaattgtatctgtgcccccgctttcgaagccaattgctattttacccttattttttagggtttacagttttacccttactttttgaatctgaagcagccgtgtacccctgtttcaaacagcaggttctaacggtgttagttgtagagaaaatgacatttatacccttagtggttatagcattttttgcccccatttttttcaactgtgtatgatttttccccctattttgtgactttagcttgtaaataattcaaatatgagcatctcttgtgatgtttttgtattttaacccaaaaaaatcacaaatactagacaattacgaaatatgaccaaaatttgaataaaatttcgacaacattttaatagaattttgacacaaactagcctcagccaaattaattcaatctgaagcgaaaacaaaaccaaatcaaagctaaaatatcacacgctgaaattaattccggacatcataaatcttcaaccagccgccttccatccaccccaatcgccacgtctaactccacaattatgcagtaaactcctaaagtgcaaaaccaccagtagcatcatcctgaactggaactttatgagcggaaaagaagcacttggccagctcgaagattccagcgacgtcgtcgagcgctagctgctcgtcctccaccgctgggaggcgaccgtcaggcgccgctgccggcgcagcgttgcccggcatgagcgcgggaaggtggtgcgaaaccggtcgccctcgccgccgccgcgacggccgccggctactccgcgcgcctgggagcggccgttgccgccgcctggctactgccccgtcggagcgccgcgcgagcccccgtccttgcagccgctgccgcgccgcgcgcacgccctcgccgctgctgccctgccacgcgccgccgataggtttcgggttgggaggagagggattcaatctccaattctctatccattcactgaggggtacaaaggtaaattcatatttcatgaaatcttttttttattttcttttgtatttctttaacccaaaatgcgggacccacctaacggatgttagaagtgagggcatacggctggttcagatttaaaaagtggggtaatactgcaaaccctaacaaataagggtaaaacagtagttaagtttgaaagtgggggcatagatgcaattatcccttttgattacacaacgtaaacgaccagaaaaccattgccaggggacaagaagaaaattggaaaggaaaagactgtaaaaggaagaaaaaccctccttaaagaaaaaaaaactcctattaattatttttttacataccactatcttataatcctcataaaattttagtgtagcagaaattaatttcagagaaacgtatttatccatgtgatttttacgcatgtccaatttaactattccttctgtttcaaatcattctagatctatatactgaatcaaacgttctaatttgtatcatcaataatttcttaaaactcaaatagtttagtgtcatgagaaatatttcatgatatataatttacttgttgaactacatggatttctaaaaattgatggtcaaaagataaagataagacgtgtgatttaggacaaatgtaaaatgtgaaacggatggagtacttaaaaagatgaatattaatatgtaaataagagttcttactagttcttaagaaaataatgttgacaaaatgtgaccacacactcacgtccaaaaacacacacagaaatgattgtgataaagagaaaggcgccatggatacacacagcacttctttgttggaagctagcgaagcaaatggatatggacacctcaacgaactgacccgtacgcccgcacgtagtacggggattttttttaacttttaattttatttattaaaatatataaaaatagttttttggttttaaagtattacaaatcaaccccttaccgttctttaggagtttttttccaaaaaaaaagcgccctccaaataattttttttataacgtgacacatgtccattgatatattgtaatggtcatgaggaagaaaagtggcacttcacgggcaacccccaccctctaaaatagcgacctacaatattttgcagacggtctccttatagccctctaggatgacgttaaggggttgcctataaatggctaaccctgattattttacaggcgaatcgcttgtagccttccgagagagcgagaagggggttgccaacaaaatggtcgaccactcttcatgcggcggttagcatgagccaataaccgtgtgccacgttattttttaaaaacgcactcccaaaaagcgttagggttgtagatttttaaaactttgaaaccaaaagttatttgtttaaaatattttaataagtaaaaacaaaaaaatttaaagaattccgtagcactgtagcccatttttgatatggccaaggcccacatagcaacgcatatgcatcattcatgggcctccatttctagtgggtttcatgggcttctctttttttcctcggccgaaggcgaagcgttcttttcccctttgggacgcgggattccctcgccgccgccgccgccgccgccgccgccgccggagtgaccacctcgctcgccggcggactcgattggctcaccggcggcgacggaggaggaggaggcatctgcggcgttcggcgcgaccccggagatggaggggttcctctgcgaccgcctgctcgacgcggcgcagcccatcgccgagcgcttccgggcgctcttctccctccgcaacctccgcgggacgcccctcgccgcgccctcctccaaggtctccccctcgtcggctcacccgcttacttgtctccttatgcagcagctttggtttccaccgtgatatgattcaaggtctcagtagcttgccgacttggtgtcagtactcagcgatcgacgacgtagcatagttagctgccatctttcttctaatttgctttcgttgatcgagctagtttgatgcgattcgaggttgtgaagatgcaattagctgtctgtgtgctggtagactggtagcatttcttcggtatatggtggcaagtattactgtcatgccttgtagtttggtaccaaattcccaattcagtaatccatctcgcattcttgctcaggcgttgatctgacaaagttactttatatttcctttcttgtactagttaattctgtgctaatttatgctctcttatgatttatgaatcatccttgaagtctgaaaacagtgtttaacattgaactgagaatgattgtttatgtttctactgtcatatagagctgttagatccaattgcctgtcaatgttttgttaatgaacgggcttaagaatacctgatgtgtttgctgcaatgctcagctgcaagggactcttcaaacttgcttgcccatgaggctgcatttgcactaggacaaatgcaagatgctgaggctatccctgcattagaggcagttctcaaagatctttcacttcatccaattgtccgacacgaggtaattgctacgacggactaatgccatcttctgcttatagtgatttactttcaattttgagaagctttgtatgtttattcattcattaggctgcggaagcgcttggagctattggcctggaaaagagcatttccctgctggaggagagtttagctgttgatcctgccgtggaagttcaagaaacatgtgagctggctattagacggatagaagata

SEQ ID NO: 22540 - DNA, 11761 bp, Oryza sativa
ttttgttaatgaacgggcttaagaatacctgatgtgtttgctgcaatgctcagctgcaagggactcttcaaacttgcttgcccatgaggctgcatttgcactaggacaaatgcaagatgctgaggctatccctgcattagaggcagttctcaaagatctttcacttcatccaattgtccgacacgaggtaattgctacgacggactaatgccatcttctgcttatagtgatttactttcaattttgagaagctttgtatgtttattcattcattaggctgcggaagcgcttggagctattggcctggaaaagagcatttccctgctggaggagagtttagctgttgatcctgccgtggaagttcaagaaacatgtgagctggctattagacggatagaagagcaaaagaatactagtggagttgaaagtgcaactgtttcaccttttctctcagttgatccagcactgcctgcaaagcaaggacttccagtagaacaactaaggcatgtcgttcaacacagtcctacatgtcttcattgtgctttgtgtgtattatcatgctactaatagcatggttattaattttcagggagcttcttctcaacgagcaagaaagcatgtatgaacgttatgcagctctctttgcactaaggaatgacagtggagatgctgctgtttctgctattgttgctgctctaggcgtcaaaagtgctcttctacgccacgaggtttgcttgaagccttgaacttcgataatcgctgttgcatctttgtccacaagcataagttatgcagatccttacatctcttgttatgatacagaaaggacattagcaaagcaaaattatccagttacacctactcagttttgtagtaattaggatacccaataaattgttttctgtaagaaactaggggtggagcttcatccaaataaggtagagaaaaaggcaacatatcaggataggtttggtggcatgatgtatttcatgagacagctgaatattctagagtgcacatttcttgatctattcatgatagcaccatctctaaagatcaatctattctttttattgagataatcaacaacctttttcatattgttactgttatttatgttgtcattgtgttctccactgtaatcattttttcttctgtaatgttttgcaggttgcttatgtgttaggccagctacaaaacaaagctgcttcagatgcactttccactgtcctgaagaatgttgatgagcatccaatggtcaggcatgaagctgctgaggcccttggttcaattgcaggtaactaatacgataagatttgatttcatcagtctctcatcaaccatggatatatgtcaaagctttgtgagaatatgtccaatgctgtcctgcagatcaggaaagcattgcacttctggaggagtttgcaaaggaccctgagccaatagtctcccagagctgcgaagtagcactcagcatgcttgaatatgagagatcagggaaggcctttgaggtacatacatacacgccaggcctagatcaaacagaaaagcatttgtaactagctttgtggcattgtctaacacattgtgctgtgttgttccattccatgcagtttttgttcccgcagactcctcaggtgcagcaggagtcctaagtgagttgtgaaagtgtgaactgagagcgagaggcaggctggaatgtgtctaatcctgtaatccaaaccttataccagtctaccttgaattgatatgttcgtcaaaaggatttactgatcaatctctgggctctcattctaggaagaaaagagaatgtgttttctttgagtaccaactagactaggtgcttaatgatcctattaacgcattgtttttttttaatcttgcacatatatttcgttattaaaatgagtagtacaagatataagtgggataatgcacataataccacgatgctgattaattgtctgcagttgaacactacagtgccactgcacatgatgtcataccaccgcagcaatgcagcatatgcaatataaataatctagcttatcttttgactgttaacacaggaattaatgaagaactaaagggtgtgtgcactttattaccatttgcaactctactaaattttaataagataactgatcttactgatactattcttccaaatttggtagttttgaaagtttctcctaataaaaacattaccaacatttctttttttaaaaaacaaactaaacacatccaatgcaaccaaaatttagtaacaccaaaacatgtcaaaatttagcattaataaattttggtaaggttaattttgggaacaaagtgacacaagccctaacaaagagtgtgttatgatcacaattcaggagaagagatatgtgtatatatcaaaatcaaaactgtgaccaggtaaaacactggtcatcaagcatgaagtatttacaccgtcaaagcactctcatagaaccagtatacaacctcaacttgaggtgcaaaaccatgcaaaaatctgatggcacacgaatgcgcaagcataatgtcagcaaccagttggtactcacttctgccaactggtaatacagcagtcaaaccagggagaactcaatgcatgcgatgtgaaatcactgggtaaaaatcacctaaatgctatgagaggccaagtaagatcagtactccaatagcaattggtggaacctaatgcgtcatcagatgcttgacgaggtacccgagcacagcaaagatcactgccgcaacgagcagcgccacgacagaatgatacggccccccagcaccagcggcaactgcaaggaggagtagtgttagtgtcagcactcagaagattaatccggcctagtaccctactgattgtatacttgcaaatgacttaaccattattactccattgatcatatgaaaaatcaagaacagtgttaaattacacgcaagaagttccaagaacacaagtatgacatctatcaagaacaatacagcagaaaatgatgtaatcgaagatcaagaacaatacagcagaagatgatgaaatagaattgatgcccctctctcaatgcaagaactcacctcggagagtgtcgacggggaggacggcagctgaggcgttccccaacggcgggagccacgagagctcagaagcgtaggcgtcgccgtcctcacctaccaagttcctccaggcctgtaaatctgcaggtagcgaggaatcaggcattcaattgtttctacgagaagcagcgcagtagttgtttcgcaagaacatgagcattttatagtatttcgcaataaaatcaagaacagagggcactcgatatgtcgcaagaaaaccaagaaccagagcatttgatatttcgcaagaaaaccaagaaccagagggcactcgatatgtcgcaagaaaatcaagaaggagagggccaagaattaggaacctgagggacatgggcatgggcaccgcatatcggcgtcggcgtcgtaggtgtgcgaggccggcgatggaagtgatggtggtggctgctgccggaacaagggaactaagtagttgacgcaaagcttggcggcgccgtagaggaagacggcccaaacgatgatgctgagcagcgtgaagagcacggtcgtgaggcatgtagatgagaacacatcgtcgtcgtcgccgccgccgcgctccatatagtcgccgacgacgatgtcggtctcctcctcctcgccgccgtggccggcgcccgtcccctgctcgtcgtcgggctcacgcgggggcacgacctcaaccgcgagcgcaaccccgcctctgtcctccgccgggtgcagagctctctcccgctctggatgcagagcgtcgccgccgccgccgccgccgcttgcagccagcgccaccacggagtggacgacgtcgacgggtatgtcgagaaacacctcctcatcgagctcgaactcgtcctccgccatggggaacggaacggaggcggtgatgaaggatggtggtgggaggggaggggaaggtggggatcgagtggagagctttgaggtggtggtcggggtggaggaagaaaggggggaactcggcggctggggcgctgcttatataggcggttgggagcgtaacgcttcttcttcttcttcttggcggtcttcttctccaccgcagccgacggtcggagatacatggtgtgttcggtccgagtcggcgaccattgaccaccgacgcgcaactccggtcgtcggggaatagccactccggcgaggcccgggcccggagcttcaccggaaccccgccgcctccggcgatgcgcaacccacccctgtggcacgcggcccacgccatggaagtggcgactgagatcgaggagaagagactactccgtactatgtctatgtatcatcaccactggacccccatacaccggcaccggtccatgggccatggactcactcaccccgacttcctgttcttttcggtttactttttgcaagtatttttcataaaaaaaagttgttataaatatacatattaatccattttcaacttttaactaatatacttaattaattatgtactaatgaatttaattaaccatatacttaattaatacatactcctccatcatataatataagaaattttggttgaacgagacacatcctagtaatacgaatctagataaggagcctatcaagattcatagtactatgatgtgctccatctacctgaacttacttatattttgagacggatagagtaattaacaaacatagtctaagatgggcttagaccctgtttggagagcttaaaattctgagaagaatctggttagaatctaaaaagttggcaaacccagatttttgacttataattcattttctggattttacgagaagctgcaactacccggaccttcccaaacatgcccttagtccaccatgagctgtggatcaaaattcaaattctctctctctctctcttccactagaagtgggctccacccatcagaccaaatactcctttacactccttttaaatttggaaaactcttttctttcttgcaaaagttcatttaaacttgtaaaatccatatattcctagccacaactctgattgactccgtttagctatttgaattacccttgaagaaaatatctacctaacgacgctattggtttcttttttttaaaataatcactgggggaggggggggacggactttccccacctgaatttcattaaggaaatagaagaactgggactacaagagattagtggtttcttacataggaagagagaagatctttccacactgaaacaactaccatatcttctctacgaagacgctcagcccagagagtagcatcttccacacattttacaaccattcgagagagggatttagggagataaccaaaaacaacatcatgcttgtgaatccataaaccccaaaagcaaagtaagtaaaagacttgaaagtgcttatcaggacaacaattttacggtccttgagaagatatgtgtgtccaacgcatgagtgcaacggagcaaatttttctttgagcggtaaggaatcacgccagcaatcagatcaaaaggaagtgcgggcagggtttcccaaactgccagggccggggttaccggtctccggcggtaagcacggttaccgtggtaaccgtgaaaaatcgtataaaaccgtgcaaaatttatcaaaattttaaattattttttaaatttatttgaatttaaggaggttaccgcggtatttatattaaaaagaagtcatagtactccgatccctttatatatgataaccaaaacatcattactcaaaactaaactcgtgtctttcacatatattacaatgtacgtaggcttttaacctgatgtgatgagatcagaggccaaaggcagcaacatgaccagtgtttctaccttcaacgaggttatggatgacggtcacagcaagcatgatcgcagggccagagccacccaaacccatgaaaccagccaacagattcagtaaaccaacacaaattccaacgatatatgctgccatggtcatgtagtgcctgcatcgcctgggactaatcgactcgtcctcgtcatgctcctgcagcagctgctcaggcgacactcttgttcgttgcgtcttctgcaataaaattcaatatatctatatataaacgtacgatttatatataactagttaattgatcaaacaatatgaacatactcaattcgtcctattaaaaactaacctaatattagatatgacacatcctagtactatgaatttgttcagagttttagatttattttttttctttagacggaaggagtagactggtacttacctttagaagcctgacgaggtatctttttgaacgtgagcaaactctgaaccaaaataccgagagaagagcatatcccaaaaccacgaacgcaacataaagaaaagaatggaccgggtctatcacaatgtcatccaggcttcaattcatcatgcagcaaaaagaaaacaggtcataagacaggttagttatacatatatgtagctcaaataaaattataaattgagtcctgcctagcttagttactgcctccgtgtttttttatcaataaatatttaggagaggaggtagtgtatactagtagtttcaatggaaatggatgaacaagtaattaaagctagaagaaagaataaaaatgagggatacatacgttagtggcgttgttatgtaagaggcgatcccactgacaggccagtagtgcccaggatactgcctcatttccttccaaatgccaagcatgttcaccactttattcgtctcgccatacttgatgctaagcatctgcatacatatatgaacaaagtaaacaaaccaattaattaattaaacaacggttaacagcacaacacgatcaacaaattaatcgctctgtatccattatcttaaaaaagaaaatgtatgtagctacctgtgagattgaagagaagggaaaggagaggagtgcaggttgcaagatgatgggagcgtaggccaggtaggagacgctgatggtgtgtgtgattcgcagcgttggatcagccggcgacctcaccggcggcaaggtgatgtgatggtctcccagtattatcaacactaacaaaaagaaggccaaagtagcaagcatcatcatccaggggtatgcatggttcaaggccttccagaaaatacatgcactgcaaacatttaatccaataatacatattattagctatatatagtgtactagtaatcaatcattcgagctagtaattattactccctcagttttaaaacgcaagatatgttagttctttataagttaaaagtttgactaaatttataaaaaaaaatataatatacattacacgaaattaattttgttaaattcatcattaaatatatttttataatatactccctccatcctaaaatgtttgacgccattgactttttttaaaatgtttgaccgttcatcttatttaaaaaatttaagtaattattaattctttttctatcatttgatttattttaaatatacttttatgtatacatatagttttacacatttcacaaaatcttttgaataagacaaacggtcaaacatgtttaaaaaaagttaacggcatcaaacatttagagaaggagggagtatgattgatgttaaaaattaatgttattatattttttataaacttagataaatttgaggtttgattcgggataaaactaaaacactttacttaggcttaggctgatataatgaaataaataaataaataaataaatatatatatatatatatatcctaatgagaaattcttaccagcaattggcggccgagaacaaggagagaccggacaagaatccataaccctttcgaaggaggtcgtccagataaatggcaatgagaccaccggcgattagttgaaacacgaacacgagtgcagctgtagtaataaatggcgtgcctcctgcaatggcggaggcatatagaacaatggcaacaggcgacacgatggctatctgcatcgcaaacaacctccgtgtcctctccctgaatcgatcgatccaagattattattattattcagacttaattaagttagaccatgcatgcatgtggatgaatttgtggttttagtttttggtaatatatatgaattagtgatcatcgatcgaatatatacgagtaaagaagctaaagttgtcaaattaatagttttgataaaagtagctacagttttctagaatatacccttaatgtcatcttagcataaaaaagacatttagagcacccataatggttatctataagctctatacaagagatccatgtcagcatattttcttacttgaaagagattaaatgaaaagagagagagtaaagctatctactaacctggagatagtctacagagaaaaacgaggcaatgcattagagagctatagatacacatgtagacatactattgaggtgttttactattaatctagtcttttgctgagatgtacatgttttatagagagcaccttactttaccattgcgggtgctcttagaacagtacataatgcattaactcaagaggtgatatataattttttttttgcttaaaagcagaacatcaaagctcgaatagtacgcattaatcaaacgtctattatttaacaacggagttattattaataagtactccctttattttatttttatattataaattactttgactttgactttttttctagttataaacttttttaagtttgattaagttcttataaaagaatttagtaacatgcatatacaacaccaacaccaaattagtttgcttacttaaatatagcattgaatatattttgataatacatttattttaggttgaaaatattattatatatgtttctttatatatactcacttagaaaaaaaaatcaaaattacttataatataaaaaacggagactgagatattacaggcggcggcgatggtcggggagcctgtcgtcgtggacgccgatgatcttgagcgccatgcagaggtggacgaccatctccgagtagagaagagggaccaacccgagcgccatcaccgtaggccgcaatgacgccgacatggcgttcatccagtatcgcgggtcgtgctcgccgccgccgtagtagttttggaccccgtagagcagcagctcgccggcgacgaggaagacgagcagcgacaccgccgtgtagagcaccttccgccggaaagagaccgccatgacgccgccggcgttcgtgctgctgtcttctacctccggcaacagcctcgccaataatctagcagaagcaaccgctgctgctactgccattgatcgatcgatggatcagtgaatttcgtcgattctcttgtagcttttggttaatttctgacgccgattttgattttttatcgcgtttcgttcgggcggtgcaaaccgaatcattattggattccattccaggccgaatttgtgtacggctcgagttgggcctcaactgggccgcgtattctccacaaagcaacgaattagtatatgggcctccatttcaggttaatttcatgggcttttcttttctctttttattttttttccctcagttgatccagcattgtctgcagcaattcattgtgttttgtgtgcatttatcttcctattttagtatagcgtggttgttcattttcagggggatgcttgtcaacgagcaagaaagcatgcacgacaacagtcaacagagaaacagggtttatcaataaacatccccttttacttgctttgctagatttcattttcacacattggacctctgaatctgtctgtctgactcatgctgttattatgcattgaacaggatgatgattacgttgagacgaaaatgtctgagctgaaaaaaaaaagaggtgatgaagtatttcagaagagcatcagtgtagtacacactgtcactgttacattcttctatctgcttaaaaaactcatactagaatattactggaatgctagtactatgctgaaagactagtgcatcagcccattacctctttgtgtgcaactcaatgcaaaattttccgttcccttgagttagcaataagaaaaaaaaactagatctttccttccattccatggattcataaaatcagcaattgataccttttttttttactgtataagtaatgaattttatgatataaaatcatcgtgagctttgtgcactctggaactggcccatcggcaaagtgtaatgttttgcaggttgctgcttatggtcaggcaggaagctgaatgaactttagtcacgatgtgttgtttgatgtatacttcctccgtcccaaaatataagtatttttagaccctcacacggtcttcgatatactactttaaccaacggtatctacgaaagtaaaatgttttaaataaaaagactagcatattatgatagttcgtttaatgataaatatagtaacatcaaatttatgttattaatcttttttaattttttactattaacagttaaaatttaaaaagtttgacttggcactattctaataatgcttatattttaggacagagggagtacatttctgaattggggagctgatacttgagttttgtgcagcaaagcagaactgggaattcagaattcagattggaaagaaagtgacagacagagaggtacggccgtgtaaaacaccctacgccggaaagagaccatgaattgctgccttgtacgatcgacctcgccaatctactactaccaggcaccagcagcaactgccattgatcgatcgatcgatgaatttctcggcgatgatccctagcttgattagtttctttttttttttgagaaagggagggaaactcccccgttttcattaaagaaaacgcagatgattacaagagttccagacatcaagttcttacagaaaagacgggagaaaaaggaaaacaaacagttattacaggactagaacattggcatttcaagcatcaaaacacaggtttccatcgtcgtcttcaaaacttcttgccattagtttagcctgcctctctctgtttcacatcctattctttgtctgccgcccctccatccaaattttgagtgaaagatctcatttgctacctgccttagtagctgcgcccccactgcattcttcctttgtctccctccttgctctgcaaaatactccaagagtttaaatttgagcaaatgttgtaaattatttctataggatcaacaggcataattccatcaaagcaggctctgtttcttgctttccaaatggtccacaagactgctgtaacccccaccataatcaacttcccattccctttgccaaatttcaaaatccaggagctaaacatttcccccacattcctgccaggcttcacattgagagtgcattcaacaacactccaaatgaaatgagccatcggacaatctaaaaacagatgttggatggattcactcttgtcacagaattggcatttaatcgagcccttcctccaaccccttttgaacagattatgttttgtaagaatactatttcttagaaccagccaggaaaaaactttcaccctgggtggtgctttgattttacacatttttttggagggataattgatccccctgaatatcaaagctctgtagaaaggattaacagagaaacctttactagacagtcttcaaatcagtctgtctttttcattagatagactaacatt

SEQ ID NO: 22541 - DNA, 535 bp, Oryza sativa
gaatcggcaaaagggcaagcccctttgtccccctcctttttttcccctttttcccccgccggcgtcatcctccctgtcgccgctttggccgcgaccgccgagcgccagctcgcgccttgaccgccctaagtcggttcccaaaccgacattgccgccccctttaaaccccagctccttcccctccaatctccctcgttttcgcctcctcgccatagctgccgcccccgtgctctgttcgccgaagccgtttgttgttgcacgtgtcgaaggagtcggcacgagcaaggacgcggaaggggactccggccgcgccctctccttcctcttccccggcccgaggccggagatattactcccgcgccgtcggcctctcgtcacagcgccccgacccgcacggtagtgcctccctccgttcttcctcctcgccccatctcctccccctagctttcggtagtagctcgagtagactacccgtagctagccggcgccgccccgaccgttgccgtcgctcaccgcgtgctcgccgccatcgccg

SEQ ID NO: 22542 - DNA, 873 bp, Oryza sativa
aatgctatggctgatgcagcacaatgggcattaccataccaacttcgccagctatttgtcacattacttcttttttgtgaagtcactgtagcgcccgttccgtcgtggcgcctagcgggaaaattatctcttaaaaaccctaattgcgaaatttgtttctttgcttgttgtctagtgtccgtgccatctcaagatctcaatccccgatctatcgtcgagttcaattccgaatccaaatccttccaatcaaattcctccgcaaaagtctattttgcctcccccgaggtcgatgggccgaatctcgctcggcccatcttcccctcttccccggcccatcttcccctctctccccgggcgctctctctctctctctctctctctctctctctcgcactctcccatctctccccccctcccgctcggcctcgcccgtacgctgctcgcgcgtgcgagagccgccctgagcgcctctctccccgctcccccgctcagcctcgcccgcacgccacgcgcgcgtgcgcgtaagccgccgcgccgagcgccccctccctttcccctcgctctgccgcgcctgcagccgcgcagccgctcgtcctcgcgagccagcgtgtgcgcgcccgcgcacgtggtggccgaccgcccggtcggcgccgccgccagcctctgcacgcgcctgtcgccagtgtcgccgctccgctccaaaccgccccgccgtcatcgtcgtcgtcatcgcccggcccccgcccctccgcgcgcaagccgccaagggacggaggcagcgcccctcctccctctgccgcgttgcccccgctcccctcctcctttttcccgaatcggcaaaagggcaagcccctttctccccctccttttttt

SEQ ID NO: 22543 - DNA, 1652 bp, Oryza sativa
caggatcccgtccacggaggagattgcggaccgcatcaacaagatgcttgcggtgctcgacactaacattctctgggtgaaccctgactgcggtctcaagacccgcaagtacaccgaggtgaagcctgccctcaccaacatggttttggccgccaagctcatccgcacccagctcgctagcgcgaagtgaggatcgcctttgcagcaagttcccttcgattttgaggaggaatgccatcatagccatcttgtttttgaataatctgggtccagtggatccactgtctgtggttaggtttagtcagtctcttggggccaagatcactcatacccattttactttgaatgaatttggtggtttttgaggcagtctgtcggtgtatttgtattgtaaactgagtggaaatcagcagtgtttcatctacatctgagttgttgcggatcaaattacaaaattttcaaggagagttgatgttatgttctgccaagtacccaaggcttttgtctggttttcacccgagttgatagttttctgatgatttcttgctgtgttatcactttgcattcttttactcgtgcttatgtgctgttcatgatgatatataaatccaatcacttgaaagacttccatgttgggatttgaacacaaattggcttacttctgtaggcatattcaacaatagcaaactcttcatgttcattaggaaatgaaatggattgaaaatgtaacaaaagtatacttgcaattagtagtacattttggttattaatgtggtgtttcagtatacacatttgcaggtgttaatttacatgtaatcacattagcttaattacatatcattcacatttggcatctgtttggtcagagacacaagagtcaagagctcaaggtgcgccacacggatacgatgatcccgacgagcaccgccgccgccgccgccatgttcaccatcagcctcctttcctccgcctccctcctcccacctccgctcgccgtcgccgtcgccggcggccgctcctcctccgctgctgccgctccagctcgacccatttcttgcgcctccttctctctcttctcctctttcctcttctgcttcgaaagcggcgtagtcgccggtagccttggatcgccgccgtttgctgctggacttggcgcaagaagcggcggccgtggcgagtcttttgtgctcggcggcgacgaggatgtcggcttgccggcggcgggctttgctggttcaggggtgatagccggaggcggggtccaataccgctgtgacggttgctgcggcggcggcggcggcgatggcggcggtggctttggctttgttggttccggaggagtcactgccgttggagaccaataatcctctggcggcggtggcagcggcgatggcggcggcggcgagggctttggctcgagaacacgtggcatcttcaccggagctcgtggtggtggtggtggtggctgcggctttggctcgacaacggcaggggtgtcccccggagttcgtggtggtactgtacgcggcggcggcggcggagatggtggtggcaatgttggtggcggctgtggcttctgctgcacaacggggggcttcaccgacggtggacgtgtcagcggcggcggcggcggagatggtggttgcaatgat

SEQ ID NO: 22544 - DNA, 4883 bp, Oryza sativa
tgacgccatgggtgacctccttccttggggcaaggacatatgcttctttgcttccaggggcggatccaacgtgaatgtaggggggactcatgaataccccggagcaccccttcgattttttcaccataaatgataaactaaaggtccctaaatagctggatattgaagaaactgtgtaattgagcccccccccaattttttttttcctggatccgcccctgtttgcttccttcatggcagatttttttttttttttgctacacctggtgtattggatcttgggtaataccaaaagttcatcatagttgggccaattgggccgcctatatgcttttcaggaatttcagcctatttgttttttttaaaaaaagaaacaattttgaattggcaatacttcatttggagttcttagggagaaaaaaaatatgttagtgctgattttattatcatgtagtattagtaataagcatctgtgtaaggtgtttgtctatgtccatgtggcttggatttgggtaataccaaaatcagaattgggcctgttctgttgggcattggacttccagggacagcagcctttttattttctttttaacgaagaattttgaattgagaatgtttgttttgaaattagttcttcagatttgatatttcttttagctgcaattcctttcagggagagcagtctttctttttgttttaaagaagaatttgaaattgaccattattgtcctgaaaaaagttcttcagacttgatgttacttttagttgcaattccatttctgtttgttttaaacaataattcgaaattgacaatatttgccctcaaattagttcttcaagcttcatgtttgttttagttgcagtttgcaaaggtacttcttcactttccaagttttaaagttgtacttctttttcagcatagttcttcatgagtcttatctcttcagcctacctagcaaaacttagtaatttaggcatgtttttttttttggtgatagggaggaaaccatattgctaatccctttttcttcagttaatcttcttgtcagttctgaactgaagctcaaacagaagggcacaacgatttgtacaagaaaaccaaaaccatctgggactctgtgcttgggtagcattattcagttaagagatgatgtacacatcccatgagtcaagtgtttgcagatcaagcaaccagacaagcaaagcaaacgtggagaatctgtttgcatcttggggtggatcaaattctgcataattttttaatactggtccaataccagtacaggctgctgatttgttcacacgctggtcaccccctctgaagatattgttccttggatgattgtccttgctggataaagctccttgcataatggagcacagttaacaagggggaaggacaataagtttcacaagtatcaatcagttatatgatggtaatataaggcataaaggcttttccggcacgcggaaaattagtaggaatgtctcaagaatttcagaaaaaaaaatctcattcaaggagttagggaatttcagaaaattcagagtagaagacaagatcatgtgagatcaatcaactgtacaaaagaggtccccagcttgttaggacaattccaagctgggattcaatgaatagtcctagatcagggtaccaggctacaaaaagagtaaaatgcaccagcggtccttcaacttgtcagcaggtttcacttaggttcaccaacttgcaaagcgcatatcgagatccctagggttggtttcttctatcagcccggtccagagccgtgtttgaccgtgatctagcatacgtggcataccacgtggacgatcaaatagattttattttattttttctcccttcttccttctcttttctcttttatgaaaagacgatgacgtgtatgaggcattttcatcttttcgacaaggaagaaagagaaaaaaaagaagaaagaagagagaaaaaataatttaaaaaatctatgtcatcgtccacgtggcatgccatgtaggcaagaccatggtcaaacgcggctttggattgagataatacaataaaccaagtttagggaccttaatgtgcgcttcgtaagttcgtggacctaagtgaaatctcctgacaaatttaaggaccgctggtgcattttactcctacaaaaaagtcagtctagtgatcacaaatccacttatactactacccaccatgcattgtgttcatcatttctgacagacaggcactggctcactagaattctcactcctgttaataaatcagaaacttaagttgcaaatggtggttccttcttgagatgatcatcttgatcttccagaagaacttgactggagaagagaagagacaaggtgttgatgatcctactgtaactcatggatcaggagaagatatatagtcacctgtgatagcttatctgaattacttactgcgtggttccaatctaacagtagcatctcctgatgttgagacctcgattagatggatggatgttgaggctaatagttgttcatccgtgtggtgccaatctgacagtagcatctcctggatgctcttgttcatggaatggcgtgtcgtccatgcattggtcaggcaatttgacaatttgttcatcgtctagcagagaggatatatggtcaggaaagagttgatgagataaaattgcagttcgagtacggttatactgccgtcttacctgatccaataattggatggagaatgttgtgccggtaagtaaacagtaacaagttgtgaattttcattatctgctagctagagtgtcagctctgaagaatatatcagcatatgtagaaacatgatgaacattagtttcagctgatttgttttcttgttactgtcatacatctctggtaataatagaaatgggataggttttccactctgtctgaaaaaaataattcagctgatattccaatctcactcacctcacctgctgaattcccatagccaaataaattgattccataccacctattataggggatagaaaggggagaggttttcctctctgtctggccaaaaaatatttcagctgatattccaatctaactcacctgctgaattcctatagccaaagaaattgatttattagacatactccctccgtttcgaaatgtttgacaccattgactttttatcacatgtttgaccgtttgtcttattcaaaaaatttaagtaattattaattcttttcctatcatttgattcattgttaaatatattttatgtaggcatataattttacatatctcataaaagtttttgaataagacgaacggtcaaacatgtgctaaaaagtcaacggtgtcaaacatttcgaaacggagggagtaccaattattgtatcttcagattagtgagctgcatcagaaagtagtatgcatgatggaatcagagaaacaggagtagcagctgcagcatctctcttccaaacctttaaatactaatccaacaatgttacttttgcttaccagataagttaacaccacaatgaattatcaaatcccaaatggtactgaatcaacacaatataatatggcatataagttgacacaaatgcaaacgaccaccacaaagtgataatttagtccaaagagaacataaaaaaggaagatgagaggaattcagaagaagagttttgagtcagtcagtatcaaggtcatgtgattgatgattcagcatcccttgaggctcagtggcctaatgagctgccacttgtcctaatgactccacattttcctgtcaatttccacactaactctgaaacaaagctcaaaacacagagcaaaaatcaaagaccaaaacttccatctttctctctagaccaaccaagaacactgcatttccagtaccaaaataaaacaagaaaaacaaagaaaactacttcctccgtttcagattataagatgttctgactttggtcaaagtcaaactgcttcaagtttaatcaagtctatagaaaaaaatagtaatattttcaatccaagctaattttattataaaaatatatttaattattaatttaataaaaaaactaatttgataatgtaaatattactatatttgtctataaactaagtcaaacttaaagcagcttgactttgatcaaagccaaaacatcttataacctgaaacgaagaaagtacaagacaactacaagttcccagctttctcttcccatttcgattgcggccatctatgccatcaaaatcgtcgtagcttcactactctctcccaatcatcactaagctccaacctcctctctgtcatctcccatggcggccttcttgcgaacgctgcaccggcgaagaacgcgcaatgccgccgccgccgcgttcttggctctcgccgtcgtcgtcgtcgtcttcttcttgtccgtgttcgtcgccacgcggaatgaggctgacatcttcttcagtggcgtcgcggcggcgagctcgtcgtcgccggattcctcgtccggtgggtgcagggagctgcaggcgctcgacggcgatggcgcgaggtgccggtatctgcgggcgcacgcgccgtgcgcgccggtggggtacgtggactacctccggctgctgtactgcgggttcgggcgggcgccatggctgggctacgcggcgctcgcgctgtggctgctcgtgctcttctacctcctcggcgacacggcgtcggcctacttctgcgcctcgctggaggggctctccgccgtgctccgcctgccgccggcgatcgccggcgtcacgctgctgtcgctcgggaacggcgcgcccgacgtgctctctagcgtcgtggcgttcgccgcgggggcacgcggcggcaactgcggcggcggcggaggggaggatgccggggatgt

SEQ ID NO: 22545 - DNA, 2221 bp, Oryza sativa
tgtcggtgctctggtcgtacgtgctcgcgcgggagctcgtcgcgctgctggtctccatcggcgtgccggccggcgtgaaggccggcgtgctgggcgcgacggtgctggcgtgggggaactcgctgggcgacctggtggcggacgtggcgctggcgacgcggcgcggcgacggcggcgccggggcgcagacgacggtggcggggtgctacgcggcgccggcgttcaacacggtggtggggctggggctgtcgctgacggtggcggccggggcgcggcacccgaaggcgtacgcggtggagggcgggccggcggtgtacgtgacggtggggttcctgacgacggcgctggtgtgggcggtggcggtgctgccggcgagggggatgaggctggacgcggtgctcggggtgggcctcctcgtcatctacttcgtcttcctctgcgtcagcctcgccattctcacgccattgccttcaccacattaacttcatttttcttctttgcaaattgaattgcaaagatgatgatggtgatgatgctagattggttgggttggttggtgtcaagtgttaatttgggtgattagttattaattaattgcatggtattttgttcatgcagaattgggaagatgaaatgctttgtagtagtatatgacttgtcatgaaatgtaaatagaagagcacatatagatgcaatgaaataatgcatagtagtactagctttttcaccggaatggttgaatagtgagatgatttgtaataattattcgagcatatagatgaacaatttaaataccataaagttataaaaatgaatatgagatagtttgctatatatatatatatatatagttttttttttggaaaactacgttatttaaaagttcagaaaacgtgcgcattctattagtctgaaatatatacaaatttccgaaatgttttcttttctctgtgagtacgtactactgaactagtacagcatacagaatgtgtactctacagtgactgaagcgtgtagctcgatcaaacaatttgattagcggaatttcgtagtcattaaatttgtttttagtggctgggccacaataataatttgattttagttggacttgcagagtggagtccttgctgggcttcgttttctagttgcattacacgaacgtgtatgatacgatacgattgcctatttgccatgtgcttctcactctgatacgattcccatatctgacatctagtagtcatcaactatatctaatctcgtggttgtgacgattatattactggtaattagtgacttaagagctttgtaaattacttgacaacgaggcaccagtggtctagtggtagaatagtaccctgccacggtacggacccggtttcgattcccggctggtgcattttgttcttcttttatttttcacagtttttcaaattttggcctgattaaaaaagaaaatttttgggtgttacactatatgtcggaaagagtttttgacacgaatgaaaaaactaatttcataactcgctagaaaatcgcgagacgaatcttttgagcctaactaatttgtcattagcacatgcgggttactgtagcatttataactaatcatagactaattaggctcaaatgattcgtctcgcgatttcctctaactgtgtaattagttttttaatctatatttaatgcttcatccatatgtccaaaaattcaatgtgatatttttagtaaaaaaaagttttgggaactaaaccaggcctttaacaccgagttttttttaaaaaaaatctttttcccttagaaaggagagagttttatacccatcaaattttaattcagagtttttttaattccttctcccttaaaatgaagaggatttttgtaccgtttccgagtcggagcagcagtcttgccctgactatttacgtgcacgtgatcgaactcaaacagtggatggatcgatcacccgggatgtcacggcggcggaggaacgacggcggcgaggccgatggccgcgccagcaagacggcgcggcggcggccggcgcatacgaagatgaagcacctctacctggtgctcgacgacggcgacgaggctactactacttacaccatccacaagctcgacgtcgacgacgacgcgggcattatccacgcgcccgacgtcgaccggccggcgactcggttcgcggcggcgccagcggccggtggtggccaaatgcact

SEQ ID NO: 22546 - DNA, 10368 bp, Oryza sativa
caggtcgcgtcccgcgacggcgcggggcccccggagtacagaaagacgctcgactacgacagcgtgtcgtcgtcgagaacaaagaacggcgcaacgcgccacgctcacctacatgggcgacggcatgttctgcgccgtgaagacctgtgagacgccgccgacatcgtcgtcgtcgtcggaagaaggtgacgccgacggcggcgtgaaggtccatgtcacggtgttcgggctcaagtacaatcgccggggagagctgcaggcgagggttcgccgcgccgccggcgcgttcccactgcccaagcaacatgtcccatcgttttctcctgtagccttctggatgtagcagctgcttgcagaaattttatttttatttttttatacttttttatgtattaattttattgatataccttttgaaaacatatttccgaaaattttatgaagtagtttgcttctcttgcattacattgtggaatatgatcagatcaatagtttcatgcaaattaaagtcttacatgatgatatttcggccactacacaccagatattgcccccaaaaaaaatgattgcacaaagttaacatatggctggacagtagatttcaccttttctttttatagatgtcccccagcttctattaaacttcaacagatgtacacacacaaaaagcaaagtctactgggtatatatacttgtttacagtacacaacagactcaatattgctatagtaaaaaaacactcatatccacaccaaaacaccacccaacatctgaatccctggaatcattcacaagcagcaatcaacatggttagcagcttctgagtattacagattgcattgatgtttaaagaaagaccttaagcctcttccggattgtgatataaaaaaaaggccaacacacaaaaggctagcgcgtctggtatattagaagtagcacatgcaaaatcggttcatgaacatgcaaaaggcttccaggttgtgataagctccactttcaatatacttgtacataagagaacaacaataaagttgaactggtaagaatggctgtggcacatgcgcacaaattcacagacaaatgagtagagagtttggtcatagtaagggggtgttcgggagagaggggctattagcccctctctaaaaaaaacataagtccttctcatagggatttatgtttttgtgagaggtactaaagtttagccccagtttagtccctccaaccaaacaccacctaaggaatcatgaataccatcacgatccttctgtacagactggccttaagtgactgaaaaaggtgtttcagtgtctgccctgaataagctgaattgtgcagggcttcaattcgcgtatatgaacagagtgttgtcagggaaatgatcagttgagttctttcaatgtcacttgtaaatgtctgctgtcttcgtggtcaaccttttggattccagaatctgtgtggcttttagtgaattgacctgaacattagcacaagaaatcagatgtatcaaacaaatgcgtacatgcgaaggtctgatttttgctagagtctacagattcactacacaccaaaagcagccaatggtataatactataatgcaactaagaaagaatatgaagattagaagacaagcagtactcactttagcgtatatccttgcttaaacatcaccttctggaaatcgcccatgagtcttggaaaattctgtgcaactataagtacaaatacatcctcttttgctcttgcactgtgctgcctgatgtttctgagaagtttaagaaggccacaaatgtcatcagaataataagctttccttcctgtggcaggatcaatgaaatcaagtgtttccttcaaatgcgtatttccatctggagcttcaacacccttcttccatttggtgtatttactgagtttggtcttaattttctcgtacgttggattatctgttgtctccattttctcaaacatgttatggagagacatgaagtgggcagctgatctatatccatccttcaaagtgatatagtcctctgctaaactgtcataacctctggcacaacgatcaatcagctcaatccactgtataatgtccaaaggcaaagtggtgaccgaaacaaatacctcctcgcgagtcatcttcacaaatctatctgtatccttttcaatgtcaccatcctcaagcttgttaatcactccctttgacagattaccaaatctcatgttaccacaggtatccattagaaaattttccgatgtaaaatggccaccaaatgtcagtccagcccagtgaaaattcttgagtagtacatatgcgttcctgatcttgcatttcacttcatttgacgttgtgtaagaaatatgtctacacatattcttctcttcttcttcagttgatgtgcttgctccttccttcggttctagtggatttgtccatggaatctgttccggtggcgacttgacttgaggtgttatggtttgaagaattaacctgtccttattgaacttgcagtagttcctcaggctggtatacattgtttcatccattttgcagacgaaaagattatggtttagatggtatgccttttcttcaaatgccctgtcatactcaagtttccttcttacagatcttctttggtaaccataacatggtcttaattttttgcttgttgatacgatagtgtcccttgcaccttgacttgttgctggagtcttgattagagcttgaatagcctgtaaattatttgccatcacaatgattaactaagatcaattgccaaaataacaatcagcagatgtgtttccatgtcaaatttttttttcacaagataaccaatcaacagatgcagctatttgcctatcaagacattcaaattcagcatatgagcagataatacattctaggacaaatctttaaatgtagcaatgcaaaattagtgctcgctaccttcttgagagagagagagagagagagagagagatgctagctacttacaggtgcatcattttctgggatctttattccttttatatagcagtcgtcaatccattggatgttaaccaccttcttgccttcaccgttccatatcagaacagctccctccgaatagtctccctagcaatttgaattaaatgtcaagaacgaaacatgtgttacactaataaaaatcggtagtaatttttttaccgccatagcaacatgagtgcagatgtcatagtctattgattgcagtacgaagcctcctagtacttcaattttccttttgctctgcatcatttagttcagaatgttaataaaacctggaggaagtaaattgttatcaatggactcccatgctgacaagccagccatattagtggtagaaaccaaaatgacatgctgcacaattttacagggtttcaaaattgaacgcagataaatcttacagagccaatcaacaaaattagatacgattcgactaacaaaattcgataaaggaaccttagatacattagtgaagtatagattactcctctaattcgttatcaggaaaatatatggagataaatcctctaattctttatcagcttgtacccttcaggcccaaagaaagggaaggacaagtcacaaaactcaccagattctcaaatagacaagcagtttggaattttggtgcatactaggaatatggcttgcttagaaggagtaaatactaaggggctgtgtagcagaaaactaagatggactggaaatgagtgattgtgtgatatgttccctactgttgataatcatgagcgtaatgtttcaatcttcagagcactgctttcaggtagaaagaacgcaatcttttcgcggaaagtatataaaatggaacttgttttttaccttgacattagatgagatggcataaatatcaaaatatgcacacgctgaaaatgcagtacgaaaaggagaagttcctgagaagatctggttgacagacacaatacttctgtaaaattgctgatatgttcaatttagtttaaatttcatcattccataaaagtcacatgtgtagattccttaacctgctgataatttgacttcatcctgatagcctaggcaccgataattaatctttaaaaaacaagtgtaaggaacgggatgtgtgctgtgtgcatgttgtggcctgaactaaggcagtaaaaatcaattaagctcgatgtccagttccgcatttcccttaaaccctaactctgcaattcgatgaaattggggaacacacgccgacatgtgaattatgagcaactagaactggggacattatctcacctgttcttttagaaggtgtgggaatccgtgaagtatgaaacgcatcccggcgaaagggcgattgattctgcccccgcgatctgctcccgccgctgatccctcgccgctgatatggcctcgcgcctcgagatcgatccccgactcctcatcgccgcttcggcgtccaaatccgccgccgcttcgggctcctcccccggccgtggatgtatcccccggcaccgccttgttcttgagccccgccgcgtatctccccaccacagccgccgccgccgcaaacgatttctccccatccgcagcggaccgcttccctgtctctgccttgaccttcagccccaccaccggcttgcgctcctccacctcccccgcgtatttcctcctcgaccccacctcttctccatccaccaccgccgcgtcgcacccctcctgcttcacggtggctttgctccgcgccaccgccgcgtcgcatccctcctgcttcacggtggttttgctccgcgccaccgccgcgtcgcacccctcctgcttcacggtggttttgctccgcgccaccgccgcgtcgcacccctcctgcttcacggtggttttgctccgcgccaccgccgcgtcgcacccctcctgcttcacggtggttttgctccgcgccaccgccttagcttcccccccccccccccctctccgaccgcaacggctccctcctccgtcgccgttttggcccgcgccttcggcttcgccaccgccaccgccgccgccgccgccgtagcggggtcccatcagcggcggcatgacctagccgcggcgcttggcgaattgggggcgaactgcgagaagcgagcgggaggaggcgagaggcgaaaggggaggggagacgagcgggagggagcggaaatttcgagttcgttgggctattggctacttgctgagctgtcctttcgttttgtctacccggtccggatggggccttgtgggtttttcactttttctttttctttccttttctctctctctgtttttttttgtgacgatgggagtaataaaacagtaaattccttctattttcttgcggtgaaaaattccttcagatatcagtatcacggccaaaggtgccacaaacctactgaatttaggcggttccaaaaacaaaaatttctatgctataacatcgaatgtttgatacatgcatagagtatttaatgtaggcaaaaagaaaaaatcattacacatattgcatataaattgcgggacggatattttaagcctaattgtatcatgatttgacaatatggtgctacagtaaatatttgctaatgacggattaattaggcttaataaattgttttgcagtttcctgacggaatctataatttattttgttattaggctacatttaatattttaaatatgtgtccgtatatccgatctaacaaccaaacccaaaaattttccccaactaaacaagcccttaggtggtgtttggatccagcgacttaattttagtctctgtatttagacactaatttagagtattaaatatagactacttacaaaactaattacataaatgaaagctaatttgcgagacaagtttttaagcctaattaatccataattagagaatgtttactgtagtatcacataggctaatcatggattaattaggctcaatagattcgtctcgtgaattagtctaagataatggatgggttttattaatagtctacgtttaatatttataattagtgtccaaacatccgatgtgatagggacttaaacacgttgaacggtactcccttcctcctaaaatagaaggaattttgggtgatgtgacatactatcctataccttataaatctgaacgcaaatcctttatattttgaggcggagaaagtattactaattagtactaatatttcgttgcggcaacatactgacatgtacatacgcagcccgccttgtcaggtttgccaccatcagccactaccttctcaccacaagctccgtataccccaccgacaacatcgacacaccgctgcgtgctcgtcggtcagctgaaggaagatgatgcccctatgtggagatagaggtggtgtgtggcttccgttttccagcgatggtggtgcggcgaggggccaggaatgataatgataaggtgaattaggcttgggtagcagcggctattcacattaattagacgactgtacggctcgggcatccaatcaatttggagaaaaatagaacgctgatgtcagcgcccaatttacgtgcaaaactattttaaactgatttttctcttaattacttatctaaatcattatccgattgtaccattaaattcgttgcaattaaatctttaaaacaagaccacacatggatatattccgacgaaattttttttagcttattattaaattattttaaatattgcacgatgttcaaccaagtatatcggaattgattcacttagtagatcgaaaatgtttcgcttgtttaaatcaggtgttgtttcaccgtatataaaaataatgtttcagcaaatagctaaagaatgttttagttcacagcaacatttgatccatacgtagtgaaacattataagtacactaggtgaaacatttttcggtggaataaaaaataaaacgaattcccttaataggggttcccaaaatatataggtttttttgttataatgaaatatttcagtttactgcaacattagatctatacatagtgaaacattgtgaatacacttggtgaaacattttgggtaaaaaaaataaaccaaatttccttaatatagagttttcaaaatatctagttgatttgttgtaggtggagacaggtactgtagtgggcctagcggcatgcaccgcgcacagggggcggggtagaggtggccaaatgggccgggccaaacgggcggcccgcggcacggccgttcctgtagcaggcacggcccggcacggcctgctacagtaacgggccgtgccggcacggcccgtgtagccgtgccgtgcttgggccgctggccgagcccgcgggccggcacggcacggcacggctcctgtagcaggccggcacggcacggcccgcggcacggcacggcccgggcggcccgtcaggccgaaagcgccggcggcgcgtgacagggcgggcggcggtccaacgggaaggcgacacgtggcactaacggctatttgaccgttcaaatttgaaaataaccgttgggaggctaaaaaattcataaaaaattcgaaaaaattccaaaaaatctcaaatttcgccctataaatagggcatgaaccccagccatttctcctcatcccacactcctcatcttgtgctctcaagtgttttaagtgctctctttgttctcaagtgtgcatttttttttattttgacaaaatttgctcaaattttgtcaaaaatcaaaattagtttcgtagttcaacagtttgatcgcagaggtttgaagagctcgcggttggaaagatgtaagtaatattcaaatttgtgtattatttgtattgtgtttgtgaattcaataaatattcgaaaatttgtttatgtcggtttaaattttcagaatggatccgaactttccataccagtcgccgtcgttcaccttgggtgatttcgaccccaactacatgtcggggtttgacggtacctccggatcggctccaactccaccatctgtggaggaggtaccggttcatacggctgtcgttgaggaggtaccggttcaggcggagacagcttcggaaggattttccggaaccgcgagcggaagtgtttcgacacacaccagctcgaagagatcgagaacctccggtgtgtggcaaagcttcgacgagataaaggaaacatgccccgacggaagggagatatcgaaagcccgttgtagaatatgtaggcaaattttatctgctcgttcttctggtggtacaggtcacctcaagcgccatgcggagtcgtgtgccaagaagcaaggaatacaactccggcagcagcaacttatggtaaacccagacggtacggtacgcagttgggagtacgatcccatggttgctcgggaatctcttgtccggttaatcgccaggcaagatttacccctgaactttggggagtcccctgcttttgaacattacattcagcaatctcataaccctaggtttaaagctgtgagtaggcaaacatcaactagagatttagagaatgtttatcacaaggaagcaactgcacttaaggaactgtttagtacatgtactttctctgtttgtgttacttcagatatatggagtagtagagctagagaggattatcttagcgtagttgttcattttgttgatgatgattggcaattacaaaagagagttttagggcttaggttaatagatgtctcacatacaggagaaaacatagctgaaagaattagggaagtaattaatgaatttaatcttgctgataaaatatttgctgtcaccctagataatgcatctgctaattctagagctattgaaatattgcaacctttattttgtgtgtatgctcaatcttttctactccatcagcgttgtgcatgtcatataattaatttgattgttaagactggcatgaagagggtaggtgaccacatcgatgctgttcgtcaagcaatcgcgtggttaactgcttctaacccgcggattgctgcatggaagaggttttgcaatgcggccggtgtggaagctcgtaagtttgccaccgatgcagagcatcggtggaatgcaacgtatttaatgttaaaagttgttttaccttatagtagtttactttctgattttgttcagtcacgtggtggcccaagaaacagtgacgggtcttcagtactgaacgagcatgtttgggcaattgtacaaaaattttaccaatttctagaaactttttatgattgtactctaactttgtcacatgtttattatccaactgctaatataattttgcacaaccttcttgaaattgctactttatttaaagaatacgaaaatgatgacgttctaactgaacctgtctttcacatgaaacaaaaatatttgaaatattggaaaaatatacctatgttgtatgctcttgcttttgttttagatcctaggtgtaaattaaggggattgtctgctattttatcacttgttggagatactataggtgtagattatagttctttttatactgaggttagacgtaaattatatgaggtttttggaagatatgaagtaaagtttcaggaagttcgccagcggagaccccctcctatccccactacaggtaagaagaagatacagtggggtaggatttggggtggatcgtcttcaagttcaatccaaggtggtggcagttcgtcggctacaagtggagacgcctcttcgcatgttgtggccgaagagttgtccggttatttggacagcgacgccatccaccacgaagcacaagatttcaacgtcctcgggtggtggaatgaccacaagataacatatcctgtgctttcaaaactagcacgggatgtgttgacggtgcccgtgtcgacggtgtcctccgaatcggccttcagtctatgcggccgaatcatcgaagaccggaggacgactctgcgcagcgaccacgtcgaaatgctactaagcgttaaagactgggagcttgctcgacaacatgcccaatacactgcggacaaccaagaattggccgcccacttcgagcaactctacctggatccagaccaaccccagtagaattttgttagaagtaagttctgacctttgagctgtactcttttctttgtcatggttttctcattttcccctatgagtttttacatgacaaagtttttaacgaggcagcatgtatcattgtatcctgtaatgatataaacattaataaaggtcattactatttttaacaaattcttttgcaatattttcgcaagtgtggatttacctttaaattatttcaaaataatgaatcacaatcaatatttttaaattttccaacccaacaaaaaaataccattttttataaaaattaggcattaccagatcattactttttt

SEQ ID NO: 22547 - DNA, 524 bp, Oryza sativa
ttaaactagaccaaaagtgagaatccccattcttatgtttgatttgagtcagagttttctttttcaaatacttgtttcttagcatgtcttgccacaaaccttctgtattctccaaattccacagccatttccccaacagagctttattcattacatctaaatctaaaatccccagccctccctgatctttagggaggcagatcactagccatttcactagatgatatttcctaataccttgatcttcttgccacagaaatctccttctataaaaatcaattttttctctaactccacaaggaagagagtataaagacatcatataaagtgggacactgctaatgctagagttaatcaaagcaaccctccctcctattgccaggagtttcccctgccagcaccccaacgtcttttcaattttttcctctacaggtttccaatctttgtgatggattcttacttgatttatgggaacacccaaatatttcattggcagtcgcccaatttggcaagtgaacatttgg

SEQ ID NO: 22548 - DNA, 1820 bp, Oryza sativa
ggcgaattcgagctcggtaccctcagcttcactcaacatagctatgccttccagattcaaagtaaaatcattctctggagggggaccaaaaagctgtttataaaaatttgttatatatttcattagatcactctggcctttaatctccccctcttcctgatccagagaatgaatcatgttttttcttttccttccattggctttagcatggtagtattttgtgttatcatccccttccaaaaggttttttttctttacatctctgcatccatttcaatctatcctctcttactactttcttcaactcttcctccaaatcccctctctcttttctttccagaatagtcattccatatgcttcacattttttatcaatgtcttctattttttccataatttcatgttttttccttttgtacattccttcccagttcatgttccaaccttttagtttctttctcattttttgtaaactccattgccatttatcaatactggatccatttatattacaagaattccaaacttgctcaaccacagtattaatatcttctctcatgagccaaatattctcaaatttaaacagaggagactgccacttttctccctcaacattgatcaaaagaggagtgtggtcagagtaaattctctctaagacccttccacatgccaaagggaacttaatctcccatttatcattaaaaagaattctgtccaatttttcaagagttacactttgtttgttattagcccaagtgaattttttcccttccaaggccatctctctcaagtttgcattctcaattatagaattgaacataagactccatttattcacccctcccctcttgtttttttcattctctcgtctcaggatgttaaaatccccaccaattaacaggggttcatcacacccataacaatcctgagctaacaccctcaagaactcctccttgtgttcaggctgggcagccccatacacagttattaatctccacacaaatttgtcatttctattttttactttaacatgcaacaaaaaattcttcttggaaacttccataatttccattttgtcttcatttattcccaccaacatacccccagatctacccctgggaatggtccaattccaactaaacttaccccctcctcctattaaatccaagtctttagcagtgaaatcctgcttcacagtttcttggatgccaatgaaatcaactttatgctcttttattaaatcattgagatgctttattttatcatgatcacccatacctcttatattccaaaataaacctttcatgatttcttttttgtttttttcttctcatttttgccactacatttaggagtgaccttgaaaatctcaaggtttcctctgttatttttcctcctcttttttcctgatgaattgctttgagaaagcctcaacatgttttcagcataatcaaaatcagacatacaatcatctgaatgtaagacttcatctatatttatgtctatgtcactcaagttttccccaacattttcacactcccctttctgagaagtatttagtttctctttcaagaacagatttattctagccaattccagatttgtatccacagcttctagagcacatcctaaattaacacctagcagactagccatttgagctagagagaaattactttcatcaactatagatgggatttgtttgttacctttgttgatgaaagcattaagagcctctttcctttcagctgcagcatcggccacctttttgtcttccttctccaaaagtcttagacttttcttcctcttctcctctgtca

SEQ ID NO: 22549 - DNA, 11344 bp, Oryza sativa
ttcctttcagctgcagcatcggccacctttttgtcttccttctccaaaagtcttagacttttcttcctcttctcctctgtcatgtcttcattagtatgagacagaacaactcccaccgctgcagcaaagtcacttgattcttgtgattccatgttctcctcactccccaccagttgcactcttggttcatcttcatcataaatcacctcctcactgtcattttccactctctgactagtaccacttttatctgccatcccttcttgtgtcttctttgttttcttatttttctcctccccagcatgtgcttcttctctgattccaccctctatcatccctcctgctacatctttatcaagttgaatctgcttgactttaaaatgttcttctagttgtactctcagagccatctccctgtctatctccatctgtttgagcttcaccatttctgcttgagcactttcattgtctgaatcctcttccacaactatggctttcctcttgtccccagccttttccaaaaccctcatatttgatgcagcttcttcttttcttggtttcttattcctctgcatgtgatttatgttgccaggttcattttgctcctccacctccacagctctcttttcctgtgcacaatctctaaaccatcccaactccacaatctgctccaacttgaaatgagctttgtaaaccagcaacttaggtgtcaccagagtcatggtcagaggcaagctttttagtgtcatcattcctactctaattctgaccacattctttgtctttaaagctaccatatccacttctatcacaggtcctagattggaacccacttcatgtagagggtcgtaatccttcatttcatcaggtaccccctccacagtcacccacacttcatgtaacctccccactgcctcagcttcttgagtccatttcttcactttcacctgtacagatattccttttactctaattgagtcaaattcagctaactcatccaatttcatcttatttgggaatctcatatggaacaaccctttctcctgcatcctagccttccaagtccagttccacttgaaatgttgagtgaatccttcctccaaagcctgctcagtaagatcacctccccacataattgtcacaatagccaaagggttaacatgttctttttgcactatacccttagcactctgaatcagcacacagcccagacctggggcagcacatcccactactttagctacaggtttcttctgattcttcctaaaacaatcctctgtcctatgagtctcttttgcacatatcatacagaacactgacaatttgcaatctctagacaaatgactgtaactcctgcatttagaacagaaaatcctctgctgggaatgggattcaccaacctgatgcttggactcaactcaattttgttgctgatttggctttgcttccaatcctgaactgatagaatccatcttggcacttgtttcctggaaatttggacccgcttccttcctcccttcagttttcagcgtgtccttcccctgtgtcacaccctaaaaatcctaaatatataaattgttgtttaattggaattattagaaatgattttaaaagtctagaagaaaagatctaattttaaataataaattccaatataaaagtgggcaagataaaattttaatactttacttgattctatagttcctagatttttctaggatttatttgaaccaaggaagtatttttaataaatggaattgcatttcatgaataatttaaattggaaaaggtttttaaagttcccatttggctttgtccctctctctcctctccggcccagtcggcccagtcagcctgcagccgcccgcgcgcgcgcgctcggccgctgacaggtgggtcccacctgtcggactcgtcgtcctcctcgcgccgaaaccctagccgcgccgcgccgccgccgcctttccaattcggccgcatctttcccgatccggtgaaatagtttgaggggaaatgctccccgggatcttctctacctttttccttttggaatcgatcgccaattcggtttggaaatccatggattcatgttcgattcggatcgatctatctcctccgaaccctaaaccttccatcgcgtcgccggtcgctgtgggccttcgccgccgcctccttgcccctataaaaggacccccggtgtctccgctatccgtcgccacccttgcctttgcccgccgccatctgtagcaccctagcaccgtgcagccgtgcgccgccgtcgccgccgcagctccagccgtgcgccgccgtcgctccggtcgtcgtcgctgctcggggaggtcaccgttgtggtcaccaagccgtcaccgatctcgtccacccctccgtcgtcgccgtaggtcaccggagcatcgccgtcgtcatcaagccgaaggtcgccgccgcttattccacgacgtcgtcgccgtccgttgatcttccgccactgttttggtcaccggtgagttcgccacgtcgccctctacgtgttggtgtcctccgttcgcgtcgtcgcgccgtcgttcgccggcgagcttgcgtgcccgagccgccgccagtgatgacgtcatcgccgacgtcatcgttgccgtccgtcgtaggccggtcgtagaccgtcagatcttggccgtccgttgtggataggatcgatctcggccgttcgtttccgtgagtcgccgctgtgcacccggtccaccgcggaccctagccgctgacgcaataattcccttttccttttcaaaaataattcattattgcgtcataattcaattaaaacccatataagtgttttaatccgatttaatgtttaaaaaatcataactaattcatcttaactcagatttagttggttcaagtctctaaatttttctaaaattgagatctacatgttaaaaatatctacatgtactgttcatgcttgtttatgtgctgttttggtgattttgctcttttctgtttagattccgacttttccggagagtccgttttcgcaggagaagaatttgaagagttccaaggccagcaaggcaagtcacacagatcccaaccaaccctttgagcatattgatcccgtttaaagctattgtttctattcaactattgcatttatttttgaatgtcatggggtggaattaacctattgtttgttatagcccttttgttcttgattactttattccttgataccttgggttattataacttgactagttgagctttatatattggttcagctagatatcagatatgattgcttagccatgcttagaaacattagcacaatattgggataacttatgattcactattatttaatgatggcttaatgatagttcacgatggtcaatcgtgattggttaattaattaaattgccaactaaaacttgataatggtgggttgtgagcacatggttttgttggtcgtgctcatgacaataaaggaccggttcacgattttcggttgtgaaacattaaccgtgccaaccacaagccagcgtgggcaacggctttaccttttgtataacatggttcattccggagcaccagactgagaagtggcggagataagcccacgggggtcgctggggagtccatgccttgtttataagggggtgattatgatccaggaacggtgagctgtggtggattgtgttgtgcgaggggtactgtcacagctcctttccgaggtactgtggtggtattgaggcgcatggtgacatgtcatgaggctgtgtcttgtgggtacagtggtacacctctggccagagcacaactattcgaatagccgtgcccgcggttatgggcgggtctaacaatgtctttcgtgattagtctcacacttctcatcataataaaagatgctataactggtaataatttgattagctcctggtttggaatggttaattcctggtttggagatagaactgtgcagccgagatgattgttcagaatgtgcagccgggatgattgttcagaatggttgggcctaagcaacagggtatgttgtatagcgttggattaatattgtttaattattacttaactgttttattaaattctgaaatgtttattaaatgctgtttatgcaaatgaaaccctactatgccatcctttgttatcctgtgcacttgcatatttgttgcgtggcttgctgagtatgtcatatactcacctagcaatcattcatcagaggaggagttctacagtgatgctgatggtgtggaagattaggtgtagccctggtcaagctgcctgtggagtggagtcgtcggcgccgtttatcttatttttttccgctgcttagatctttattgattgagaggaactatctacctctgtaatgacattttattcgcttattaattagagtaataattgtactctattatcaatttgttattgtgtgcctcggctgattcctggacgagggttcacacacatgtaagcgtttggaattttggatagaaattccggacgtgacaaattggtattagagcctccttgaccctaggttgtgccaaatggttacccatagaagccctctaaaaatattagaaaagtagaactgttctcttctctttctcttttaattaaaccaaactaatggcacatgcagtttataattcctttaattgttctcatttaaaaatttatttattattcctgtgttattagtaccgtacatctattactgtactaatggcccatttaccagcaaaagttttacaacattgttttatttaatcttgctgtaatgaaataaatttagcatgttgattttataactttcttttattttatttcttttgaaacctgttgttcaaaagtgcaaaatttgtaatcttgtttccaactgtttcaacttatcttgctagcttggtttactttatttacttaccttttactttgatttttctaactttattcaaattaatccaaaaacttgtgctattaattggataaaggtcttaactccctcctttcacttgtctttagatgccgcgctacaagcctgagtacttgtttggtgttgagcgatttgtccaggagttgcgtacgatgtcctttgccataggatttgggactgcccctttgtatgcccagattcctcatgatcgtgatgaagagaagtgccgagtcaaagtcaccttgaacagtaatagtgaagatatcccatcagtgatgttcgaagttggaggaggaaactacattcatgcatgtcaggaggtggcaaggatcgccataggagagctccgcgatcgctacagtgatcagttggccgacactgagtatcgctaccatcctcgccaaccccagggaggtgaccgtggcagctaccttgagactgaggggattgagaatgatgctaccacaaggcatttggttgagatactgtgggctatggatgagacccgcgcggaggttgtgctagcagctcaagatcgtgaagaccggaatcgtgataagatttgcaagctagaggacaatgtggattgtaacatcccggcctagggtttaataggattaatagaatactcataccaataagttgcaacttcttttccggaagccaatctccaaagaactccagggttaagcgtgcttggcctggagcaatttgggatgggtgaccgaccgggaaattctttccgggtgcacacgagtgagggtagtctatgacctatgaaagctatcagatgtaagtgggcccggcctgggggaggcgggacgttacatggatcgtttgggcccggcctgggggaggcgggacgttacatggatcgtttggagaaggaactagccgcattgaagggagaagcaccaccacaaaaggccagggttcgtcttaccgcaaggaagagagctctattcgtccctcgctaccaattggcgccaaaggttcgtgtggtggaaaaagaagctaccccaaccctagcggatcctccggtcgtcaacgtaagtgatgatgaaggagaagaatcgaagcgcacccactcaaaggtcgaatggggagctactcaagatgatggagacgagccgaacgagccttcaatcaactccgatgccggatgtaagcgcatgcgtttgtttgctttcgagtgttaggtagttggtgagtttagtggtgtgagagtcttcagttctgtaataatgaaactcagttaagatcaataaaagttaagttagtagaaaaattaattctctgtcctaagtagttttccccggtttctcttcttgtgctcctgcccatgccagatggtgctcactcgcagcatcgggaatggccccaacatcaacaataacaacaacaacaatggagagaatcccacacttgcccaagtcctggctcaacaggcacagcttatgaacatgatgatgcagcaacttcagaaccagcagaaccagggaaataaccatgcacctccctagaacaagttggcagaatttcttcgtgtgagaccgcccactttctctagcaccactaatcctgttgaagctggtgattggctgcacgccatagagaagaagttggatttgcttcagtgcactgatcaggagaaggtctcatttgcatcacaccaactgcatggccccgcctctgagtggtgggatcacttctgccttaataggactactgctgaacctatcacttggcttgaattcaccgctgctttccggaagacgcatataccatcgggagtggtgtctctcaagaagaaggaattcaagtcgctcacccagggatctcgcacggtcaccgagtatctgcacgagttcaatcgtctggctcgttatgctccggaagatgtgcgcactgatgaagagcgccaggagaggttcttggaaggacttaatgatgagctttcttacccactcatgactggggattatcatgatttccagaagttagtggataaggctatttgccaggaggacaagtataaccgcatgaagcagaagaaacgccggattgctcacttcaaggcacaacaggggaatagtcagaagccgcgtcttcctttaggaccccagtccatgccacagggaggttctttgtctgttgttcgtccgcagcgtcagttcttcaacaacaatgctggcaacaacatccgcaatcaagctccactccctgttgcagctccaacacagcaacagcctgccaagaaggagcaaggcagcaagcctggagtgtgcttcaactgtggtgaaccaggccattactctgacaagtgtccgaagccccgacgcgtgaaggttgtccctgcccagagcaactctaccgcaccagcatcaaaggctcgtgtcaatcatgttgctgctgcaaaagctcaaggtgctccagatgtgattttgggtacgttccttgttaactcagttcctgcaacagtgcttttcgattttggtgctacacattcatttttatctatgagttttgcgggaaatcatgggatggaagtagaagatcttagatgtcctttgatggttagtaccccaagtaatcaagcactctctttgcaacgtagcccctcggtcagaatagaaattcaaggagtaccatttctggccaatcttattctgttagaatccaaagaccttgatgtcatcctagggatggactggttagccagatataaaggtgtgatagactgtgccaacagaaaagtaactctcaccagcaatgatggtcgagttgtaactgttcatgcattgtcttctgagtttttaaggtcaagtctgaaccaaatagctttggaagagattcccatagtacaggaatacccggacgtgttcccggacgatttacctggtatgccgcctaaaagagatattgaattcagaatagatctggtaccaggaacaactccgatccattagagaccttatagaatggcagccaatgaattagcagaagtcaagaggcaagtagatgatttgcttcagaaaggatacattagaccaagttcgtctccatggggagctccagttatttttgtggaaaagaaagatcatacccagaggatgtgtgtggactatcgtgcactaaatgatgtgactatcaagaataagtacccgctgcccagaattgatgatttgtttgatcagcttaaaggtgccaccgttttctccaagatagatctccgatcagggtatcaccagttgagaatcaaagaggaagatatacataagacggcttttaccactagatatgggttgtttgaatgtactgttatgtcttttggacttaccaatgcccccgctttcttcatgaacttgatgaataaggtgtttatggaatacctagacaagttcgtggtggtctttattgatgacattctcatttattctcgaaccaaagaagagcatgaagaacatcttcgtcttgcactagagaagctgcgagaacatcaactgtatgccaagtttagcaagtgtgaattttggttgtctgaagtgaagttccttggtcacgtcatcttagccggaggagttgccgttgatcctagtaatgtggaatccgtaaccaactggaaacaaccaaagacagtttcagagattcgcagtttcctgggtcttgcaggttattaccggaggtttatagagaatttctccaagattgctaagcccatgacacggctgcttcagaaagatgtgaagtacaagtggtcagaagaatgtgagcagagttttcaagagttgaaaagtcgcttaatatcagcacccattttgattttgcctgatccaaagaagggtttccaagtgtattgcgatgcatctaagcttgggttaggttgtgttctgatgcaagatgggaaggtggttgcctatacatctcgtcagttacgtccgcatgagaagaactaccctactcatgatcttgagttagctgcagtggttcatgcgttgaagatttggcgtcattatcttttcggtactcgtacagaggtgtacaccgatcacaagagtttaaagtatatctttactcagccagatctgaacatgagacaacggagatggttggaattaattaaggattatgacatgggaattcattatcacccgggaaaggctaatgttgtagcagacgctcttagcaggaaaggctattgcaatgctacggaaggacgacagttgccattggagttatgcaaggaatttgaaatattaaatttgggaattgtcagtagaggtttcgttgcagccttagaagcaaagcccactctaatcgatcaggttagagaagcccaaattaatgatcctgatattcaagaaatcaagaagaatatgagaagaggaaaagctatcgggtatttggaagatgagcaaggaactgtatggttgggcgagagaatctgcgtcccagacaacaaagatttaaaagatgcaattctgaaagaagctcatgatactttatactccattcaccctggtagtaccaagatgtaccaagatctcaaggaaagattttggtgggcaagtatgaagcgtgagatagcggaatatgtagctgtgtgtgatgtttgtcagcgggtcaaggcagaacatcagaaacccgccggtttgttgcagcctttaaagataccagagtggaagtgggaggaaatcggtatggatttcatcactggtctacccagtacgtcatcaggccacgactctatttgggtgatagtcgacagacttaccaaagtggctcatttcatcccagtaaagacaacatattccggaagtcggttggcggaattgtatatggcaaggattgtgtatttgcatggcgttcctaagaaaatagtgtctgatcgaggtagtcagtttactttaaagttttggaagaaacttcaagaagagatgggttctaagctgaacttcagtactgcttatcatccgtagacagatgaacaaaccgaaagggtaaatcagattttggaagacatgttgagagcttgtgctttagacttcggtggaagttgggataagaatctatcttatgcggaattctcgtacaacaacagttatcaagctagtcttcagatggctccttacgaagcactgtatggtcggaagtgccgcactctgcttttgtgggatcaaacgggagaacgtcaggttttcgggactgatatcttaagggaagcagaagaaaaggtaaaaatcattcaagaaagattgcgtgtggctcagtctcgtcataagagttatgccgacaatcgccgcagagatttgagttttgaagaaggagatcatgtgtaccttcgtgtcacgcctcttcgaggggttcatcgttttcacaccaaaggaaaattggcaccgtgttttgtgggaccttataagattatcaatagaagaggagaggttgcttatcagttggagttacctcaatctctggcaggagtccataatgtgtttcacgtgtcacaattgaaaaagtgtttaagggtacctaccgaagaagctaatcttgaacagatagaagttcaagaggatctgacatatgttgagaagccaatccgtatcttggaaacaaacgagagaagaaccaggaatagagttatccgttttgcaaagtccaatggagtaatcactcggaagaagaatcaacttgggaacgagaagatgaattaaagtcagctcatccgcatctgttcgccagttcttccgaatctcgaggacgagattctgtttaaggggggtaggtttgtcacaccctaaaaatcctaaatatataaattgttgtttaattggaattattagaaatgattttaaaagtctagaagaaaagatctaattttaaataataaattccaatataaaagtgagccagataaaattttaatactttacttgattctatagttcctagatttttctgggatttatttgagccaaggaagtatttttaataaatggaattgtatttcatgaataatttaaattggaaaaggtttttaaagttcccttttggctttgtccctctctctcctcttcggcccaatcggcccagtcagcctgcagccgcccgcgcgcgcgcgctcggccgctgacaggtgggtcccacctgtcggactcgtcgtcctccttgcgctgaaaccctagccgcgcctcaccgtcgccggcttttcaattcgggcgtatctttcccgatccggtgaaatagtttgaggggaaatgctccccgggatcttctctacctttttccttttggaatcgatcgccaattcggtttggaaatccgtggactcatgttcgattcggatcgatctctctcctccgaaccctaaaccttccatcgcgtcgccggtcgccgtgg

SEQ ID NO: 22550 - DNA, 716 bp, Oryza sativa
tgctcttccccattttctcccgagccaaaagctatcagcaaaagtgcttggccaagaacttgcactgcctctccgccgaacccccggagcgacgttggtgccggtgcaagagtttgggttggcaagcccatcttagcatatgcttcggcgaagatcacgtcggccgaactccctccatcgaccaggattcgtcggacttcaaaaccggctatctcagctgagattaccagtggatcttgatgcgggaacaggactccttcggcgtcttctggcccgaaagagatcaactggttcacgtactgtggcgccccctcacccgccgaagtgatgctgtggaccatacggatctgcatcttcctctgccgtttcgacaacaggcttggcgggtcagctcttgtaatcacttggattacccttcgttgtgtatcttggcgttgttcggctaggggtatttgctcctgaactgcttcacggggtgcttcgactgttgttccttgctgcggccttgggtcttgcgcgttgccacgttgcctaatgtttaagcattgctccgtggtgtgcaaagagcgtccgtgaaaagcgcagtagaggtcttttcggaccttcttgcgggctggctgatgatggttgcttgcttgctgggcgtcgaacttcttgcggaaggcttgcacttcttcgacagccatcacagcctttgcccgccgatctgttctgaa

SEQ ID NO: 22551 - DNA, 562 bp, Oryza sativa
gctcaaagggtgggttgggatctgtgtgacgtgcctatgctggccttggaactctacaaattcttctcatgcgaaaacggactctccggaaaagtcggaatctaaacagaaaagagcagaatcaccaaaacagcacataaacaagcatgaacagtacatgtagatatttttaacatgtagatctcaattttagaaaaatttagagacttgaaccaactaaaactgagttaagatgaattagttatgattttttaaacattaaatcggattaaaacacttatatgggttttaattgaattatgacgcaataatgaattatttttgaaaaggaaaagggaattattgcgtcacaggctagggtccgcggtggaccgggtgcacaggggagactcacggaaacgaacggccgagatcgatcctatccacaacggacggccaagatctgacggtctacgaccggcctacgacggacggcaacgatgacgtcgacgatgacataatcactggcggcggctcgggcacgcaagctcgccggcgaacgacggcgcgacgacgcgaacgg

SEQ ID NO: 22552 - DNA, 18506 bp, Oryza sativa
  unsure (1)..(18506): unsure at all n locations
ataacttatgattcactattatttaatgatggcttaatgatagttcacgatggtcaatcgtgattggttaattaattaaattgccaactaaaacttgataatggtgggttgtgagcacatggttttgttggtcgtgatcatgacaattaaggaccggttcacgattttcggttgtgaaacattaaccgtgccaaccacaagccagcgtgggcaacgactttaccttttgtataacatggttcattgcgaagcaccagactgagaagtggcggagataagcccacgggggtcgctggggagtccatgccttgtttataagggggtgattatgatccaggaacggtgcgctgtggtggattgtgttgtgcgaggggtactgtcacagctcctttccgaggtaccgtggtggtattgaggcgcatggtgacatgtcgtggggctgtgtcttgtgggtacagtggtacacctctggctagagcaaaactattcgaatagccgtgcccgcggttatgggcgggtctgacaatgtctttcgtgattagtctcacacttctcatcataataaaagatgctataactggtaataatttgattagctcctggtttggaatggttaattcctggtttggagatagaactgtgcagccgggatggttgttcagaatggttgggcctaagcaacagggtatgttgtatagcgttggattaatattgtttaattattacttaactgttttattaaattctgaaatgtttgttaaatgctgtttatgcaaatgaaaccctactatgccatcctttgttatcctgtgcacttgcatatttgctgcgtggcttgctgagtatgtcatatactcaccttgcaatcattcatcagaggaggagttctacagtgatgctgatggtgtggaagattaggtgtagccctggtcaagctgcctgtggagtggagtcgtctgcgccgtttatcttattttttttccgctgcttagatctttattgattgagaggaactatctacctctgtaatgacattttattcgcttattaattagagtaataattgtactctattatcaatttgttattgtgtgcctcggctgattcctggacgagggttcacacacatgtaagcgtttggaattttggatagaaattccgggcgtgacaaattggtattagagcctcctcagcagcttgcagaatttcctcatgctttgccttcccatcctctactcctcgattcagatctggaggtggcggatgtggaccttgcggctcttgtcgcccaatctgcaaagggcggatatgtccccttccccctgcgtctcccctccagaatcgattaggcggcttgaaaggtggacgcggcctccatcctccgccctgatttgccattggagagccgcttcttaccaccttcgcgaaactccggccgtcccctcgaacactcgccgtccactctcgccgtcgcccaccaccgcctacccttggccactcctccacttctctcacctccccttgcgtctcccccttctccaatctcctccacccgccttggaaccctagctcctcgagactagctccccacaggtggtgtagaaacggagtcaggagagtcgactcaatggtgttccaccgatctccaaaatcgccatcgttgaatctcgacacgtgttgcccctccacctctctctcccccactattggatcgggccgaaaaccatgggcttcctccctcccctgatcaaaaactctctcgcgcgccgaggagcactctcccaactcccgaaggccatcccctccgccacgaatcaccaccggcgatcgtcggagcgccgcaggtgactccctcgtcgtctctcctaggattgaagagtttctgacgccgcgggtgactccctcgtcgtcattgattagtttctgacgccgaattgaagagaggattggattactgctggcatatgaagtgaatcaatgcaatacgattcgtaatgagttagcatcccaactgcagagacaggtcacgtatatacgtacgtatgcaggccggcctacttccaaatccaaattccaatacgattatacaattcaccgattgattgatttaatttcttcctgcttcaattcgatcgatcgatcggcgtcgaccagaaattaatcgatcgagtctatctagggaccaatcgaattcatcgagttcgctcaatggcaactgctgctggtagatatgaagacagcggagtcagtgtctctttccggcggaaggcggcgtacacggcggcgtcgctgcttgtcttcctcgtcgccggccagctgccgctctatggcgtcaagaagtacaacggcgacaaggatgtcccggatcccttgtactggatgaattgcatgtttgcgtcaagcaataacaccctgatgactcttggaatcatccctcttcttctctccgagatggccgtccgcatcttctccgcactcatcatcaccaggtggccacccttccatcatgtgcgcctgtaagctactccctcatcttttttacagtacttacaaaaataatggaaggtgccatattctgtagcgtaaaatctggtatctcttgatacctccggtagtatgagtatcgctccacagagttcgaattcgttttttataagttgtataataaaaataacaaatataaccctaaatatctgcatagtagtttagtataattttgtttaacttatagaaatcgaatttgatttgtatatttgtaaagtgatcgatgtatctcaaaattgatctatcttatcaatttttaaattattttttatcatttaagtggcatgtaaaaacgagaggatcctctcaaggatgaaattccatctccaatattagtaattgtttttttttggaactaacatgcatattaattttgtttgattaactaacatgtctgcatggatgcgtcatgcttgctctatatattgtggagattatggataccccatatctacatgacggttgtaatttagccggatatacggtaccaaatatagatggaatatctctataaagactcgggttaggttctaaacttatatgtcaaggaaatacccgggatcttagtcggttactattgtattttatctataatcccatattgcgttaggatatggactgtattttgtaaagtggactccttcccctatataaggagggtccgtgtgcctcttggggggcgattctttttccagtttatacaatcaataacacactcggcggaatcatccccggacaggagtagggtattacttcttgaataaaaaggcctgaacctgtataaaattccttgtctccaaacccattcactttcctagcttgatagctacccccttttattattgtcgaaatcttgtttcgacagttggcgcgccaggtaggggcagcgtcaagttatcgccaactaagtgcgatgggtttcgtttctggcatcgacgacttcgcctttcctcccgggtaggcgttccggttcggcagcctcaacttcatcaccaacgacttcggcaagatctctctccttgactcggattcaaaccagtcggggagagaccaggtccccgtgccgttcggtattccgaactcggccgaggcctactccaagatcatctctcccgagtcggcttcaaaccactcggataagatccaatctactcttccgcgaccagatcaagacgacgggtcctatccctcaatcctgatgaaacttcctgatgatttggccgctgtcttcacagtcaggacatctcccactcgaagatctaggcgagcttcggccccgatccgatctagatccagggaggttggcgttatactccaacctctcgggacagtctcgacggaagagttggatggctacctcagctcccccggcgtcagttctcgaccaaccgagatcctcgactacgacgatttcagctaccactacgaccacggcgacctcgacaacttcgacgacagctatgaggataactacacgcccctcttcttcggcgtattcatggctgacaacgaaacggaggaacagcgccaagcccaagaagcggaccaagatcgcgcacggaaagaagctgaacgtcgccgactggaggaagagcgacagcgacaagagcgagaacgactacagcgtgagcaacaggatcgcgaacggattgcaaaagaggctgaagatcggcgacaacgcgccttggaatctgggcggcgagcgagagagctcattgggcaacaagacgtggctccaatcggaactggagaaagggaaagaagccagggccgaagttgatcgcttgaaggccgaactggagaaggagaaggcccacaccgccgtgctcatagattattacaatctcaccgagccgaagatggaggctcttcggcaggaggttcgcaaggccgaagcaagcgctgcagaggagtcgcggcggttttcatgggagatggtgaaaaccaccgagtccgcacggacagcgtgacaaacgcttcgcctcgcccttactgacatgggcgcaaaagtgcggggtgtcccctccgaagatgcatcagccttcgacttctccgaatggacccaacaggctggtggttcagtttctgactgcgccaccgcatacagcgattgctgtgcacgcgtgtcagcggcctttaccatgggcctcctgcagcagttcggctgcgagaacatcgccgagtttcccaagtacgcaaagggggattgggaaatcagtgcgcaagacatttcgcccgcgcttcgtgcgtggcgaaaacaattttggcagaaggacgaccgctccgccgctaaggcgcaccttttggcgcagctggcgaaagcagaggcggtggacctttgtgaagatgaaggcgcggcggctggagggggtggaggcgatgcccgggaccacccagaggtgtgaggccctccgcccttctcttagattttcatagttttcttttggtgttcgctagatgtggcaaaccattgtatattcggcaaacttccgctaaaccttaaaaaaggctttttggtatatttggaatgtatgacacaatcttaattactttttgatgatcgaagtctttggcatatttttatttcactcgtttcacattatgccataccttccccttctttcgcctattcttaccatgcaaaatgtgttttgccttttctgcactgtctaccagggggtctgctgaaaatcgtgcattcggcccccttttgggagctggcgaggtcaaaacgagaaattcgtggcattgaaggggctgtcgaagacgcgatgtccatttcggccattttatcacgaaatggagataaacggtcgcagctataaggttatcaaggttgccaactggctacgtgcgcaccccgggtgaaccttagaagattacgatcttgttcactcaagacatttggaagatatggctcgcttttggcgaaaccatcagaagactaaacgccaggaatcgatctctcagcgtcgttacagtttagtctgtgtttcgccccctactattcttaaggttgtgtatgatattagtagtgatgacgaacctagttcgtccgaccattccttagggagggataatgattactggggcgaaaatgtaatttacttgtaaaatgaattgtatcgggttgtaaaccttgtattcttcgattatttttttgaagctaataaagaacgtgctttatttccttttcgctatttttcgcatcgtcacattttgtgcttttgttaggccggaacatgccggcccctttgcatatattagcgaaataggtgtactgacttttcagcttttcgtcgttcattttcgatctgtagcattctgtgtcgagagaaacgcttttgcttttatgttgatcggtcgtaacgtcattcggctatttattttccgagacaagctgttgcggtttcaacgttcggcgagcaatgcttcggccgattcgtttcgcccccctggcatttttcgctgatcaggcgcttgccttggggtttttccacaaattatcaatcacacgaaaagaaataaaaagaaggcggaggacacagagattttatactggttcgggcctccatggtggataatagtcctacatccagttttttttttctttttctcttctctttttttctttttttttcttgccgaaaggcttacatagtgccgaaaggcttacatgacagtatgtacatttttacaagttggcgatttgggtgccacccattctagacatagaagcgcttgagggaggcgacgttccaggaatggtcgaactcctcgcctttgagtgtcgctaggcgaaaagatcccgtcgtggacttgtgtttgatgatgtatggtccttcccactttgattcaagcttgccaaccgctactgggttcgcctttttccttaggacgagatgaccaggcattagctccgtgggtcggacttttttgttgtaagctgccgaagtgcttgtggcgtacttgtgcatatgctcgagcgcttcgacccttacaccttccaagagttcgagcgatacctcgcacccctcttcgcccctagagaacataacccttggtgagttagcccctagctccgctggggtcattgcctcatcgccataaagaagcataaatgagctaaacttggttggtcttgtgggggtcgtccgaagggcccaaaggaccgataacaattcttctggccatttgcctttcaccgccccctcaagtcttttctttagtgcttctaggatcttgccatttgtacgttcggccgccccatttgactgtgggtgcgcgaccgacgcgaacctgatttccaggttaagcccttcgcacatttctctgaacttatcagagtcaaactgcttgccgttgtcagtaatgaactcttttggcactccgaaacggcaaacaatgtttttccatacaaacttctgtactgcggccgaagtgattgccccaaggggttcgacttcgatccatcgagagaaatattccacagctacaattgcgaatttatacccatttcgcgccactgggaatggcccaataatgtccagcccccatctggcgaagggccatattggtgcaatgggctgcagatcatactggggcacggcttggcttcggccatgacgctggcaactttcgcacttcttgatttgctcaacacagactttcaacacagtgggccaataaactccttgtctaaatactttggaggccaccgttcttgcagcctggtgcgcgccacatagcccctggtgtatttcctttgccatttcttcgccttcggcaaaagagatgcaacgaagtaagggttgaagtaccccggagcggtaaagctgacctgagaccatcttatacttcgtggctctgtgttgcaaacgcttcgcttctgcttcgtctaccggaagccagccagtttcaaggtgtttcaccaatggggttcgccagtcatatgggtcttcgcccagtttctcttggtcgattgtcatgacttccgagctgtccatgggcacacttggagcatgtaggacttcgaaaaagatgccaggcgaatgcgggccaccacaagcagcggatttcgccaaggcgtctgcttcctcgttctggtctctaggcaagtgttcgaccgttatgccggtgaagcatttttccatggaccaaacagcctccagatacctcttcattccctcttcttttgcctcgaaggatttgtcaacatggcctgctaccaacttggagtcagttcgaattagcaggcgccggactcccagtgctttcgcctttcttaggcccaggagaacggcttcgtattctgctgcattgttggttgtgtcgaactgcaatctcgccgcgtaccaaatcgacacaccattcggcgaaaagaggactgccgcaacgcctgcagaaccgtcagagcacatcacccagaactggtcatcgggctcggggtcgggggcaagtactggtgtccattcagctacgaagtcagctagcacttgagacttgatagcagagcgtgcaataaaatgcaagtcgaacggggatagctctgccgcccacttgctgagctggccagtgacttccttgcctcggagtatttcgcccaaggagtactgtgatgggactatgactttgtgggcctggaagtagtgcttaagcttgcgcgaagccattactagagcgtaagaaagcttttccatttcaatgtaccttgtcttcgctccttgcagtgcttcggagacgaagtagaccggtttctgtccggactctgtttcttggacgagtgcagcactgactgccaccgacgaagctgccaagtataatagcagttcacttcctgggggtgggcttatcagagctggcgggctttgcaagtattgttttagctcgtcaaatgctgcttggcactctggtgtccaattaaactttcccgcgccccggagggtcttgaagaagggcaaacctctttcggccgccgttgagaggaatcgactgagtgctgcaattcggcctgtaagcttttgtacttcatgtacgcttgacggaggcttcatttgctggatggcatcgattttctcgggattcgcctcgatgcccctatcggaaacaaggaaacccaacaacttgcctgcgcggacgccgaaaacacacttctccggattcagctttatgcctgccgcgcgcaagctgtcgaacgtctcttgcaggtcgaacgcatggtcgaaagccttgcggctttttacgacgatgtcgtcgacgtaagcttccacgtttcgccccagctgcttgccaaggaccttgtacaccagcctggcgaaggttgctcctgcgttccttaagccgaaaggcatcctgaggtgacaaaatgtgccaaatggagtgatgaaggatgttttggggatgttgagcgggttcatgtggatctggtggtaaccggaatatgcatccaggaaagtcatgagctcgcatccagctgttgaatccacgagctagtcgattcgcggcaaggggaaatcgtctttcggacatgccttgttcaggtctgtgaaattgacacacatgcgccatttgccatttgacttccgcaccagcactggattcgccaaccactccgaatggtcaatctcttgaataaaccccgcccggagtaatttttgtacttcggtcttcgccgcttcttggcgatcggcagacatcttgcacaacttttgctttcttggcttaatattcggcttgactgctaagtgatgcatgatgagatctgccgggatcatcaatctgcacttttgttatcttgccgtgaggggtgggcttcagcatgtgcttgggccgctcatgcggttcggtctcaacattgtgcactgctctgttgattatggctagatcgcgttttgaagcggccgaaggctgaagccccttgactactatcacccctgttgggccaggcatcttgagcttgagataattgtggtgggaaatggcttcgaacttgttcagggttgcacggccgaagatggcgttgtagttgtatgggatgtcgacgacgtcgaacagtatttgctcttcgcgcctattttctcccgagccaaaagctatcagcaaaagtgcttggccaagaacttgcactgcctctccgccgaacccccggagcgacgttggtgccggtgcaagagtttgggttggcaagcccatcttagcatatgcttcggcgaagatcacgtcggccgaactccctccatcgaccaggattcggtcggacttaaaaaccgctatctcagctgagattacaagtggatcttgatgcgggaacaggacttctttcggcgtcttctggcccgaaagagatcaactggttcacgtactgtggcgccccctcacccggcgaagtgatgctgtggaccatacggatctgcatcttcctctgccgtttcgacaacaggcttggcgggtcagctcttgtaatcacttggattacccttcgttgtgtatcttggcgttgttcggctaggggtatttgctcctgaactgcttcacggggtgcttcgactgttgttccttgctgcggccttgggtcttgcgcgttgccacgttgcctaatgtttaagcattgctccgtggtgtgcaaagagcgtccgtgaaaagcgcagtagaggtcttttcggaccttcttgcgggctggctgctgatggttgcttgcttgctgggcgtcgaactccttgcggagggcttgcacttcttcgacagccatcacagccttgcccgcccgatctgttctgaactttctccaagtcatgggggcttggccttgccttggcggctgtccctggatcgccggctgagactggcgaactgataggggaggtggttcgacaatttgaacttgtgcttgagcttgagcagcggcgacgaaggctttatcgtactcagcttgtatagcttgccgtcgcttagaatcctcctcgccccttgcgaacccgtcagtgatgcgaagtaggtgctcgagcgtctgcggctccttgttggcgatttttcttgttagttcgccctcaagcagaccggccgaagcggcgtttataaccgacgcctcggttatgtcttgaacttggcaccgggcttgcgagaagcgacgcatgtactcccttatcgactcccccggcctttggcgaatgccaagaaggtgttgctgcgtcttcggctcctcataggtgcctcgaaagttaaggacaaaaacatcgcgcaattgctcccatgagtaaatgctattggctggtaaattgaaataccaagaacgggcgatgccgtctagagcgagatgtattaccatcgccttggtattttcatcaccatgagccgcttcgatcgctgactcgtagatggagaggaactccttcgggtcagtttcgcccgaataacgcgggacaggtgggaacttgaactggggcgggattggacgagtcttgattcccccactcagcggcagccccttttcgcctcccgccctgtttaccgcaccttgctgcgggtacggtgtggcgaagggcgaaatcgtggcttgtgcgtggagttgggccgcggcattcgactgcccggctccaactggtggtacttgctgggccgccatggatgggtcaaagattggctgcgaccacatcatggcagcttggattggtgcttggtttgttccgaagcctggggttggaacttgctgccaaacggttggcacctgagcagtgttgccgaagtcgaactactgtccttgactccacggcgaaggtcccgagcctggctgaatcggtggcaaccaattaggcgcaccttgacttgtattccccaccgggtgagccgatggggttgtacttgaaatgtagtggggttggttgagttgctgaaggaaagcttggagttgcgcctgcagagccgaagccccttccgccactgtttgtgtcgcttggccaggtggttgatgctgcccgacgaagtacaccggcggctgtgcggctagtggcggagagggctgggtcaccacttgcggccggacttgagaaggggcatagcctgccgaatactgaaggattggagccgacgtggccttggtccgccttgtcgcctcgtatgcttgttgttgttctagcatttggcaaagcatgtcttggagccgtgtcatgttctgccgcatggcttccatgtcggcttcggcttgcgcttcggggtccaggctgatttgggcctgtacaacggcgagcgcagttggcgccgccggctgtgatggggcggcttgaggcaccaccagttggtttgtcgaaaggatctccgccctggtctggagtgctcttgccgccgcagccgccttcgccacgtcggccgtgttcggcacttgcactgaggttgcgggggccgaagacggttgtgatggcgcgggggccgagggcgactgtgatggcgcttgtccttctacatcttcggtcacggacgccgaaggctctgctccttcctcggcggccatgtccggtccggcgtcgctctccttccacctgacgaccttctccttcacgaccctcttcagtggcattcgctctcagtggtttcgttcggactccccatggtcggcgccagctgttgtcgaaacgacaactgcgtacgtcgaaggacgtggttactcaacagtggttgggaaaatgaagtgtactaaattttgaatttcacttgggatcccccgttacatggcctagggggctatttatagccctattgcaggctcttactactaggatctaggttgtacaggggaatttacatgattacccttatgaaagggacatttacaggggtacataatgttatagggtctcatgggcccctgatgggccgtctagtgatcaccggcccttaggcttgatgggccggaaaggcttcctcggcccttgcgggggcgaacttgccatggcgaagtcgtcttccttcggcagatagtcttcgccttgcacccttcgcccgagacgcccctggcttggcaaggccctcgcgcgactcttcgcctcacgccgttcttgctccatagccttcgccacgggtttcggcagatctggtcgaagagcctcatgccatccgccaacaaacgtgattttagaaacatttagaaaaaaataatctaatttggagtttatataagtgcggtaaacttgttttaaattttattttaatatacagctccttaagacgcccgtatgtaaaaatgagtttatttttgcatgcggaccttttaagaggcccgtatgaaaaaatcaatttcttaatcaaaattagctaactattgcaagaagaggaataagtctattttccctcgctaatgtcttactcttgattgaatcctctccctcaaccacaaaattggatataagaaaattactaacactaaaatttagaaatgttgatatgttctattagaaaaaataacgagctatatctcttccttgatttgagaatctcggtttgaggggttttttactttgatatttatttgttaccgtattcgttccgtttcgtattcgctccgtatatgtattcgacaatattcgattccgttttcgtatccggagtttccgatttcgattccgattccaaaaagaaaatatgaaaatgaatatggtagagctagtttccatccgtatccgttttcatctccaatgacatcgatcgatcggtagccagatttggctcctttttcttgtgcgcgcgcgggggatcttgttgtcgagtcggatccgctcacttttgatgggccatatgaccatttgggccagagtaggaaggcccattttggaagaaagttacacctctatttggaccaaatattctactactatatactacggtgtatacgcatgcacagtgtacgtataccttatgcgtagttttagccttagaattactttatgcgtctactttgccattttagtttttttaaaaaaaaaatcttatgtgttccgtgaactagcaaatgtatgtgagtttgaatggcaagtggaggttcgctgctggtttgtgaaaacgctaggggattaattaatattgccaagttttaataggatttcttatatatttatcaaagtttggtaagaaactaaatggatgcacatctttaataacttttatgaaaaaatgatatggtttaaaataacataaatatggacaacccttagttgttaattttattcacctcatatataaaaaaaatctagataacggctgtaggaataggataacttgaaaggtatatgttatttccatcaaaacggttggacaggcatgcggcacgatttcctactaagcggtaggcggcggcgggcggtcggctgcgccctcccctctgccagagggaaggcgggaggcggcagcggcagcggtggattttgtttgttctttttttttagaatttgtgattcatggtatggatctgagatatataatctgtgatgtatttgatttgtgatgtatttttttggagaattttttatatgaacttatgatttgtgatgttactttgattttaggatatgtagggcactcgatttgggaaaatcatgtagggatcaactcgaaggaaaaatcaaaatgcaagcagcaaagaaacaatgaaaaaaaaagaaaaaaatgatgaccaaccgggactgccactaccatctttagtcatgattggtaaacatctaactttagtcccggttatttcacccgggactaaagatggacgaccatctttagtcccgggttgcatttagtctcggtttgtaatataggactaaaggggttgtaaaccaggactaaagaagagttttccgggagtgaaagtaaacgatcaaatatattatttgaatgtatagcaatgcattggattttcagatggaccaagcggctagtaaattaatcagacaaaagtataaacgtgatttttttatcattatttgaacctttttaatttttaattttaaaataaaccatctcaaaacttattaccaaaatctaaaacttttggtgtaacaaaacaatactgccaccagcgggtgtggcagtttgccatgacaacgccatgctgttacattagctataccgatgtggccaaataacattgctacgtcatccacatcgatatgggagtattattttaccacgccagcctatcttatactgtggtagtgttgttttgtcatgttagtctgactggcgtagctaatgtttctgattttgaaaattagttttagaaaaatttattttaaattaaaaatttaaaaggttcaaaaagtaaaagaagttctagaaacatgttgtagacacaaaattaacacgcgttattgattgcttcaatttcatatctagcgccaacatggcagcatgattaatgacgcattttccttaatcccctttggcaacttaattatatccaactaaaggataaaattcaagtgaggaacgaggatccccaaaacttagcgaagaaaattatcaccagttatttctttttaataatgaaaatgtattacatctctgccatctgtcataaggcatgcaaccaattagttcttattaaaataaataaaatgagttgtgggacaaatctccagttaccttgaaaaataaaagcagatgacacactaaaatgatcaccagttaattaattactagagaatggaacaatatatacctccaaaattatagtacgtcgtgttaaattatacaaagacatacatgtgctccatgtgccacactagttgggagctgcttctttttttatttatttcttgtgaagactgagctgatagattaattagtcctcttattttgtttatttcagtttaatcaaggattaatgactcttcagccttgcaaaggccatcatatcgaattaatgacccatactatttttaatcgcaaaaaaatgtgaaaggaatgatcgatcgatatcaataaaacttaaggtttttgtataccatttcagatgagctgccacgtgctaccttgctactgtagaaactacagtccttgcatgctatccacaccgttcgattgtggctgcaagcatctctgcccttgagcgtgtcttcccagggagcctcggctgctctccaggggacccccatttttttccccatcggttgattcatcccccagcttctctatttgcacgcagttcacacgcttcctccgtcgatccatccagcgccgccggtggcatcgccgcctcccttgcccagtgtgttcttgcgtcttctttggcttagctgtggacggccgtggtcttctgctcggtggcttcgtctccaccatctccattccatccgtcagaggctgtcgccgtccgcgagtagcagcagcctctcctctcccagtgacagtccagttgcgccaccaccgacgaccttttgccttaccggttggttctccggtgcccattgccatcgtgtgcgggagcaatgccctctttttcccacggcagtccaggcaagaaaatccttctatccccattgttgtacagaagaaacccttaggcctttagaaatgtcgttctttgatttattatgtaccattgtgacagattcccttaacctgtatttttaatggtgcaagttacttattatcaagcatgtgattcaataatccctactgattaagcatttaattgaatttagcctgctacagtggttatgggatggttgcctgctgcccccaagtccacgacatacacatattaaagttgtccatatttaggttcatgcttagctttccataatactccattgtgtactcatctgcttgctttatgattttgttttgccattttgtataaatatctaggagtggtttggtgatggggatggatgcggtgcctgacactctaacaccaacaccattttctcagctaacttagggacaaatgagacagagaacaggccaggtgctactcctacacattattcggcatattcaactttctttgctttttctcaattctcaactacagttttcttatgttgagcggaaaacttattgatgatttatttctttgtgttctaagtgctccaagcagtgaaagctctaaccctaccatatcttttatctcaactcctgaaataggaatctccatgtcagtgttttgtcgtccatttcaacgacccgttaacaggaggcttgcatttaaccctatcaatcctgctactccaatagatcaacattttgtctcctcatcagatggcccaacagtgccaggtgttcagtcccttcctgcagtgcgcggtaaaggtaagcccctctattaagaattaatctctatttgattgtgctcaagcttgctatactaccattgtatcattttagattcataaatgccagttcaggtacctgtgcnccatagtgacatatttgttccctttgtgtctgctcatataaaatttggatgcttctcacattggcataggtcctttggataatattggtttgagactgcctcgaccagatccatctattgctacggaagcacgcaagaagcgtaaagtcacaatggttttaaggagaggacataagttacccatatccaatattttctccttcaactaactggcttatttgttgcttccattggttcctacatttctatttgatttcgttcagcaagtgctgattcgaccaatctatagctcctcaatttgtgattgttacattaggagctggacctgatgatttctcatcttcatatcgatgtgttcaacgatgtatttccccacaagttaatgccaggcattgtgatgtgcggatagccaggaataatgggatgagtactactattggcgcttctccttcatctcacattgcccaaaatgacacctccttgcatagggtgaatacatgtcaacgaagccgtgtagggcggtccagagctgatggtaccttatttagtttgctatgatttttccttatttttacctgtttgggaatatgtgattacatttggcattttctgctttctaggaaattttgtaccccttcttgccagtcgacatcgccgtaagttcttttcttgcacatgctttgatgcactaaatttatacataacatctgcatgctcaagacttataggggtgttcccttattattaccagctgatcatgatgctgctcgatattcaggctcaacctccacagttcatgttccgaagtaatttttgctgctcaacactaatgttctatctcgatgatcgtaaagcttctcgacaataatactccacccaatgatcttttttctatggtgaaaccacttaaccatgttctaatttatattatatcatccttttacaagattttccattctaatttttctcttattcctttctattaggtactattttcacacctctcaatttaggaggccctacccatacttgccaacattgtggtgctcgattctggtatgaggaacgcgtacgtgggtgtggacgaacagctttgcaaatttacaacaaatgctgtagaggagggagcatttatttgcctccatataggccaccaccagaacctttgctctctcgtttaactggacgagatcgtgttttgtccaaccacttctttgaaaacatcagacgatacaattctatgtttgctatgacatctatgggtgtaaatatcatcaactcaattaatgatggtcatggcccttacattttcaagattagtgggcagctatgccaccgaattggatcgcttattccaaagcatggtgcaagaccagaatattgtcaattatacatatttgacactgagaatgaaataagaaatagagtggctgttgcttcacatagagagatgagttttgaaccaaatgaggatattgttgcatctttgatgtccatgctcaatgcacacaacccagttgttcagctctttcgaactgctcgtgataggctgcatgatcagttaggg

SEQ ID NO: 22553 - DNA, 2216 bp, Oryza sativa
ggatattgttgcatctttgatgaccatgctcaatgcacacaacccagttgttcagctctttcgaactgctcgtgataggctgcatgatcagttagaggatcattactcagtgaagttatttgccacccccaatgaacatggtaatatctactcagccccagttgcatcagaggtggttggtttgatggttaatgatataagcactaccgagaaaggtcgtgacttaatagtagaggatcactcattgcagcttcaaagggtaaatgaaactcattgcaaatttatggcaatgcaatacccgctattgtttccttatggagaggatggttttcatgaaaatctcaagtatagacaatgtcaccgctcaggaatgatcaaacggaagaaagttagtttggtagaatactttgcatatagattgcatgatagagatgatgacttcaacaccccattgcgttgcaagaggctcacacagtcatatgaggttgatggtttttgttgtgtcaaggatagccgcttgaaccattataggaaaaaaaaaacttttcagctgaagtataggagtagcccctataaagctttacttgatacagtcagtagcggcattattgatgcttcatcggtaggccagaggattattttgccaggttcattcactggaagtccacgctattactaccaaaattaccaagattgtgtggctctctgtcgtagatttggatgcccggatcttttcatcacttacacgtgtaatgctgcttggccagagataacagaagctttagcatttataccaggacaacaaccttctgatcggcccgatattgttgatcgagtttttgaaatgaagctcaagctgtttgttgatgatataaaaaaaatatgagttctttggtcccatactcggaagttagctcgtttaattactatgttttaattcttatgttttaatatgagttcttatgttttaattactatgttttgtttcagttttgtttacctcaatattttttttcagttgtctacacgattgaatttcagaaacatggtcttccgcatgtccacttgatagtgtggcttaaaaaggatagaccccttgatgccgatcagatagacactttcatatcagcgcagttaccagacccatctattgaccctattggttatgaggctgtctcacaattcatgattcatggtccttgcaatattccaggttcctcttctccttgcatggctgatggtaaatgcactaaattctatcccaaggaattttctgacaaaacagttgtgctacctaatggccatgttaggtatgctcgaccaaataatggaatcatacaaagaaacgtggcattgagattgataatcaatttgtggttccacataatgtagacttattagttaagtatcaggcacacataaatgtggaaagtgttaatcgtgatggtatggagaaatacatgtttaagtatacaaacaagggccctgattttgctaaagttggaatcaaaagaaaaagatacccccggttcttctacagaggaaataaatgaaataaaggaataccttgaatgtagatgtgttacaccacatgatgcagcttggcggcttttgcaatttgatatccatcacaccgatccagccgtggaacgtcttccagtgcatctcccactagaaaatggtgttgtatttactgaggatgaccatcttcaccaggtgattgataatccatgcaatctcataacaaaattgactgcatggtttgaggcaaacaagacatatccagaggctcgacaacacacatttgtagagttccctgaacattggacatggcatggtgatggaaaattttggaaaccgcgtcgtaatgcccgtggaaaggttggccgtatagccaatgttagtcctaaccaaggagaaagattttatctgcgtatgctattgcatattataaaaggggcacaagacttttctgatcttcacaccatggctggccaactatacccaacatttcgtgctgcatgtcaagcattaggtttacttggtgatgattgtgagtggtccaatgctatggctgatgcagcacaatgggcattaccataccaacttcgccagctatttgtcacattacttcttttttgtgaagtcactgtagcgcccgttccgtcgtggcgcctagcgggaaaattatctcttaaaaaccctaattgcgaaat

SEQ ID NO: 22554 - DNA, 13891 bp, Oryza sativa
atctcgtgacctcgtcgccgtttccctctttctcccgccgccggttgccgccgccgcaatccgccgccgtcgagcaacctccggcgaatccgagccgttggctcgtctccccttgtcacgtgcaaccgcccggtgtgcacgcttttgcccgtatcgccgtggttcgctccgccgctcgccgccgccggccgccgtccattcgcggccgggtcgtcgtctacctcccgccagcccacgtggccgccacgtaggcgccacgtcggcgccagctcagcctagaccggatcgagccgaccccggtcagtccctccccgtgcgcgcgttccaccgcgagccgtgaggctgcgcgtgggcccgccgcacctgcgtccaccgcggaccgcgcgcatgcaccgcgtccctttcccgcccgcgcgcgtgcgtcgcgtgctccctccgcacggtgagccgagccgctaacaagcgggtcccacccgggaccgcgcgtgatgagcccggtccaccggctctctctctcctccctcccgcgcgcgcgcgagtttgggccgccttgggccggccagcccatttagcttggccagaccgctccatttctcttgggccgcgccctagccatccgagaaaagtctatattccctccctcccttcttttctttttcttttccaaaaaaggatttaaataaatcctttttcctttagaccaaaaatccaataatcttagaaattcaatatcttcccaaccgtaaatccgattgactccgttcaacttccaaaattcctcaaatctcgagatctatctaatggcacgcttagaggtcattaatagggctttattttcgccgtttgttgagttgtcccgtttcgcgtgtagtttcggagcccgaagacccgcagtgcgaggatttcgaggatcaagctccggatctcgagcaaggcaagccacctttgaacatcttgagcctatatttgaaatttaattatattgcttgcgaaatattatgcattgataggatcacacttaatctgttgtcccgtctgcaaggcagattggcagacctacctaatttgttgcatttgatccttcctttgttaattgttataccatgtccccttgtaaccacccagttgcacctcgatattcgtgcactctgtgcaagtatcgacggtcgccttcaaacttaaaatctgagaaacaacttgggtaaaactggagttttacaaaagacttggaaaacccgacacctgggtcggtgcttgcgaactaaatgaatttccaaaaccgcggaccggggaacgtaccgggtgtacggtttcccgctctcgcacttaaggaccgattcccttggaatttcatccaaacataagacaagtacgaccacatgggtggaatgggacacccctggctgagtaactagcttatcaggggagccttgatgccgagagacatgtggattcgccggggtggtgtcggggaggacccctgggcttcctggcacagtatggtctgggacctaacctgttgttggtctgggacccctctcgtcggcatatggtaaacctgtatcggctttcgaaatgccttgtcatgaaagcttggaggtctcccgacgtggctgatccccacgggctgggtgatccgggttagtaatgtcgtgtgggtaaagtgtaccccctctgcagaggttaacaaactgctcgaacagccgtgcccacggtcatgggcggatgtgaggtgattcctagcgtagttttgtttgactactgcttgtgaaattgttgttgtgaaaaggggttcgatgtttgaaaaatctgcagctgatgggatcagctaggcccgggtggccgtttgaaaagttgttggcccgggtggccgtttgaaaagctgttggccgggtgccaaccttgttgcaatcctaaagactgacacattgcacatactccgaccggacgagacgcactgtctcatccgtgtcgtttgagaagcactcacttagactttttagaaaagagttcaaacaaaatcaattacgaaaacaacagcctttccttgaagcctgcattaaacacttatttcccctggcttgctgagtactcccgtactcacccttgctctatataaataatccccccccagttgctgaagaagatgaagtggatcctactgacgaggagttcttccaggagcaagtcggctacgatgagttttagggtttcggcctagttcccaagtcgcgcctgtgatgattggtccaagtcctggcttccgctttccttttgtaatgcagttgtgagctcgggatctgtccgcagcccaacatgactgtacttctactctataataaagagacctctgttgctgtgatactctgtctccctgtgataccagcactgtttcctgggactggtatcgattaacaggttaatttggagcgtcacgggctagttccggtcgggactagttcggggcgtgacagtcaccgacccaataaaattgcttgaagattatatcaagccaatgggagaagatttggcatatcgtactattcggcccacacaaggtatctctcaaccattagtgcagcaacacattaggtcatatgtcttggatgaattagacaaattactcaaagattctggatatagcctaggtcacttcaacttgccagagccagaacaccatgattacaatgttttgaacaacaggttggtagtggatgagctctcttatgaccttgatgctactttagtagaagcaaatgagcaacttaacaataaactcaagtcagagatctatttatgatgccatagaacactcagttctgaatggttcaggtcacactttctttgtatatggatatggtggtaccggcaaaacatttctgtggaatgcacttctcaataatataagaagtcgtggaaagatagccttagcagttgcatcttctggtatagcagctttgttgttgccaggtggtcgaacaccacactcacggtttagaattcctatagatattcaagagtattccatgtgtgctattaagaaaaatacacatgtcgctgagctcatagaaagaacatcactaatcacatgggatgaggcacctgtaaaccataagcactgttttgaagcacttgatcgaactcttagagatatcatgccatcaaacaattgttatctaccaaacaagcaatttggtggtgtcacggttgttctaggtggtgattttaggcaaacattgcctgtcatcccaaatgcaaataagcagcagatcctcaatgcttcaatcacacgatcccatttgtggcagaattgtgtggttctccatttaactgaaaacatgagacttagatgcccaacactttctcaggttgataggattgaattagaacagttttctcactggcttctttctattggtgatggcacactacctaatagcatgccaacagatcgacctgacacaacatggatccaaattccagagtatcttttgttacctgctcaggaaagaaaccttacaggtttaatttcttttgtctatgagtaaacaccagatgcctcagaattaccagcctatttgtgtcagcgagcaattttggccccaacaaatgaggtggctgctgctataaatgctcagattattggccagatagctaatgaggaaatgtcatattatagctttgatacaattgatgataccacagctaactattgcactcttcaagacctgtatcctccagagtttctcaacacggttcgcatgagtggccttccagatcaccatttacaacttaagattggtgtcccaataatgttacttagaaatttgagtccatccaagggcttatacaatggaactagacttattgtgacgcagctcactcatcgtgtaattgaagcccaaataataacaggaagcgctaaaggttctaaagcttatatccctagaattgtttctgtttcgacagacccgaaatggcctttcaagatgagacgtcgtcaatttccagtgcgtgtttcatatgcaatgacgataaacaagagccaaggatagagacttagcaaggttggtgtttacttgccaagtcccgtgttctctcatgggcagctttatgttgccttctcccgcgtaacatcttcaaaaggattacgaatcctcattgaaaataactctgctgagtatgaaagaaagacacataatgttgtgtattctgacattttccatgatatattaagccaatgttgtcagttctccccagatacccatgtccaatagatcagctttcttactacaaggtatttatgttttacaatttatgctctggtagtctgtttagtataatcttttttatgcctgaattttccatattacatccagtagacaacctacacttgctaatgcgtttctcaatgctctttgatttattaaagtgtatctgtcatcaacggagtgcacaacacagaaccatcttcatatatatattttagtaatgcagtcctcttgcagttctatggttcttttgaaaggagtgacttaacaacaatacataataacaactgttgaatttatttcaagctaaagaaactgtagtgcttatgttgttcagctatgttttcaaagtagcttacttcctgttcacatgtaaattatgtgctttaagtcatgtatgcacatcaaattaccccatttcaatataaatttagcattcttaaatatggttcccaccacctcaggtttgatttttcttttgtcccaagttgatatatctgatttctatctttctacatatccaaccatcctacattcatagctaaacatacaaattagataagtaatatctaaacttacatacttctataatccacatggatatatggtggtaagttcttatcattacttattgttgatatagataagcacagttctaatgctcctctgctcatatgttaacatgagtaaccattttgttacattgtactgctaaattttaattctatttggacagcccattgttaaaagatattctcccctcaacttcctattgaatggtaataggaaatgtcccatttcttattgttttatgtagagatagagacctcaaattcacgtctcatactatcgggtaatgattgacaagtatatttgatctgagttcattttacttattgcagatcaagaatgacatataaagaagaatattacttaatattatatgagggaatttctatcgtttaacaaggtatgacatatgacactgaaaggaataaaatttccaatttataagctcaagagttaaactatgttcctatcagaactaaactgaacgatctatgcgctttggcttcattttagtgtttattttgtagctcctttacatggtgatgaaatttccattaggcgttgatgcaaaattcaacagcgcctactatttcaggattaccaagtaggtactgcaggagacgtgctcacatattatcacaactactctgttttgccacaaatgatgcctatccggacatgtgcaacttggttatctcttctgcagttctgctgattgatcctactgatttacagagcttcttaatgtatgttttattcttagtggttttgtatattctcatatgagtaggctgagatttgtataaacctaatgccatgcccaatgttaaaaaaacatgtaggatacgatttaaccctatgattgttgtactgaactttccatctaattcttccaatatttagtgcccgcggcaacgctcggggtatagagtagtataactatatcagcgtcatgctgtcaaaacatatctacacatgcatacatgtgtacttttatgtattttatgatttgatcgcatggcatctcttgatatggatcattatcatttcataattaagctgcagtggtatatatatatacatatactgtatggccaaggatagcatgccacgagcaaagatatttgacgtcgattaatctatatgcatgattcttgctctcacaaattctaacggtctcggggaataagccaaacgatatatttataataaaaaataatttataaataaaatttttatatatgtattattagcgatatataaaagtaaaggctgtaaaataaatttcgataaaaaaaacttaaaatcaactttaaattaagattgaaaattcaaattctggctggtaagcataaatataaatgcaaagatgaggctggttgatgaaaggcacgtaaagttaataagaacgatcgatccatatgaagctgaatcaatcaatatcagtctctcattttcggtgatctgcccgtacctggaccaaaacctgcatgaggttgatccaccaatgtgtatgcagcgaactgccgaggttcactcgctcacggtttgcaatctcgttttgggttgaaatgcgagcttgtttgtttgaatggacatgaatattatcactatctttccaaatccaattgacgactctgaataatcagatcgatctgtagtccatggatttatgcaggtgaatgttgatttcccacgcaaagtgtacgtagatgggatatttggatttgtataaagactttgacttttttaactgggactggtcaactaattaattggttccaagacttattgccaactgtactactccattatacaagaatatttttccttagtccccacaaaacaaatattatgggaaagagtgcaagatactctttatgggaagggacagaattttgcagaggattaatgttttttctctaactaattctttacgtaaatataaaattacaaaagtagtataatactatgttacacaaatgaatttgaccacatcaattttcacatatatggttaaacgcacccattatccaaaacaaataatcataatgattatggtataatatgtgtgtgtgtgtgtatatatatatatatatatatatatatatatatatatatatatatatatatatatatatatatgccaccttgccaaataaaatggcattactcgttgtgggcgtctgtgtttgtactgtgtttcttaaaaaaatgacagtatttctctatgcgaccgaatagattagcactatccccttcccccttagcgtatgacaccattaacttctgtacacatgttttatctttaaccttactgaaaaaatatgtaataataataatattttttgttgttatttatttttaccattaaagctgctttaagtatgacttacatatattcttttatatttacatttttttaataaaatcactgttcacgcactacaaatcgatgacaacgtatattagaaatggagtgaatatttcatcgtgtagaacggataggatggtgatgtgtagggtctttggttggagttggcttggctaactattccaattctatctgcaagctagcatggccggcgtgcgtgcaccgggatggcgacgtcgactttagttcttagaatgaaattattggtagaaatttggaatgcccaagggccaagggacaatatgctgtgagacgagaagaatctgccaactgcttgcatgccacaggcaaccgccggcaatgatatcattcatgggattttttttccttatgataatggaataaaaacatcggatattatttagtttaaaaaaaacatgggatattattttattatctgaaagtcacaattataagaaacacccatacccaatcatatgtacagtactaccttcgttttatattataagactttctaacccatatatatatatatatatatatatatatatatgaatgtaggcaatggtagaaagtcttataacctgaaacggagggagtagtatacttcctccataaaaaaaaactcaacttaggaggggatgtgacccctcctagtacaatgaatctggactaccatttatccagattcgttgtctcacatcccctcctaggttgagttttttttgggacgggagagtaagaatcactcatatgagaagggctcactcttaaccaaaacacagcaggggagtctcccatagtaaaaacactcaagtatcatattgtgatatagtagtaataatatttaaaactgtacaattgaactgacacatagtaacaaattacctgtagcagtataccactatacttgtatagacatgtttcatctattgcacatatatgctcattattaaccatctagcccatcgttaatctagtaccacctattttatatactgatctcaaaaaagtatcgacaatagacatatgttgtgctctcttcgtaaaaaaaacgaatctggacatacactatgtccgtgtatgtccagattcatttatagaagtgggttttttttttgacatagggagtacgagcctaaacaattctactctgatatcgatgtcccacaggcgacaacaaacgaatttgcgaagcctccatatcctgcataccataaataaatcaataggataatcccatatagtttttccccgattgaattttcgtagctgcaaacacttatttataggcagagagagagagggagagagagagctgtggcttgggcaattacgccacagctcactgaattcgatcgcctctctctctcgttgctgccttctggcaaaccatggccgtccaggttcaacgaacgcccctcccccggtccacgtacaccggccatcgggtctatctcctgcgggccccacctgcagtgacacggtgcaccgtggaccgcgcctttccgcgcagtcatggacctccccttcctcctctcctgtataaaacctcgcgtcctgatgcttcctcctccaactccacgagccgccatttcccaaggaggagcaaggattgttgttgtttcgctgtcagatcggtaggcagtgccccccctctctgttgtctcggattggattggattggattggagtttttctgggttgatgtggtgattttgagggtgatttttttgtgtgtgtgtgtgtgttcttgatttttgttttttatttggtttgtttcagattcctgacgggataatgggtgagaccatcgccaaggatgtcaccgaggtgagcgagcgccaaaatggtttcttgttcttcatcgtggtggcatttttttggattggtattgggatgtgatttgagagagaaaaagaagaagattgaatcttttttgtgatgtgctgtagttgattgggaacacgccgttggtgtacctcaaccgggtgacggatgggtgcgtcgggcgcgtcgcggccaagctcgagtccatggagccatgctccagcgtcaaggataggtgaagctctactgaaatttatcatcttgtcatgttagggtggtggattatgtctgaaaaatcggttatttgtggttgtttccggaatggagatgtgatttttctctgtttagttctcagctgtttatgattagagctcttacttgcatcttggattttgagatgaaattttgatgtgtggttgtgttgggtttgtacaggattggatacagtatgatcactgatgcagaggagaaggggctgatcactccaggcaaggtgaggattttttttaatgatttcggtgttctgtaccaatggaacagtttggtcttataaactagttgttcttcctgcatcaatgtgaatgttgttcatttatttatttgttggatcccactgcggtttgatagtatgttggagctgatctgctgatgaaagggcgtgcatagcagagagtttgagttgaccggcgcatgtgcgaaagctcaaataagtagttagattgataagaaatggaccattcacctactgcattggtctagatattttatagaaaatgaataaggtgttcctcgcgttatctaagtcagaaggcaacgaaatgtgatccccagctgtcactcgattgcataatcataagttatccgatagctgttattctgccatctcatgttgtggcatgtttccctaatttattcttgatgaagaggccactaaacattatttttgcaatggagataacctaatgattgatgcttgggcctagactggttttgtttagttgattttattggaaaaataaattgattttcttcattaaatggaaacctgctgtatggactgattagtactagatgaaccagcatatgtttctagctagttatgtacaatagaccttgtcttgtcttattttagaaatagttttcgtagtacttatgctattaaagaatagatgaccaagtaaattttttttcagccaaataagatcacggctccattgcatcactgaagtttttcgatctgcttgctctttataagaacaatcatattattttcaatagcagcatattttgacataccatgcttcttctagattaatatatttgccgtgtctaggagtcatgaatgatgaatgtggccttgtttgcagtattgttcgttttctcctgcatctaggtgttttatttctgcagatactttgccagttgaccaaagtaatttttatattgccagttgaccaaagtaatttttatatttccagttgccatctgcatgattcaattagtagcttaaagcatactccctccgtcccaaaatataacttttagcattcagaatttgtctcaaaatataacaacttcttcacctacattcccttctcaaccaatcacaaccttccaccattcaaattcaccacctactttctcttcccaaccaatcacaaaccctcgtccatttaatcccacatactttcttaatacctgtgtctaagcctagaactccttatattttgggaaggaggtagtatttaaataagggaattttacaatgctttttatgtgatagtaagttagcagtttttttttgttggtaaacactttcttcaaactgctagtaaagctaaatctattataacttccatatagttaagaacgcaagatctggctttactgatgttttgctttgtctgtcaatgattgccagagtgtgctgattgagccaactagtggcaacacaggcattggactggccttcatggctgctgcaaagggttacaggcttgtactcacgatgccggcctccatgagcatggagaggagaatcatattgaaggcttttggtgctgaattgatacttactgacccactcttgggaatgaaaggagctgtccaaaaggcagaagaactggcagcgaagacaaacaactcatttatcctccaacaattcgagaaccctgctaacccaaaggtgtagcatgatttaacattttaatacccttgtttatatttgtgttctgtggactcatactgggatgttattatgcagatccattacgagaccactggacctgaaatctggaaaggaacaggaggtaaagttgatggtttagtttctggtattgggacaggtggcactattactggagctggacgatacctcagagagcaaaatcctgatatcaaggtaaggaccagaaaagctctatactacagttttggtttgccacattgaataattaaagttccagcatttgttcctttaggaaaagaatagtatctgattttattttttttcttatgtaagatctatggtgtggagccagtcgagagcgctgtcttatctggtggaaagcctggtaataaggagtcatccattaattccatgtcatgactttatttcattttctggttgtgtcaataaaaaaataataaattgtttgccgcactttagttttcccacaacagccaaaagctaaaacaaaatctttgatttgtggttgtctgggacttagtcatgtgaatatcttgttgaggagggagagcagatttaattattggatggctgcattttgaaattggaattatcatgtggttgatgattgttgatgtgctccctaaggactcattttctgggttcaatagtgtatccttgtacctctcaatagaaaagaatatccttttgaagaagggatcttgtgaaccatttacttctaatgcagggccacacaagattcaaggaattggagctggttttgttcctggggtcctggatgttgacctcatcaatgaaactgtacaagtatgttatgcttctgtattaagttgagctgtagaaagacatatatataatttagcaccatgttttttttctctcacttgatccatagctttacttttcttcattcgaatagtagtcggtactagatctatattattcatgatgtcttagcaaatatctgcttcttttaatctggtatgaacgtttggtgcattgaactgtttgacaggtttcaagtgatgaagctatcgagatggcaaaggctcttgcattgaaagaagggttgctggtaagatttgtgtttgatgttcatttctgtgctctattattaatctgtaggtacacaaattgcttttgttaagcctctctatgtacggatcattcggatggtacctttgctgaagtcatcagtgatgtaaataattgtaggttggaatatcttcaggtgcagctgcagcagcagctgttaggctcgctcagaggccggaaaatgaaggaaaactttttgttgtaagcgtttcatttttcttacctctgaatttctaatgccctgtggcttaaagctacttcgactgcacctgcatttgtttatccatttggtattttagtccaaatgtacagcagtacagatatactccaaatttacactccagtgacctagaggaaaagctaacgaatctgagttcttgttttgtcattgtggcatctataatttcaattcgcatagaacgaactgccgtccaaaacaagcactatctccacatttgtcatgacccaaggccatgacgggataaacccatggacaacattgtcgatttgtttcatcatgctcatccccacactaacacctttccctcaatgtaggttgtcttcccaagctttggtgagcggtacctttcgtcggtgctcttccagtccatcaagaaggaagctgaaaacatggtggttgaatgaaatgcacaatatccgggaatccacaggaataaaagtttggtatctctgcttgtgtgattaaacatacattgtcctgccattttcaagttgttctgcttgtgtagcaatggggaacacagtgtgttagccttgtagtgttaaacagtttacattttatcttccctgtatatcagaaccctttacatgggcatttgtcagccagtgtgaatgaaataaagcatcatatgatttgtctcatgttttgggatctcgtctgaaccataatattcttataagagaacaaggccctgtttagttcacaccaaacttctcccaactttccatcacatcacatccaaaactttcttgctcacataaactcctaactttttttacagactatcaacttttcctaaacttctccctaattttaggaactagacacagcccaagtctcatgttttgggatctttctctgaaccacaaattctcataagagaacaagtctcatgttggatctttctctaaagtctgaaccataaatattctctcaagagagcagtagtgctctgaaaaatgacatcaggcccaaataagggttgtaccagtttatgggccatgggccatgactgacagagaaaatacataatagtagtactgatgaacattgatgctcctagtccatggtgctgctgctaactggcttttgcagtaaaaaggagccaacatcagtcataaaggtccaatgcagtctatgctcatgttccaggatctgttttggctgttgcctgttggcattgccagggtgcagtacaccatcattcattggtttagttacctgttactactagttaatgcacaaccttgtgggtaccgagctcgaattcgccctatagt

SEQ ID NO: 22555 - DNA, 4150 bp, Oryza sativa
tgcaagaacacgcatggcggcatgggtgagtttcttcagacaagtacaggattgagcttctcggccaccatgatttatgatttacagagctttaattgtcagtaaaattgcaagcatgaatatggcagaagagggccaaccatgtgcaaccaaaaaaggctccaacatgataaaagaacagcagaaaggtagcctggactagaccttcctttcctttgctttaacttttgagtggacaggaagactacaagcacagctgcatcattgttcgtcatctccagccatggaaattgtctcagtgtgcaagagtagagcctgcagagagatttctgaattgaagacaactttgtggtctgaaaaaatctgaaatctgcagggcattgattcatgcagtctatctgatctactgttgagcagaatttgctaccaggaaaacaatcagttatgattttgttgcatttgctaagattttgttgtcataagatcagatattaggtggactataacagttattaatcaagatatttaccatgtagcttgcaattttcaggtgattggcctgaattttagcacactaacaggaaacatgaaccctaaatctatctggggctcatggcatgtccaaggagatacgatttgcggttttgcaccccaccaacaaaaccacacaatgagaagctctcattccacttcagaaaagaatgacaaatactactataatgagaattatgaacatatggagaagaggccaaaaggggcatggctgaagtatgtgcaaagatcatagatggtgcaggatataatctaagaggcttgctctcattccatcttgcagacacattcagcaagtatcacagaacatagtctaagaggctgctctgaattctgatttccatcttgcaaacatattcagcgagtatcacagaacaagcatgctgcaagacaatggtgggataacaaaggtagcaaccacccattggtattaaactgatgatctccaacaactagcagattaatttctcaagttaaaaaacggctagagctaacaaagagttcatgacgcctaactagattctgctttcgttttctcagcatctaaggctgagagcccctaaaagctcaatgcagcagattgagatgtgattatcagctcacttctacgaccaaggagcccgcctaaaattcaatgagacagattaagatgttcttcactatcagcttacttctacaactgaagagttcctaaaactaaacgcaacagatcgagacgttcccgaccaccagttcacttccttgggtgtggaacagaattcctcagctgcatgaccttcttatgagaattggagtgtatgtcactcacaaaagttggactattagcaggcctgtattccggcagcagcctgccagacttgaacctcacaccgcaagcattgcatagcgtcttaggccccaagggaccggtcctccactgtggcgtcttgtaggacaagcaatgggtgcacctcttcattggctcctccgatagcagctcatcattcacataaacagccttcttgatcttcttcttatctcgccgctttcctatgtcctgttctttgtcaatctcttggccatagcgcttcttggaactggtggtgtgcccattcctcgcctcaatcctcagacgacaagcatcgcaggtaggccctgatggaccatcccaccactgtggtgattggctggacaaacaatagctacaagtgatcaccagttgctcctgctggaattgcattcctgcactcattttgtaattctcttcctcctcttgttcttgctcttggacaagttcttcatctttgtccttcttggggaggataagctcactctctgctagccagtccttatgatcgagcaggagtagcggtggctcgacaaacagcgtgatacaatgttggtcatcagtgtcgcttatgacagatgccaggctccttttcttttttcttgcattggtagatgagcgtggtggtaactttggttttgcagcaccttgacttgccattgtaataggcggtagttctgcagagacagggtttgtgcaggatgcagaggttgacaagcagtcctctacatagacagagagccactctatgccacttctatcactttcctgcaaagtaaagaaatgttagacaagattgcaatggcgaaaacaattatctatccatcttttaaaaactaaattacataacagtgaaggaattatagctttacaaagctctcgttctactagattacagcaagacatgcatggaggtccaaaatcaaaaaataaagttagctgaagcatggcgcaattaaattcctcaaaagttttttttttctgacaaaaattagcaaagacaaaattccaggggtcagtatcagctgtttctggtatacagcggtaacaaacttgaagttcatatatctcaagcatcaagaaatttatggcccctcaaagatagaatgtgcagcatctacaatttgtaattgtggcaaggaatacaaaactgccacagcaatcactcagttacaacttgcaattaaacactatagcgggcagtgggcacacaataggatcaattgcagtaaatgctatacctgcaacagaccaaaagaaactccaaaccaaaagagagctaggcaaccacatttcacatggggatgcaggcagtaggccctttattgaattctaacagtaaagctttagaattacacaataaaattgaacaatgcctaaaagaaattaggataaagctcagtgcctcttatcaattgtttccggcaacaataaaggtttttcacccgaattgacaaagtaaaaaaaattggctgtcgcaatcttgcatgcacatcatcccatcgacgaaagaagatttttacaatggacacgtctatgcaatgacagtgatggtaagggaataacatatacacacatcgatattgaaagtcacaaagcaatacatgcatttcttccctgtgacctcacaactaagccaaaaacaagatgcaagattggcatgaacatagtcttgtttattttccctatgaagctctgctggaaaaaagtgtgcggctgaatgaattgctcaacaactgtaaatatatttgtttctctatgaaccaaaaaaattctttccaatttataggtaggaaaaggtgaagaaaagggcgaggaaatgcagcacgcatgaataggaaggtaagatagttcaagaaacaaaggaaaatcccccattttcttctatgcaaacataatagtggagaaaattcatctaaacggtaaagaacacaagtgaaaggaaaaaaaaacccaaaccctaggtcctagaacaataatatcaagaaactagagaataggccaccacaaccgcaccaaattcttgtaccaaaaacccccaaaacccccaacacaaaaactcccaagaaatccccaatttagaaagaagaaaaaaagaaaatccccaaagaaaacatccaatactccccaagaaaaagaaaccatcttcctccccaattcctcctccccacggaagagcaacccaaccacgcccggttcttggcaagaaaaaaaaacttataccaaagcacacatacacacacacagcaacagcaagaaggggggaaagaaagggggaagcaacaaagctaggaggcccggagcactgaccgtggcgggctggtgcgggaacaactcctccagcgaggaggcggccgcattcggcgggtgcacatccatgcccagcgacgaggaggaggcagccgcacggttgaggagagagaaagagagagagagagagagagagagagaagcggaggaagaagagggggtaggtttccgcttggagaggggagggagggtttcgcttttatctgagccggattgctctggctcgctcagtgagcccagccgtcggctcgtgagccgagccgagcaagtactcaatactggcgataatactggcctgtttagttccgaaataaatttttcatgctatcacatcgaatgtttgaatacatgcatatagtattaaacgtagacaaaaagaattaattacacaattcgccaggaaattgcgtgacgaatctttgaagcctaattgcgccctgatttgacaatatggtgctacag

SEQ ID NO: 22556 - DNA, 4589 bp, Oryza sativa
ttgttgatcctctggcgacggaagcgttgaaaagcgcgatcattggctcgctttgtcgtccctttgcagattgtctgatgagcactaaggtggagagcaactcttttggctctgctctttgtgtcgccgcgcttgtgcaatccaacaactggcggtttgcgtctaacgagctggttaatgatgtctgcttgaaagtctcaagggccctagaggaggcgcatgctcagagtatcgcgcacttaaacttggtggttgttttgctgacacaaaatccactgatgcttgagccttatggccgatctttgattcgatcgggcttacagatactggatgagagtgctaaggcaagcagttctcagatgattatttcatcgattcaaatgatacattccatcatgaagggtttggatctaggcattatatcttctgagatcagtagtattatccatgctatggaacaattccaggacgacactatgccagccatcagcattgcagctttcgaggcatctgagactgctaagctacttgttggcaggcaaaaagagagtgggcatgacaataatttgagtcagttagcaaactattctgtaagaaatggcagaaagggttcatattcacattctctcatggatgatgcggatatcagagacgatggttcatgtgattcacattcttgtgacctgaactctgttcatttgtctactgattttgattctcaacattcagtgggacaatgtggttctggaagcacacgtgcaaggcggcagctatggtgtaacaaatctgacaaatcacatggaatgtccaatcatgacttatttcgcactgttattccagatagtcatgaggcttcaggtttgatggcacatttcagctctgttgatccaattaagccagacaggaggttgtcagatgtgccaacaagagttgctggcccatgttatgtctgttcagcagcgcatgaaacgaatcactgctctcaggtatgcggcagaaactcatagcagctttgatctacttaaaatgtcaaatgtgttgtatgattaaatacttgcttttctttaacatattatttccattccttagccccaaatagcatgaacatattttgatgtcactttcatataccatccacatatatgttaattgtttggatatgcattttcattagcgtgctgaagatttgtctttcagtggtttatatttgacatgattttgggttgaagacataacttccttagaattaaatgaatttacatctctctcactttgtctcatgttttatttcagatatccagggcacaggttttatcaggtgacatgaggatgaattctactccaagaaagcaactccattcttgcaccttctgtagagacccagaacaagatggtcacccaccacttgaaagtccagctatacaacactgctcagggccaggtactaatattcttcagttcagaaaaaacagtgagcttaaggaaagaaaagaattttgggactcaattcggcaggaaaatcaatgccatatgcaaaacactgatgccctaatagaagatttgaagttcccggctgacgatgatgatgaggattttgatggtgcagccaaatctccatgtcaagaatgtcaagctgtgaatgagaagaagactggaggcaagaaaagaaatgcaaaccgttctcactatccagtttttcttttcgtttttgttgtggcaatcattgctctcttctttccttggtggaaggactacaaagagccttatgttgttcctacataaacatatctgtttgttttgcgatgtgcatcaagccatccgttttttcaggaattgtatggtggcaatctttagtatacagaaattataggcagcagtttacatggatgactttgaatggtgtaaattctgtgataaggtgatggaatggttaaaaagttgtaccatttctggatgtacttttctcttatgtggtcataaaaatccttagtgttatgtatcagcatggaagttgaagttctctgctatgataagaagtttcagtactacaaggcagcacgttcttggtatcatgggtaccaggttttttatcttccgctgcaaacgttggttttctcaatttaaaccggccgtttgaaacccttgttctctgtaatcggtgattcaaacaatcaacatggttagcatcttgtgtgagttaagattgtggcattacaggacagcatgcatgtgtaactagttgctgggactagatactctgttacattgaatttctttcttgtttatttcaaaatgcagataaaactctccattgtatccattgtattaatggttgtcaaaactcaaaaaggatattatacaacttacattcttacaagcatatgactgaactttgagaaactataaataagggactgtttagatctcacccaaaaattttacaccctgtcatatcaaaagtttaaacacctgataagtattaaatataggctaaaaaaataagtaatttcacagattgtgactaatttgcgacgaattttttaagcctaattgctacatgattcgacaatgtggtgttacagtaaacatttgctaatgacggattaattaggtttaataaattcgtctcgaggcttactgacggctaatgacggattaattaggcttaataaattcgtctcgaggcttactgacggattctgtaattattttttattagtgtccgaacaccccatacagcaccctatataatattcgatgtgacacgccaaaactttacacccctgtatataaacaccccctaaagcactgtagaatgctacacttcactgaaaggaaagcactgtttgattagcattctgaatgttagttttcttttttccttgatctgaatcgcaatatatattgtagattgcattgcagttttttgcttatatatggcttcgtctacatccagaaggccacaggagagaaccatgagaaatgcttgggcactcggaacgacccggcggcgcggcgagccgtcgccttcagttctccccgccggttgtacttgagcccaaacacggcgacatggacctcacattgcggcggcgtgaccacgccgccgccgtcgtcgccgtcgcattccacgcagtcgacgacgcagaacttgctgtcgcccatgtaggtgagcgtggcgcgtcgacggccgccggggcggcggcggctcttcttccacgacggcaccacgtcgtcatcgtccatggtgtcccactccggcggccgcgcgccgccgcgggacgggacctggcaggcgcagatggtgtccccgtggcgcgggaggccgacccaggcgtcgagctcggcgtcgaagaagccctggccatggaacggcaggagccagccaccgtgccgcctccactcgccgcgcttggtgtccaccgtgtacgtgccgccgccgccgtcgccggaggtggagacgaagacggtgtggccgtcggggtgcaccgcgtaggcggcgacggcctcctcgaccggcggcggcggcggcgccacgggcgcgttctttcacgaccagccgccgcccgtcgacagcacctcgaaggcgcgagggaagcgctcgccgagagacgtgagcgcgtacagcctctcgccgccgggcatggcgatggccatcccgccggcgaggaggccggggagcggcgactcgaccgtcagcgcggccgcgcccgtgtcgtacaccagcgtcggcgccgcgtcggacaccatgtcgacactgtcgccgcacatggggaagaaccgcgcgtcgcacgacgacctcggcgccgcgaaccggacggctggaccgccgccgccgccgtggataaccccggcgtcgtcgaggtcgacgtcgagcttgtggatgctgtagcctctgtcccagtcgtcgagcaccaggtagagatgcttctgctgcggcggcgccggcggccgcggcctcttgtcgtggtgatgtcgccggtaggcctcgccgccgtcgtcgtcgtcgtcgtcccgccgccgcctaggcatcccgagcgatcggtgtttgggcgcgagctagatggatggtttgatccactttgattacacgtgcattgcatatatatagccgaggtagttatggcggttgtagtgtccgaatccgattcgaacatgggttacatggggtgagaaaccgactccgactcgacctacaggagaaacggagtcggacgcgctgtgtgacgccgttgtttcggacaaactttctccaagttcaggaatgctgggaggcgacagcaaatcgagtgtttgattttaacctttttttttctttaaaatttgggcgatgttttaccgctacctgaaaaatgtttcatgtattgaaacgtactattattttcacatatggaacattaaccaattacaagattcttaaacaaaaatatgaaacaccatcgaagtatcaaggacaacgtttcaatccaacccaagaaagatgcattttctgaaacattaaaaactcataaaaatgtactagtacaaatttgatttcttcctcctatccgcctatctggtgggctcctatggtttctgctgcaaatcca

SEQ ID NO: 22557 - DNA, 923 bp, Oryza sativa
aacgggcggcacggcccggcccggcacgggcacggttccggcacggcccgtttcggcacggcccgttaggcacggctgatgaaacgggccgtgccgtgccggcccacgtgccgagccgccggcccaagcacggcccgtggatggccgggccgtgcccgtgccggcacggcacgcccgcggcccacgggccgttcgggccacgggccgtgcacagtgtttttttttttttaaaaaaaaggaaaggaaatgtataaggaaaaaaaaattaaaaatggaaataaaatgtttaaaaaaaagtaatgatttactaatgttaaaaaatgaaaaaatggtatttaaaaaatggaaataaaagttttttaaaaaagtaatgatttggtaatgttaaaaaaaaagaaaaaatggtatttttttgttgtgttgaaaaatttaaaaatatagattgtgattcattattttgaaataatttaaaggtaaatccacacttgcgaaaatattgcaaaagaatttgttaaaaatagtaatgacctttattaatgtttatatcattacaggatacaatgatacatgctgcctcgttaaaaactttgtcatgtaaaaactcataggggaaaatgagaaaaccatgacaaagaaaagagtacagctcaaaggtcagaacttacttctaacaaaattctactggggttggtctggatccaggtagagttgctcaaagtggccggccaattcttggttgtccgcagtgtattgggcatgttgtcgagcaagctcccagtctttaacgtttagtagcatttcgacgtggtcgctgcgcagagtcgtcctccggtcttcgatgattcggccgcatagactgaaggccgattcggaggacaccgtcgacacgggcaccgtcaacacatcccgtgctagttttgaaa

SEQ ID NO: 22558 - DNA, 643 bp, Oryza sativa
ctaaaacctgttttccggtggggttgggtgcatgccagttgtggaaagtaccacccgggcaaataaaaggattaagctcaggcctctgttgcaaagcactaccgtactaaccacatgtctaatgggtaaggcttaactcggtgctcagtctagtcctgaacaaaaggatacagatagagatggatgaagtcgttgcgatgatggatatctctgaggcaaatgaaggctacgcgagctgcggctcggtaatcgagatgtctaggcaaattaaggctacacgggccggtgtccgttagtcgagatgtcatggcacgggactagtacgtgggtggtctcacccctatgtgtgttgtcacatcctgatttttgtttcaggatttataaattatttaataaattattattagaatttatattaaatgttctttaattttcaagtgaagttaaatgtgggaaataaaatttcctaaatttaaagcatggatggatttaatttttattaaattctccatgattaattacactctctgaaattttctcggatttttcggagctcaattcctaaatgatacaaagaacagttcagtaattagttaatcaattaatgatctaattataattgttaagagcttttcttgtttaa

SEQ ID NO: 22559 - DNA, 597 bp, Oryza sativa
ggcatgaatcaattgagcaaactttcaaaacgtgatctacttgtgggcttgaaagatgtgaagtttgagaaagataagctttgtagtgcttgtcaagccggcaagcaagttgcatgttctcatcctactaagagtatcatgtccacatctagaccattggagctcttgcatatatggatttgtttggcccaacaacctataagagcattggtggtaatagtcattgtcttgtgattattgatgattattctcgccatacttgggtgttctttttgcatgataagtctattgttggcgagcttttcaaaaaatttgcaaaaagggcctaaaatgaatttagttgcactcttgtgaaaattagaagtgacaatggttccgagtttaagaataccaatatcgacgactattgtgatgatcttggcattaagcacgagcttttcgctacctacttacctcaacaaaatggtgtagtggagaggaaaaatcgtacattgattgagatggcaatgactatgcttgatgaatatggtgtttccgattccttttgggcgggagccaataacaccgcttgctatgcaactaataggcgttattttg

SEQ ID NO: 22560 - DNA, 29864 bp, Oryza sativa
ctacctcttgtgatgatcttgtggatatgcctagctctagctctagctcttgtgtttctatttgtgatgtctcacttgttgttgagaacaatgagcttaaggagcaagtggccaagctcaacaagagtttggagaggtgtttcaagggtaagaacactcttgacaagattttgagtgagcaacggtgcatccttaacaaggagggacttggattcattccaaagaagggtaagaaaccttctcaccgtgcactcattttgtcaagagcaatggtaagtattgcttcaagtgtcgtgaggttgggcatttggtgaatgattgccccggtggtaagccttctaagacatgcatgtttgattctcattatatgcttaggaaggctcatgattgtagtattgttgctagatatgtgggttccactatacttagtggtaaaaagaatgccatttgggtgcctaaagctttggtctctaacctccaaggacgcaaacaagtttgggtacctaaaagagcttgatcttcttttgtaggtgaactaccacaccgatgggagccattgggtgcttgatagtggatgcactcaacacatgaccggtaatagggctatgttcaccacatttgaagtaggagggaaagaacaagagaaagtgacatttggaggcaatagcaaaggaaaggtaattgggttaggtaaaattgctatctccaatgatttgtcaatcgacaatgtctctcttgttaaatctctaaatttcaatttgctttcagttgctcaaatttgtgatcttggcttgtcatgtgctttcttcccgtaagaggttattgtttctagccttcttcacaagtcttgtgtgttcaaaggttttagatatgggaatctttatttggttgatttcaattctagtgaagcaaatttgaaaacttgtttagttgcaaaaacttcattgggttggctttggcatatgaggctagcccatgttggcatgaatcaattgagcaaactttcaaaacgtgatctagttgtgggcttgaaagatgtgaagtttgagaaagataagctttgtagtgcttgtcaagccggcaagcaagttgcatgttctcatcctactaagagtatcatgtccacatctagaccattggagctcttgcatatatggatttgtttggcccaacaacctataagagcattggtggtaatagtcattgtcttgtgattattgatgattattctcgccatacttgggtgttctttttgcatgataagtctattgttggcgagcttttcaaaaaatttgcaaaaagggcctaaaatgaatttagttgcactcttgtgaaaattagaagtgacaatggttccgagtttaagaataccaatatcgaggactattgtgatgatcttggtattaagcacgagctttccgctacctacttacctcaacaaaatggtgtagtggagaggaaaaatcgtacattgattgagatggcaatgactatgcttgatgaatatggtgtttccgattccttttgggcggaagccataaacaccgcttgctatgcaactaataggctttatttgcatcgtctcttgaaaaagacttcctatgtgctaattgttgggaggaagccaaatgttgcctattttcgagtttttggttgcaagtgttatatttaccgaaagggtgttagactaaccaaatttgaaagtcggtgttgtgatgaagggtttcttctaggttatgcctcaaatagcaaggcataccaggtctacaacaagaacaaaggtattgtggaagaaaccgccgatgttcaatttgatgagactaatggctcccaagaggggcacgagaatttggatgatgtagatgatgaaggcttgatgagagatatgaagaacatgtctattggggatgtcaagcctattgaagtggaagacaagccatccacctctactcaagatgagccatctacttccgcttcgccaagtcaagcttaaattgaagtggaggaggagaaggcacaagatccacctatgccaccaaggatacacaccgctctttccaaggatcacccaattgaccaagtgttgggtgatattagtaagggtgttcaaactcgatctcgtgtcgcttcgatttgtgaacactactcgtttgtttcttgtcttgagccaaaacatgtagatgaagctctttgtgatccggattggatgaatgctatgcatgaatagctcaacaactttgcaagaaacaaggtgtggactttgattgaaagacctagagaccacaatgccatagggacaaagtgggtctttaggaacaatcaagatgagaacagattggtggtgagaaacaaggcaagattggtgacgcaaggtttcacacaagttgaaggtttggactttggtgaaacttttgcccccgtggcaagactagaggctattcgcatccttcttggatttgcatcatgctttgatataaaactatttcaaatggatgtgaaaagtgcttttctaaatggtgaaattgccgaacttgtctttgttgaacaacctcccggttttgaagatcctaaaaattctaaccatgtttgtaaactctcaaaaggtctttatggtttaaaacaagctcctagggcttggtatgaaagattgagagattttcttttgtcaaaggatttcaaaattggaaaagttgacaccaccctttttacaaagatcattggtgatgatttctttgtgtgtcaaatttatgttgatgatatcatattcggttctactaatgaggtattttgcaaggaatttggtgatatgatgtctagggaatttgagatgtccatgattggagagttgagcttcttccttagacttcaaatcaagcaactcaaggatgggacgttcttgagccaaacaaagtacatcaaggatctactcaagaggtttggcttggaggatgcaaagcccatcaagacacctatggtaaccaatgggcatctcgaccttgatgagggaggtaaaccggtagatttaaagctttatcattctatgattggtagcttgctttaccttaccgcatctaggccggatatcatgtttagtgtttgcatgtgtgcacggtttcaagtcgctcctaaggagtgtcacttagtggccgtgaaaaggattctaagatatttaaagcattcctcaattattggcttgtggtacccaaaaggtgctaagtttaagctagttggctattccgattcggattatgccggttgcaaagtggatagaaagagcacatccggtagttgccaaatgcttggtagatcccttgtatcatggtcatccaagaaacaaaactccgtagccctctctactgccgaagcggaatatgtttcagcgggtagttgttgtgcccaattgctttggatgaaacaaatcttgttggactatggcatatccttcaccaaaaccccactcctatgtgacaatgatagtgccataaagatagccaataacccggtccaacattctagaaccaagcatattgacattcgccatcacttcctaagagaccatgttgtcaagagtgacatagtcattagccacataagaaccgaggatcaactagccgatatctttaccaagcctcttgatgaaacccgcttttgcaaattgaggaatgagttaaatgtcatagatttctctaatgtggcttgagacggtgcaccatggttgcttcttttgcatattgtatatttactctcatttgcttttatgctttggacttattgccatttggttcttcattgagaaaatggagcatgtcacattaagggggagttttgcactcttgcatgtgctctacccctctttgtctgtgagcaaatcaactagtggtgctagtagtattttcaaaacgcccaagtcaacataagtcaaaacttttgcaaaatcaatgtaatttgaaaatgtttcaaaaggtttcctatatgttttccaagccttacgttgcaagaaaaatgatttttgaatgaaaatgccattttggccctcttttgaagaaactagattcttagttttggccaaaatgagatttatccccaaaataagattgagaaggaatttgagaaaagtttcaaaacaaagttggtagagaagaatatttgaaatgtttttggtattcaaacctatttcaaaaaccaaatatttcaaaagttgtttgaaaatcaaattcgcccaaaaacccctatagaccataaaaggtcacctcctagcactcaagtgagttttgttgcaaatcttcataattttcaaatgttatgaatggttggcaatatttcaactcacacatttcaaaattgctccaaaaattgctccaaaaatctcgtctgaccggcctggtggaggcggtctgaccggcctctagggcccggtctgaccggccgcatatagccggtctgaccggcctgggatggtgggcccaggactttgtcctttcttcctctttcttctcctacccgacccctcctcatctgtcgggtcccaaaactaatgattcagaaaccaacatgtttagactgtatcaagccctggatcagtagattgatacaggttcaacaatctggatcttcattgcatacatttgatcaaggttttaaaggagattcctttacataaaataatagggtatttacaaacttttggctaactattacagcagaagctatacgatgacacaactctagtgttttgctatagacttaaaccatctatctaatctatacttgagaattaagttaggatgagactaacttatatgattgaactcccggcttcggcaagactccaaattaactctgaaaaaggtggggttgaagtaagggtgagtacaacatactcagcaagctattatattcaataataaatgtatgaaatggtaatatttgagtagagctaggtttaattgcagaaagctgagaataaagaagtagaaatcctgaaatatttgatatgcaacagtatttaataaagtttgaaattatgtttctaaccaagatgccattgtgagtcccaatgcttgataaccgtgagcacggctatttgaatagttttaataatattcatactgcagtagatgtacgctttacccgcaatccatgacatgccaaacacattagctttgtcatggcaaagcttttcggttactaacatcagtggtacctgttccatgaactctagtccccatgcgctctgaacgtaatgttatcagcagcgtaaggagttttggcgttcccgaggtttttagagagaactagttgagagaccccgtcatctcaatcaggttttcataattcacacacacagctcacgagataatcaagatatttacctgcgcctcggtacatatcacaatcgccctgcttggcgtaagtttgcctcctgcgcgaggacttaagaagaaccactatacagaggtaccacctttgctagataacttaatcagctaggtctatgcccatacgagaattgtggtcgtactcgtatgttcttcacatgtacttggcaatcttatgtcggttggaacagtagtagccacccggaaatcaaccatttctaccgtactgtcccaatctaagttcattatgttttatgcagtctaactaggcagggctaagcaaaagctagcatatctagtttgctatgttcaggttatgcatttgaaatcatgtgtgactaatgcatagaatagagatatagaatatagggtatttatgctcaaaggagaggaataataacttgccttgctccaacgcagataaaaatccgatataggcaacctgattatctgatccttgaaacaccacaggttgccatccaaaatataatagactctactatagaagaggaagatccaaattcaataaaagccatagaataacaagaaaacgacaaacggttaagaggctagggtttagggtagggtataaggattattaggctaatattttatatgcaggttctaaagagttggtggctggggtggaaagggaattaagaggctaaggtcacctatgttttatgtgcagactctgattggttggtggatagggagtacagtggataattgaattggttgagcagatatgtgactggtattggctgataataggtttgggtaggattatacttagggtttggttatatttaggccgattgaggagtagggaaatatatcggccaggctctatattttatgtataggttctgggtagatggagagtaggtggctaagatatggcggataagtaatattgtagtggatgtgggatttggatggtaggctgattaaggtttcagttgtctaagccgatatcgaggtacgataaatatcggctagggtttgggtgttcgcaagtcgtcgctaaagcatgacgactaggtttggtgtcttctctagccggtgtcaatagacaatataacagccagagggatgggaggtttgtacaggtttagcgaggcagaagtgttactttgacaaccgtgagtggcggcggagcggctaggatcacacagggcccgagagctaactgtgcggcgtgctatggaggtcaaggaaatagtgaagctccgaccactgtacgcatcgaggcgtggggtgccaggagcagcacttcgaccttgggtttggttttgccgggctttacaaccaatggttcgacgtcggggccaatagaccgcaaacgtccccatggaaggtgtaaagttccaaccgacggctttttagtggctaaagggtattttgggataaaagaaaatatttaaaaaggcaaatataaattcaaataaaatagcaaattgggaaatgaagcatttgaatttatatgaatttaggtccaggtttcactgagatcggatctacggtttaagagatatgagcttctaaagaataggatttgaattaaatctagaaaatatgaaaggttactattcatgggcctacctgtcagtgtctattcccttttctcttctttctcttcttcttctcgtcttgttcttcctcctgcttcacagagagccgagagaagggagaagagagggagaaaggggcgctggtgctccggtggtcgagaggctgcgacgtcggcggcaaaacatgttcctgagcgacgcgcatccagggagggtggtagctagctaaggtggagagtgagatggccggaacggcgacggcaggagctcaaccatggccggcatggatggtggcggtgatggcttgtggtggtggctaaaggagaagggaaaggagaaaaacggattcatctcgccgaggcaaagccgatggcgcgagggtttgggttgtgaaactatggtgaaggagatcggccgacggtaggcggcggccggacatggcaggagagagaggaagagctcgaggctctgatgatgtgtgggggagaaagggacggctcgcaggtatttataggcggcagaggtcggttgctcaagtcggttcgcagaggaggagaaggaggacatggcgacggcggcgtggaaaagacgatcacggcgtcggccttgtctgttgattggtcgatgatggcggttcgctccaggagctaacgtcggcggtgtgaggtggcggatgacgtcggcaacggttgcttggtgtcgaaggcaagctggcgccggcggtggaggagggcaaggcacggcagcggcggaggaggagagagcgacgacaccgatttcttagcggcgacggaaggtgttggcggcggcgtgcgcacctggaagaggaggagagaggcggttgcctcctgggctagctgggccactagagagaggagggccgaaagagagaaaagaagatctcggcccataaagaattatttgtgaatttctaatggaataggatttgtatttggagggaatttgaatagggaattttgaaaggaaattatatttggatataatttccaaaagggatattttctagtttgagtgcaatatttttggaagtggaatatgggcaaatttatattgatgcactcaattgtggggagagggatatatgaataaaagttgaatatataattgggaatgtggaaagaaaaataggtggaggaaaaagaatagaatttgaaccctaatatatatggcatgggtttcaaggaattgcttgaggctaaaaggaaatttaggtgacaaggatataatttattttcttagcacaagagcaattattcacaatatttgtaataatattattcttgtgccgagaaggaaatcaagccacaagaattaaattagcggctagatcaaaaggaagaattttgaaaaaggggactaaggataggtttggaatcaaaggatagatttaagatcaaaggatgggtcgacaattaattccaataaaattggaattgtttggtttaggttctaggacaatggtggagaatttcttggaccataattcataaaaatagaaaggggttttcaaactaaatttgaatgaaagaattttagtcaaaagaaggttttaaaccaaatcaagaaatacctcaatttaaccaaatatatatttttaaatgaaaaacacaaaagagattaaatactgcataaggattctgtgcaagttagttttaggaggtccctctaattatattgtcctaagtttaagaagttattaaaaacataagaatcggcatgatgcaggattggaaaatggcacattttcaggatgttacatcatcccatctcatctcttcacttctccaactcaaaatttcttctcctctctcctctcccaaaccctaaccacctccctacaccaaatccatccggttcaaccgtcaaaatcactccggttacaccgtaagtgattctcctccgcttcctctctctattccatggattgatttgtgttttgattgagtttttgatccatggcatggaaccctaggtgaaggaagaggtgttcttcgatttacaccaatagagggtagtttcttggtgtgattcaactccttcaaccggtaaatcactctccctcttgtgcattgttctcaaatcggtctatttcaatctctagggttaagggtagttttccccctttgttccaatcttaatgaaatagacctacaccttgatatccatgctcaaatcatgtacaatcttgttgtagcaaatatttttagagtcatttgtatgtgatggtgaaagggatttacttttgcacttgtcagaggtggtctgaccgggtaccagccgccggtttgaccgcgctcggccgtcggtctgaccgacatatggacggcggtctgaccggttgttggccctcggtctgaccggccgttttccaccggtctgaccggccgctggacttcggtctaaccgtccctgacatgcagtgtgcagtttccttttcgcctaacatagtgtcttctaaaaattgttgcttatttatctttttttatccttgtttctcagctatgcctccccgcactcgccgtggtcgtcgtgagcccacgcttgatcccgtcagtgagaatgaggaatcaaacggagatgagtatgttcaaagtgatgatgaagttatggaaaatattgagggggatgaggtggaagtaagtggttatgacaatggtagtgatggtggtgatgataatggcagtggcgatggtgaggatgatgaggcaagtgatgatgggagtcctctcgatcccaccatccaatttgtgctcaatttgaggaatgcctagcaatacactatcctccgtcatcacgatcaattccggaggcctaatgattgcaatgatctgagattccatacacggtatcaaaagtccgtgtatgagcaagtatatgcaaacaaagccttcgccgaacacaagtggatttcttggaggcacattggtgagacaccggagtttttaggtttgcaagagatgttcaagcccgttggcattgataagattgtcaccatgaagcaacgttttgatgaagacctcatccggcaattctatgccaccgtgtaggtgtccggcgattgtgatgccatgaagtggatgtcggggacccttcgatgctctatcaactgccgtgcattcaaggagctcttgcacattcacttcaacaacagggatgacctccatgatgagcaaaaccacaaccccttccccattgatcacttttctcagttttatgaagaagggaggaggcacacctatggaaaggtggtgagtttgagggctatcccaagtctgatcaaccgcatagtgagggccaccattctcccaagatgtggcaacaatgatgacatttgcggcgttgcatggcatgtcattgaagccatcatggatggtcgtcggtttggtgtcatcaaccttatgatgaaggagatagccatttccaaggggactattggacaaggagtttactatgccccctacataatgagattgattcaaagcaagttgagacaaattggtaacaacttaaaagaacacaaagactacaagcctcatctccaactctccactcctagagctcctcgtgtgcgccaaccaacatttgatcaaggtgcaagctcaagtgcagcccccctcctcctcatgggtatgatccaagtgccttcttccatccacaatatgcatactttggaatgcaacccaacgaatacttcaatccggtgcttggggctattaataccctaagtgaaagcattcaacgcttatccaccgggcattaagcattgcatgaggatgttcatggcttacgcaccgatgttggagatttgaatgcttccgtgggaagattgcacactagggtgggtgtattggattcttgagtccaaatgttggagagcacccaagcttttgtatatcatcgccgccgtgatgctcctcatccttcatctttggcacgtcctccttctcctccacaagaatgaagacctttttggtactttatgccaaaagggggagaaaaatatccttaggtgtgctttatgtcttgtgggttgggactagtggtagtgaggttagttacatcatatctaataggttaaggtggtttgggctatattatgtatgggtatgggctattactctatattgtgtgttctttatcattttgttgaactctatgtcatttggacccttcgtggttttgtaatagcctatgtttatttgtgagcccttttaggatgatttgtgacttatgtgttttgaatggttaagtgatgtgaacttgtgcgatgatggatggtgtatgtgatattgatatatatgtgaccatcttatgctcatggatgaatatttcttgaagttcacattgagatattgctcttgtgtttgtgatttgttgaaatgtgcattggctccatatttgctatttgtgattgttatgcacatgtttagggggagcttttgcttttcattgcaatatatccatgtgatttaaatttgattatatatatttgtggtgtttgtcatcaattaccaaaaagggggagattgaagcatctaggcccccggtgttaattttggtaattaatgacaagcactaattgtggactaaccgttcttttgagctatatttttaagttaggttcacattatgtgtgcgtatgggtgtctacctatggattaaaattgacggcacaaagctaaaggaagagaagacggtaaactaatgttttcattttaaattgatcgaggcgttgggcgatcaaattgtgctagtttatttatagctttgccgtactattaagaggggtaatgacctagcaaagagatgattttaaattgccacattaggtgatttgcatttagacttgtgctcacatttcatcacacacagacaaacactttgcctctcactgtcgggcctgactaggggcggtcagaccggccacatagtggcggtctgaccggcggccctcgcccgtctgaccggccagagagcagcggtctgaccggccaggcagtggcggtctgaccggcgggtgtcggccggtttaatcggccggccatatggccgggatgttgtctcggtgtgccgatcccgaggcgccggagccgtattcggtcagaccaagctggtggcggtctgaccgagctgaggccggtctaaccggtcaccccatgtcggtttgaccggccggggcagtggggcccaatgacagccctacaacggctagaaaactagctgttatagagtagcacggtctgaccggccacatacctccggtcagaccggcagagcacagagttaggggatttcgcccccaaaggctatttttggttggtgggagtataaatactccccctccagcagcaagaggactctcttggcacccaattcaattgcatacaccccttgcacctctctcacacacctttgagcttagtgttcgtctattgtagtgattgaggttgtttgtcacatcctgatttttgtttcaggatttataaattatttaataaattaataatagaatttatattaaatgttctttaatttacaagtgaagttaaatgtgggaaataaaatttcctaaatctaaggcatggatggatttaatttttattaaattctccatgattaagtatactctctgaaattttctcggatttttctaagctcaattcctaaatgatacaaagaacagttcagtaattatttgatcaataatgatctaattatatttgttaagagcttttcttgtttaaaaaatccttaaattataaattgttgttaaaaggaattattagaaatgattttaaaagtctaaaagagaagatctaatttttaatttgttaaatctcaatataaaattgggctagataaaatttcattaaatactttgcttaattctataattcctagatttttctgggatttatttgagctaaggaaatatttttaataaatagaattgcatttcatgaataatttaaatagaaaaatgtctttaaatcctccttttggctttgggccgaaagtcggcccaaaacctctctttctctctcccttcccggcccagtcggccaagtcggcccagtccgccgagccgccgctctcctctctctctcagccgctgacaggtgggtcccacttgtcggggtcgtcgtcctcctcgcgccgccgccgtccgaaaccctagcgcaagccgccgccgtctccttccaaattcggccgcgtctttccttctccggtgaaatctttagaggggaaatgatcttctcgatctcctcttccttttctcttttggaatcatcgcctaattaggtttggaaactcgtggattcgagttcgattcggatcggcctctttcctccgaaccccgacctttccttctcgccgccggcagccatgggccttcgccgccgcctccttgcccctttaaaaggacccccgagctctcctctactcgtcacctccctcgcctttgcccaccgccgtctgtagcgccctagccccgtgagcttttgcgccgccgtcgccgccgttcgtccagccgtgcgccgccgtcgctacggtcgtcgtcgtcactcgggaaggccatcgtcgggatcgccaagtcatcgccgtcctcgtccgccccttcgccgccgccgaagaccgccggagcaccgtcgccgtcgtcgacccgatctccgccgccgcttcttcctcatcgccggcgctgtccgttgttcctccgccgcttctttggtcaccggtgagttcgccgcgtcgccctctacccgttggtgtcctccgtttgcgtcctcgtgccgtcgttcgccggcgagcttgcgctcccgagccgccgccggtgctgacgtcatagctgccgtcatcgctgacgtcatcgtcgtcgttctccgtgagccgcggtggatccgtttgatcccggccgtccgttttggataggttcgatctcggccgtccgttcccgtgaaccgttgccgtgcacccggtccaccgcaaaccctagccgctgacgcaataatccttcttttccttttcaaaaataattcattattgcgtcataattcaattaaaatccatataagtgttttaatccgatttaatctttaaaaattcataactaattcatcttaactcagtttaaggtggttcaagttgcaaaagttgtataaaataaagatctacatattaaaattttccataaattgaattaaatttatttaattctttttaaatgggctttaattagatttaatcttgtaaaattcataataaattcatttgaagtcagaatgaggccgttcaagtctcataattcatctaaaattatgatctacatgtttgtttactttttatgtattgtttatttggtttttattagtcttttccttgttttgcgtgttagcttgtcgtttccgtcgttgcgaaggttcgcgagtgcgtcggaagtgttcaagaagattaattgaagaccgattattgcaaggcaagtcacacagatcctaaacacaatcctttgagcatgttgatcctatatttaaattctctatttatttcaactgtgcatttattttcgaatgtcaccgggtggtgtgaacttattcctttgttatggccaatttgcattgattactttattccttgataccttgggttattataatttgactagttgagctttatatattggttcagctagatattagatatgattgcttagccatgcttagaaacattagcacattattgggataacttatgactcattattattttatgatggtttaatgatagttcacgatggtcaatcgtgattggttaattaattacttgtcaactaaaacttgataatggtgggttgtgagcacatggttttgagagtcgtgctcatgacaattaaggaccggttcgcgagctactattgtgaaacattaaccgtgccaaccacaagccagcgtgggcaacggctttaccttttgcatagcatgattcattgcggagcaccagactgagaagtggcggagataagcccacgggggtcgctgtggagtccatgccttgtttataagggggtgattatgatccagggaaggtgcgctgcagtggattgtgttatgcaaggggtattgtcacagcccctttccgaggtaccgtggtggtactgaggcacatggtgacatgatgtggggctgtgtcttgtgggtacagtggtacacctctggccagagtaaaactattcgaatagccgtgcccgcggttatgggcgggttgagcaatgtttttcgtgattagtctcacacctctcacaataattattgatgttataactggtaataatttgcttagctcctggtttggagattagatctgtacagccgggtatggttgtttaggatggtcgggcctgtgcagcatgggtgtgctgttcagtgttgattaaaatttctgattaactactctactgttttatttctcttaaatattttgctaaacgctgcttttgcaaatgagcctatattatgccatccttttgcaaatgagcctatattatgccatcctttggtatccttgtgcacttgcatatttgctatgtggcttgctgagtatgtcatatgctcaccttgcaataatcaatcaacctcagttgaagaaaaaggatccagaaggagaagacgtttggcttataccccagttgagctgcctgtgggagtggagccggagcttcgctagattttattttccgctgcaattttcttcttggtgaggactaagtgcctcttaagtaagtatttatcgttttagttaatttgatgaatctgtatattaaattgtcagtttgtgtacctcgactgattcctggacgaggattttatgcacaaataagttcggaaattactagtgaatttccgggcgtgacattgttctagccaagagtcaagtgcattgcttccatttgtagagctagtgtggcacttgatcatctccacgccgggtcatcgcttgttactcttggaggttgccgcctcctagacggcttgtgaaggagttgcccggtgacctcttgtcgcacccggaaaaatacattttccagaacgctagtgtattaatccccgtcccaggaaaagccggggtacaccacacaaacaggatacaaaaggcacatctttattatatcgataatatttacattattacaaagtcacttcagccctgacaaacaaaaataaacagcagcgaactagcgggcctacggctccatcttcacaggcgctaaactggggtataagtcaggactccacctaggacttcttctccaaagcttcttttactgaaggggggaaagattgagcaagaatgagtacaaccacagtactcagcaagtcacaccgggagatgcatgattaatgtaaaggggtacaaggagtaataataatagagttaggttttgcagtaaagagcattaaaaaaacacttagttgctcaaagctattttgtaaacacgatcctagagctacacaatattattaatcaaggctgtgaaccctcacaaaacctaccttaacccaaggcctacgatgattcggagcgaactggcaacctgacttgggtcccagctcgtcccaagccaacccaggccaacaattccatattttagttgttaagcaaattttaagaattaaaccactaacttgggtacattactaggcttgcccatatccgagggcacggttattcgaatagattatactctgattagagatgtacatctttacccacaagacacgcctttactctgcattccattgcaattgaaacccatcataaaaaacgtgacataaccctttacccatcctagccgtgaacaaaagtaccgacccaaccctgcctacggccagtatcccggacaggcaggccaggattgagcccctagcaacatgatctagaccgggtgcgccacacatgtcacgcccggaaattcactagtaatttccgaacttatttgtgcataaaatcctcgtccaggaatcagccgaggtacacaaactgacaatttaatatacagattcatcaaattaactaaaacgataaatacttacttaagaggcacttagtcctcaccatgaagaaaactgcagcggaaaataaaatctagtgaagctccggctccactcccacaggcagctcaactggggtataagccaaacgtcttctccttctggatcctttttcttcaactgaggatgattgattattgcaaggtgagcatatgacatactcagcaagccacacagcaaatatgcaagtgcacaaggataccaaaggatggcataatataggctcatttgtaaaagcagcatttagcaaaacatttaagagaagtaaaacagtggagtaattaattagaaattttaatcaacactgaacagcacacccatgctgcataggcccaaccatcctgaacaaccatacccggctgtacagatctaactccaaaccaggagctaagcaaattattaccaggtataacatctataattattgtgagaggcgtgagactaatcacgaaaaacattgctcaacccgcccataaccgcgggcacggctatttgaatagttttactctggccagaggtgtaccactgtacccacaagacacagcctcaacatcatgtctaccatgcgttgcgatactggaaagtacccgaatagaggctgtgacaataccctctacacaacacaactcaccacagtgcaccattcctggatcataatcacccccttataaacaaggcatggactccccagcgacccccgtgggcttatctccgccacttctcagtctggtgctccgcaatgaaccatgctatacaaaaggtaaagccgttgcccacgctggcttgtggttggcacggttaatgtttcacaatagtagctcgcgaaccgatccttaattgtcatgagcacgactctcaaaaccatgtgctcacaacccaccattatcaagttttagttggcaagtaattaattaactaatcacgattgaccatcgtgaactatctttaaaccatcattaagtaataatgagtcataagttatcccaataatgtgctaatgtttctaagcatggctaagcaatcatatataatatctagctgaaccaatatataaagctcaactagtcaagttataataacccaaggtatcaaggaataaagtaatcaatgcaaacaggccataacaaaggaatagattcacaccacccagtgacattcgaaaataaatgcacagttgaaataaatagagaatttaaatataggatcaacatgctcaaaggattgtgtttaggatctgtgtgacttgccttgcaatattcggtcttcaattaatcttcttgaacacttctgacgcacttgcgaaccttcgaaacgatgggaacgacaagctaacacgcaaaacgaggaaaaaggctaataaaaaccaaataaacaatacatataaagtaaacaaacatgtagatcataattttagatgaattatgagacttgaacggcctcattctgacttcatatgaatttattatgaattttacaagattaaatctaattaaagcccatttaaaaagaattaaataaatttaattctatttatcgataattttaatatgtagatctttattttataaaacttttgcaacttgaaccacattaaactgagttacaaagaattagttatgaattttcaaagattaaatcggattaaagcatttatatggattttaattgaattatgacgcaataatgaattatttttgaaaaggaaaaggagggattattgcgtcagcgggtcgggttcacggtggaccgggtgcacaggaacggtctacggaacggacggtctagatcaaccctatccacaacgaacggccacgatcgatccagaccacggcggtccaagagacacagcgacgatgacgtcggcgatgacgtcatcaccggcggcggctcgggcggcgcatgctcgccggcgaacgacggcgcgactacgcaaacggaggacaccaatgggtagagggcgacgcggcgaactcaccgagctcttggacgacgacaaacgacgatggatgacgacggcggcgaggttgaagcggcggcggtcttcgggtcgacggtgacggcggtgctccggcgtgctacagcggcggcgaaacggtggatggggacggcgacgacctcgcgatcccgatggtggcgacggcgaccgacgacggaggctgcaacggcggcgcggcgcggctgaaccgacggcaacgacggcgacggctagggctacgcggaggcggcgctagacgcgacggcgggctaaggcaaaggtggcggcggatagaggagagctcggggatgcttttataggggctagcgagcggcgacggaggcccacggcgaccggccgcgagatgaaaagctagggttggaggagagagaagtcgatccgaatcgagctcaaattcgtcgatttccaaacgaaattgaccgaagtttctataagagaaaaggaagaggagatcgaggagattatttcccctcgaacgatttcactggaaacggaaaggatcgaccggattggaaagcggcggcggctagggtttcggccggcagcggcgcggggaggaagacgggcctgacaggtgggtcccgcctgtcagcggctgagagagaggagggaggggcgcggcggactgggccgactgggccggggagggagagagaaagagagaggttttgggccggctttcggcccaaagccaaaagagacttttaaaaacctttttcaatttaaattattcatgaaatgcaattccatttattaaaaatactttcttggctcaaataaatcccagaaaaatctaggaactatagaatcaagtaaagtatttaacaaaattttatctagcccaattttatattgagatttaacaaattaaaattagatcttctcttttaggcttttaagatcatttctaataattccttttaaacaacaatttaaggatttttaaacaagaaaagctcttaacaattataattagatcattaattgattaactaattactgaactgttctttgtatcatttaggaattgagctccgaaaaatccgagaaaatttcagagagtgtaattaatcatggagaatttaataaaaattaaatccatccatgctttaaatttaggaaattttatttcccacatttaacttcacttgaaaattaaagaacatttaatataaattctaataataatttattaaataatttataaatcctgaaacaaaaatcaggatgtgacaacacacataggggtgagaccacccacgtactagtcccgtgccatgacatctcgactaacggacaccggcccgtgtagccttaatttgcctagacatctcgattaccgagccgcagctcgcgtagccttcatttgcctcagagatatccatcatcgcaacgacttcatccatctctatctgtatccttttgttcaggactagactgagcaccgagttaagccttacccattagacatgtggttagtacggtagtgctttgcaacagaggcctgagcttaatccttttattggccggggtgttacttcccacaactggcatgcacccaaaccccaccggaaaacaggttttaggggttttgaaagaggaagagaggggtatgtccaattccaccataagccaaccattccatagtgtccaagtgatatgagaattcccaaagtctaaaattataaaaccacctaatattgcctaattaatcaacgaagcatctacctaaattcatactagtggaaccatgaatggagtgcccactagttagggttttgttttcctagggtaagcaaggtgataataacaattgcaatgataaggctataacaaggattaataggtagtgcaaaataaaacagtgataacgcgggaatttaaataaagcagtaatgcaataattcaaatcaaaataattttataaattgggattcaatatgctcaaggatgatgcgacttgccttgctcagagaacagccttccgaaccttcggcgacgaccacgaaccacgcttcgggaacctccgcaacgacgaaagctacgcgaagcacacaagcaaagctacaaacctataaagaagcaataacaatacataaaaaacaaagcacatggttctttaggttataacaaacattaggagacttgaacggatcgattgggagttcgtatgaccaagatatgatcatccgaagattaatgttgttacatggagatttacggattattgtaattaggttttgcaactataaaacatttgtaagcgctagcctggaaaagacaggaaggttgcgctgttgacatgcggaccccacatgtcaacctaaagggccacggtagaccgagtacacagagacggtccacgggtcgacaaaagcggaccccgtgtgtcaactgaggcaagtggccgacaaacggactccactagacaccacgcgggctgcacacatggaaaccacacggcaaccgagcaggcacactaacacggtcaccacacgcacacacgaacaactaccgacacctgtacataggtaccggggtcgacaaccgcacaacgggcacggacaacaccgaaaggacgaggacaggggcagcgaaaggacggacccttaccaccactcaacgaggcgtgggaacgacgacggcgaacgggcgcggcggagacggctcggggacgacggaggcgaacggcgagggaacgacttcggcggcgatccttggacggaggcgagacacggccggcgcagggcttgacgacgcggagccgaggacgaagacgacaacggggctgcagcagctcacttgacggacgcggacgagaacgacttgacggaggacggacgccacgacgagcgcaaccaggaacgacgagaggacgacgacgaccgcggcgaacgccggtggggaggcgaggacgacgtggaacacgccgctgtgatgccgacgacagaggcggcgccgcgagacgacgagctgacgaggaggaacggccgaccggaggagacgtcgacgaggacaaacgatgacgacgacgaagatcggcggggttcgggaggaggggaggcgaggccgaggatgaccttgccgctgcgatgccgaaggtgatggtgacgacgtcggccggcgcaccgacgaggaacagaagccgaccagaggatgggaggtactacccgccggcgtggacacaactccagcgagcttcgggcgaggagatggtgaggccggggaggaggacgatgctgcggagctgagggaggcgacgacacagccgaccgatgcttaggcgcggcagcagaggcggctggaggcggtgcagtggcagcaacgccactggacgtcgacgaggacgcactatcggcggtcaccgcgcgaaacggagggcaggccgggggagaggaggcggccgcgacgctgaggatggcgacggcacggcctaccggtgcacgggcgaggagggggaggcggctggatctggccagcggcacgggagagagaggagggcggcggagagaggcggtgcggctacggggagacgcgagaggaggctaaaacgagagaacggaggaaggggattccattttataggcgcggggagggagccggccacgggaggagcgggcaacggcggcggaaaactcggccggcggccatggaaagcggccggggaaggcgcggccgttccgggaggttgagagcacgaatcaaggggaaaaataagggggaaataaagaggaaggaaaggggattaaaagcccccaatcaattttggaatcccatgcttgaatcgtgcggatttgagggaggaagaagctagggttttcacgggagagagaagagccgagcgggaggaaggagacgcgcctggtaggcgggtcccactcgggaggcgcgcagtcaacgcttgtgcggcgcgcgtgagggcgtgggcgagcgtggctcggcttgggccaggaggcgccccgggtggaagggggcggggaggcttgggccaaggcaggccgggaggaaggaggaggagggagttggccggctgggaaggagggaagaaagaaaaagatagggagggaagagagacttcggccgcaggccgagggagagagagagaggaagactttggcttagactcagcccaaagaaggaagggggatttatttttagtttttctttttagtaaactttgttaattgttgttgttgcttaataaataattccgttgctctgaaaattcaagtaaaatttgagagctccttttagaccaaagagaatttaacaaaaattctccaggccacattcgaatttttctagtacgtattttagtgtttgccaatttcttttcaaattttaattaattctattattccttttagagaatgatttttattttgggatgaatttatcaggacgtgacacctctccgagaagattgtggaggaggcccattgccggttttgtgagtggtttggagttcaccaccttcggagtgaaggaagaactactctagtgatcgaggcttgggtagtcctctccgtgggccggctcccgccttgcccaccccttgacgaagggggcatgcggtggtttcgtggttgagcggtggagttgggctcgcctcaacgggagtaggaaactggcgagtttccgaacctcggtgaaaaatctcttgtctccttgtctcatttacttgttgtatttatatttgtgcaatttacatttctagagacatactagagatcatttcaccctaggattgctaaactagacttaggaagtgtgatttactttcctagtgatatacttgagccactttcaccctaggattgcaaaacataaattagttgcttagttagtcttgtccctcaccgagcctagcaacttaggttagttttgattaggtgtcatttaattttaaatcacatattcacccccctctagtcgacttctcgatcctacagtgagcatcagggagactaaatcggggatccctacctggcgcgtgcgcgcccctggtgctagtttttggtagttagactaattctatttatcttagtctcttagataattacagtttgagataatgatggtagtagttagtattttttcgtgagatttttattaactaacaaattaaaaagaaatctatatctgaagtcaaaatttcaaaaatttgaaaactttcaacttgaaatttgaatttttcaagtcaaaatttgaaaactttcaacttttcatcttaaacttgaaaaactttcaacctagatttgaaaactttcaactcaaatttgaaaacttttcaactcgagatctgaaaacattcaactcaagatttgaaaactttcaacccacttttgaaaactttcaactcgagatttaaaaactttcaactcagatttgataaattttcaactcgagatttgaaaactttcaagtcgagatttgaaaactttcaaatcagatttaaaaaattttaactcgagttttaaaatatttcaactcaaaacattttgaaaaaaatatgtgggctaaagattagaaaacgtaataaaaaaaactggaaaaaaagcaaaaaaaaaacgccaaaaaaacgaaaaaggaaggcgtggcgtggggaggggccgcacgcgcacgcgcgaactagctctggtggattaaatccagtcctatgtagatggaggtgaccatattttgcaaggatcaataatgggggcggtggtgcgagggagcaggggtggaggcctagcgtgggggccttcaacataggggactggcttgacacatgcaccctcgcctctcgagtctcgtacctcatcatgccttgtctcgagagatgggaggggtatgtggaaaaggaggtggataaatataaagagaggcaatagtaaggaagagaaatgagaagggtgtaaaataaaatagagattggataggtcggtggctgacatgtagggtttgcactatagttgtgatttgttaaatgattcaattcttgggctcaaatagaaaaaccaatgaccgaccccaagactcactgtaagcacctaaggccggtcacagtataatggtgtggcgtgtggactcgtgcgacacatcggagccttgccgtgtcgttatggcccatctccttattttgttgcttggctcttcagtaggaaacggcttccccacctgatctacaggcaacacaacgagggacatacctccgcgcccgcgttggtgaggtcatcttctcgctgcgtcgtcccctcgtgtgtttagctcactaattaaggctgaacctggcccatttgagttcatttgagaggtcacatgcactgtgggagctgtggacaaacgcttccctaagcctgtttggcatatatatagatgcatggcctgcaccgtgattggcatatataatagaatgaaacatctcgaccttcgctcaaggagttacaaccaattattacagaattcacataaaagaaaactcacacataaagttcacaatggcagaaacaaaactaaaagcaagcacaaactaatagacaccaacacaagataaatatcccataactactaaattctactagagaacctccacccgaaattggcaaatagttgcgtaatcgtcatctcaagtttatgacatgcatcatttattagcttgatatcttcattatgcctttgtaattgagcctatccccgaagccaatatgttcccctgaaaagcatctgcaaataggattttgatggtgatttatgaaaaaccatatcatttctactaagataaagagctcaacatacaggggaagctccgacaagaataagttttttgatttatttttattaacacctaaaagccaattctcaaacatatgagatatcctatacggataataaagtccaaaagagaattgtatagatctccaaagaaatttagaaaaatggtactcaaggaatagatggtaaattgattcattcttcatacaaaagcaacatctcaaactaccattccaattcctcctagcaagattatcttttgttaaaacaacccttttaaggagataccacataagtatcttaatcttaagaggcattttaagtttccaaatgatcttattcctctctatgtatccattattaattaaagttaaatacatagatcaaacagaaaattggtcattttgatgaaaattccatctaaaaatgtcatccttgtctgttaagttaacatgtacaatggaagcacacaaattatgccatataactagattctgaacagctactctactaaaagaaacattaagcggaacaaaacccataacactagcaattgaggcatttttccttctaattatgaaaacaacgacggatatttgtccttcaaagaataattccctaaccacttaattatccttctagaatcttactttgttcaccattattaataattcaggaacccatatttaaaaaggaattcttaaccttcatcagacctgaccaaaaatgggaatccccttgtttcctctcaacctgagttattgatttatcactaagatattttcttttcaataaatcttgctacacaccttgctcatttattaatttaaacaaccatatgcttaaaagacattggttttgaatttctaaactgtgaactccaagtccaccctaatcttttggctggcatataatgtcccatcttgtcaatctatacttttttttcaatgttcatcccctttccaaaagaaacaggatctataataatcgattttttgaagaacccctctaggaatctcaaaaaacgatatcataaacatagctagacttgacaaaacagaattaatcaaaaccaatctcccagcaacagacatgtttatccttccaaatactaagcttttttttcaattctgtgttcaattattatccaatctttattagtaagctttctaaaatgcataagaatgccaagatatctaacaggaaaatcacctaacttacatacaaaaatgtttgaatattgctcatgacactcctttgcctgactaaagcaaattaattcactcttatgaaaatttatctttaggccagataacttttcaaaagcagttaataacaacttcatatttttcgctttctctaaatcatgcttttgaaaaataatagtatcatcagcatattgtaaaatagataaaccatcgtccactaaatgtgggaccaatctagagatgtaaccatcatcttttgctctcttaattaatatagttaacatatcaacaactatatttccccttgctttaaaaccttaaaagtttgaaaatttgatcccacatgatcattcactttaataccaacatgaccacctttgaaaccaattcaatcacaccatttttgggaaaagcccttcattctcaaggtttgttaaacaaaagaccatttaactttatcataagctttctcaaaatcaatcctaaaaattacaccacccttttttttcgaagcaactcacgaatagtttcatgaagaatgacaaccccctccataatattcctcccagatataaaagttgtatgagtgggactaattactttctgagctaccccagagattctatttgtagcaagtttagtaaaaaagaaaaggaaaaagtacacccaagttccctcaaattgtcatcgaattacaaaatcgtcccccgaccgcaaaaccggatacaacatgtcccccaacttacaaaaccagtgcaaactaggtccctcggcgggtttgaccctggttttgttcgacgtggcagctgagtcagcatgggacccacgtgggccccacatgtcaggatgccacgtcagcaggccagcctctcccttcctctctctttcctcctcctcctctatctctctatcttctctctgtactctgggcaggccggcttcattggcggcggcaacgttgtcggcgccgccttgcacgactgcgaccggtgcagtgacgcggcaccggcgccagggacgacaagcgggcgcgacgaacggaggagggcgaggttgagggtcttgaagaacgggagagacttcacgtcggtagcgccggcggcgggacccatggcgggcggcgaggtccttggcgagaggcaagtgatgaggtcgcgcgcgtcggcgtcagcggggccgaacgacctcgccatcaccggctcggccatgcggccgaaggggtggcgcggcgtcgagcggcagcaagaatggtgggcggcggtaattaaatacaaatgataagttgggggacgtgttgtatcaggttttacggttgggggacaattttgtaatttgatgacaagttgagggaccttgggtgtaatttttccaaaagaaaatagaactgacattaagtaaacaaacatgcctatactgttgaattttcatagcctcttcgcacttaggcagtaaaataacagtaccaagttgagagagtaaagatttaaactaccactatgaaaatcttttaataaattaaccaggtcttatttaattacattccagaactcagctggaaatctgatgtgaccatagctataatggatacaaccgttgctcacatcatggatgaataagaagatatcaaaattaagtcctccaagtgctggaatccgattcggccacctgctatactgctgacttcgaacggccaccaaatctgcatacgccctccgttttcggtctgtgagtacttgatggaaagctctcggagtcctcttcccaatggatccagcctcatctccgaattccatcttgtttggccgcaatcacagaaaaaagttactgcatcacctataatgggcctatgggcttgtaacttcgtctgggaccccggcccaagtggggtgcgccctaacctgctagagaatgaccctagggcacccttggtcatcctcccacccctataaatagctaggtaccccttcagtgtttcttaggtttcgttagattaaagtttagtcattgctacttgcttgcagcgcgcgtgccaagaccgctcgtttgttttttcttcagaaccccaacttatcgtttatatttaattcctatttgcaatatcaaattgcttttatcttgttcttgcttgtttcttcgatttgcttgcagggataagattgatctgcaccggcaagatcaataacccacggaaaggtgtatcgatcactaagagcaagtttaatagtatagccaactactagctccaaattatctatagtcaatgtaatagccaattcatacaatagttacttactacactattaatacctagtcctacctgtcatacacacattacgtcttggagtccgtgctgcagctgactacagatctgtagcccactgctcttctctctcttcctttatctctttaaaatatgtttatagctagcttatagcatgctattgtacctgctctaaggcgcaacgcaacgtcttgtacggttatagtcagatcgtcaacatttctctcaaatcatagttatctacaactcaccgaaagatcaggccaatcctagccttgagtgtcgagtggaactcatggcacatcaaaatccatctggacccagagctttattatgttccatctgaaagattgcatctttaatttcattctcagtaaattcatcaactgaagcattacttttctaaagaagacacctagggaatatcacttataagactttcatctagagttaaagaagaaacattaggtggaccaaatagaccttcataatatgtggtaatatgagcaagtactataagcctttacatgttgcccctaaatctggg

SEQ ID NO: 22561 - DNA, 977 bp, Oryza sativa
tcatcacttgcctctcgccaaggacctcgccgcccgccatgggtcccgccgccggcgctaccaacgtgaagtctctcccgttcttcaagaccctcaacctagccctcctccgttcgtcgcgcccgcttgtcgtccctggcgccggtgccgcgtcactgcaccggtcgcagtcgtgcaagcgggcgccgacaacgttgccgccgccaatgaagccggcctgcccagagtacagagagaagatagagagatagaggagcaggaggaaagagagagaaaggaagaggctggcctgctgacgtggcatcctgacatgtggggcccacgtgggtcccatgctgactcagctgccacgtcgaacaaaaccagggtcaaacccgccgagggacctagtttgcactggttttgtaagttgggggacatgttgtatccggttttgcggtcgggggacgattttgtaattcgatgacaatttgagggaacttgggtgtactttttccttttcttttttactaaacttgctacaaatagaatctctggggtagctcagaaagtaattagtcccactcatacaacttttatatctgggaggaatattatggagggggttgtcattcttcatgaaactattcgtgagttgcttcgaaaaaaaagggtggtgtaatttttaggattgattttgagaaagcttatgataaagttaaatggtcttttgtttaacaaaccttgagaatgaagggcttttcccaaaaatggtgtgattgaattggtttcaaaggtggtcatgttggtattaaagtgaatgatcatgtgggatcaaattttcaaacttttaaggttttaaagcaaggggaaatatagttgttgatatgttaactatattaattaagagagcaaaagatgatggttacatctctagattggtcccacatttagtggacgatggtttatctattttacaatatgctgatgatactatt

SEQ ID NO: 22562 - DNA, 684 bp, Oryza sativa
gtgagtgtcgtcggaccggctaggatcacacagggcccgagagctaactgtgcggcgtgctatgaaggtcaaggaaatagtgaagctccgaccactgtacgcatcaaggcgtggggtgccaggagcagcacttcgaccttgggtttggttttgccgggctttacaaccaatggttcgacgtcggggccaatagaccgcaaacgtccccatggaaggtgtaaagttccaaccgacggctttttagtggctaaagggtattttgggataaaagaaaatatttaaaaaggcaaatataaattcaaataaaatagcaaattgggaaatgaagcatttgaatttatatgaatttaggtccaggtttcactgagatcggatctacggtttaggagatatgagcttctaaagaataggatttgaattaaatctagaaaatatgaaaggttactattcatgggcctacctgtcagtgtctattcccttttctcttctttctcttcttcttctcgtcttgttcttcctcctgcttcacagagagccgagagaagggagaagagagggagaaaggggcgctggtgctccggtggtcgagaggctgcgacgtcggcggcaaaacatgttcctgagcgacgcgcatccagggagggtggtagctagctaaggtggagagtgagatggccggaacgg

SEQ ID NO: 22563 - DNA, 2357 bp, Oryza sativa
ccctcttgatttctccgctgcatgacataatctactatttacaatcatgagtactctttttgccctttgagccccgcatcggtatagccgatgaggcaactatatgtgggacgttacgccgggctcacttgccaagtcttgttattcctgctgagctagtgtgaaaatatgacttttagaaaaggactgtagcaacgggacatctcgaggtaattcgtaacaaatgcgattgtcaggcttggcagtgcaccgcgtcggacgaggacataaggcccatgggacatgtctcctccctcaggcctataaaaatgccacaatagcctttcccgggctatcgaggagtttccacagccgaccacttagaatgtgacttcgtgtcacttctcggaatagaccacgtatcaaacatcggatgtttggacactaataataaatattaaacgtagactattaatgaaacccatccataatcttgaactaattcgcgagacgaatctattgagcctaattaattcatgattagcctatgtgatgctacagtaaatattctctaattatagattaattaggcttaaaaaatttatctcgcaaattagcttttatttatgtaattaattttgtaagtagtctatatttaatactctaaattagtgtttaaatatagggactaaagttaagtccctgaatccaaacaccaccttagctatgctatagaacacaatacacatggttgttcccaagaagactaacatttgggcccatcttacaacagagccttgaatcagttcccgtgcagctaggccatcagttccacacacccacgagtagaccaagtcaccgtccccaagcaaccctgtgccaccgcctaggttttcgagtgtatcggcttcattgtggttccgtgagtcatgcagcgagagagtgcatggaccttcccgtgggattacaggtcattaaatggagactgtatagagcgatgctatgccttcacaatgaagcaaactggctaaatagagacctttggctagaatgtagatattctttatttcaggtgatattataatatattttttatccatagcaaagcacgaatactcaactagctagtatcgcgtaaaatgtactactggacatgattgttcgattggtgctctgcatgactgcataattcatttcatcgaattaagaatttaacttgtcatatatcccaccaactactggtccatgcttgcatgcaaatccatccaggaaaacaaaggaactattacacaagcaacttgcgtgcaactaaactatagcaagctatagctcacctataaatatcagacgaaaacccacaagcaaaccatcccaaactgacacaagctagagcagtctagaacactgagtgactgattaccaccggctcattcgatttcagacaaaattatggcttccaaggtcgttgcttctttccttgccctttcctctttgctgtcaccgcacacggctgcacacccaactgctctagtgagaaggtcatccctacgccacccgaagcagtgccggcgccattgcaccctggtgggcacagtgatcacgggcgttgcccgatcaacgccctgaagctgagagtgtgcgccaacgtgctaaagggctggtcgatgtgaagattgggtacggccccgatgactgctgctcgttgctgtcagggatcgccgatctcgatgctgccatctgcctttgcaccgccgtgaaggccaatgtgcttggcattagggtcaacctcccagttgatctcggactcatcctcaacaagtgtggcaagacctatccgaccgatttcacctgctaagcggcacagttataatattccagagtttaatttggtgtggttgttcgctattgtggttgttggctattgttccccgtgagtaagtctcttgtcgggtttgcagattgatgtgcggttttatcatccttgaatcactttaatttgattgttgtaagtcgttttttctttctaaaatccattatatatattgttatctcgagataattttaatggcttacatgttcgttttctctcagccctgcacgcataaaaaaagatcgatttatagattcgtatttgatatgatcatgtctgtttgctaatcgatctgcatttgtatcaaccttgaatcacatgattgttgtaattaagctggtttttttgtgagattgtaatatgtaaaacctgctatatatattgttatcgagaatatattttattggtttactacgtgtccactttctctcaccatgcatgcataaaaatagatcgatctgcaaatctttatctgatatgatcatatgtctataagctacaaagaggg

SEQ ID NO: 22564 - DNA, 15049 bp, Oryza sativa
ctttaatttgattgttgtaagtcgttttttctttctaaaatccattatatatattgttatctcgagataattttaatggcttacatgttcgttttctctcagccctgcacgcataaaaaaagatcgatttatagattcgtatttgatatgatcatgtctgtttgctaatcgatctgcatttgtatcaaccttgaatcacatgattgttgtaattaagctggtttttttgtgagattgtaatatgtaaaacctgctatatatattgttatcgagaatatattttattggtttactacgtgtccactttctctcaccatgcatgcataaaaatagatcgatctgcaaatctttatctgatatgatcatatgtctataagctacaaagagggtcaatcccggttaggaagggcccaatggagggtccccaaccagctctggattttcagcatggatgacggggactcactagtgccgaagtttagaacaagaactggtatgttcccccaagtccaaaaaaaagggagctgctcaaagcattggcttgatgaattgagcccatgctttgagcggtcccctctgagatcatgctcccctaatccccattatagaagacgaacaacaagaacacaaaatattcacaatcagtatccatcttggtgccagcactgctttgtggccgccactgcggatgtcagacccatcccttgcctcgccgctgcacatcccggcacggacgccatccctcgccttgccattgctgctgccgatggatcccaactacatgtctcaccagtagccacctcagaaatgttgcgtctcctacaatgggcaaacaccatggtcactggtgagcactggaagggcaaaaagaagaggcgttggagtgaggaagaagcatgcatcctaatggcaaaatagtccacaggatggtgaagacgctctgcttaagggtggaattttatccaagcccgttccagtgatggcattttagtgaagctgttttttatgttggtacatatacaaatttctcctgaaatacaaccctcaatcaaaaacaacaaatgtgaaacttagcgtagctagattaccaatccacggcaaagactttagtctagggatgataccctaatcttcgttatcttcaacctcgactcagaatggacgacaaacaacaacaattgggaattgagtacattcgtactcagcgaactactggaatatgtgtaaaatgcaagcttgaaaggaaggttgggtttgtttggcaattcatttattttaaacacttttgaaagttctaagtgtgggttattataaaacataccatctcgattcacccacgagttgcgatccaacaactcaagcaggaaagtcaaattttagttttatgcaacattttcttaaaaggaccttgttttcacttagaggaggggttgaatagtcatttctaaaagttatcacaactttgaagcgcaataataagcaatcggaattttatattcaaatcgaagttgccgatatgaaccggaaagtccgacagctgagagtaaaacaataattatgaaattttagctcaaacaaacaatatgtacatgaatcaaaaggtaacaaacaagatatataagaaagatataaaatcaccaagtagattaattaagcattcaaatatatctaagcacaatatgaacaaggcaataacggacaaaccaagagaggagacacgtgatttatttaccgaagtttggatctaccaatcctacgtctctattgaggggctacaaaggctgggtctctttcaacccattaccttacgtggttacacaaatacactactcgattttactcttgctttcttccaacacagaggtgaaatcgaagcctacacaaccttggatgctcactggcaacgtctagctatctaaaagactttaatatcaaagagtaataaacgcacacaaagctagcttacgaagggaatttgaattcaacatccataagtttttttttcatatcaattacttgagaattgagattttggttcaaaaagattagtttttaattgagatcatggcactagatcctagatacacttaaagaatcaaattattgagcatatgattttcattaaaatagttttaacggttgaacgaaaatcgaggcattgcattacttctggatttatttatgatagtggacacgattgaacgcaaagtacatatgaagaacatttttctaattactagttttgaattttggaattaaatttaataagtgctaaattgaaagtccaagactgctacagcatcatatttattaattttgaatttgtaaacacaacatgcaaagagttcatggtgcatgttttacttaatgcttctcaatacaacatatatgaccacgctaatataagccacgtagccaggtcggccggatacttttggttacgtcaaaactctcttaggataataaattagacagtgtaggtataaattactggtaggtaactttgttgaacaaatactggtgggtaattaatgggctagaccgggatgattaaagagattaatgggcatggtcagcacattatattgtggacatataaatcatattgtctcagcatattggggctgtttatacacatttgttgataaattttctgtcaataatttgacaggtacaaatataatataatcatataacattatatatagtgtatcttgcatttaaatataatgcaagtatatgtaactttaaaaagtcccatggtaacatgctgtttttacaaagtggaggtcaccggatcgaatcacctcacctatgcccgtgctgtatgtttttttcttcctagttgcacaaatcttgaaaaaaattcaatggtttaaaatcatgaaaaaattgtagttacatgattttattataattatatagtatgtttgataaattttaggagaaaatttattgataaatatataacaaaatcgtttcagatttgttcagacttcagaccagtcatgacttgcatgccttatttaaatttccagccagctgatcagcaagtcgcacacgcttggatgcattatatatactcctatttattataactggagggagtatactccctaggacggagaaataatgcatccaaggacggagaaatatatactccctgaagttattaattactccctaggacgaagaaataagctttcttacctgtttggtacagctccaactcctaaatttaactccagaagttgggtctggagtggagttgtggagctgcctaaacccagctctacaactctaattcattttgtgagagaactccactcagcttcactcccaattttggtggagctgaaactgtttggctgagctccagctctaggaggggtggagctagagctggagctgtgccaaacaggcccgtagtgtgcaagtataagtaacagagaataacatccgagacccaagaaactctgaaaaaacaatattatattgatagatccagaaattatgatatcgtgaaaaatgtacaaccgggcatgattgtttgattataattggtgctctgcatgactgcatagctctattcatcgaaataattacggagtaagaatttaacgtgtcatgtctctcgccaacaactactggcaattatcatatctcggtatctcacacatgcatcatgcatgcaactacatatacgaagcgagctcatctataaataccaggcgacaggcgacaccacaagcaaatcatccaaaagcgacgcaagccagagcagcctagaacactgagtcactgagtaccaatagctcactcgatctctcggatataccaatggcttccacggttgtcgctcccatccttgcccttagcctcctcctcttcgccgtcattgtgcgcggctgcacaccaaactgctccggcgagcaggtcgtcccgacgccacccactgcagtgccgacgccattgcaccacggcgggcatggtgagcacgggcgttgcccgatcaacgccctgaagctgagagtgtgcgctaatgtgctcaacaggctggtcgatgtgaagatcgggcatggccccgatgattgctgctcgctgctgtctggaatcgccgatctcgatgccgccgtctgcctctgcactgccgtgaaggccaacgtccttggcattagggtcaaccttcccgtcgatctcagcctaatcctcaacaagtgtggcaagtcctgcccgtctgacttcacctgctgagctgcacatttataatgctcatgagtttattttggtgtgattgttgggtgtcgaggtttgtttgcatgatccctcgtgaataagtctcctttttgtttcagattgatgtgcggttgtatcatccttaaatcactttaatttgattgttgtaagttgatctttttgttgagagaatgcaaatcttcaaaacccattgcattatctatatagatatattgttatgcggaagatattttaatggtttacattttcgctttctctcatccatgagccaaaaaaatagaccaatccatatatctgtatctaagatgatcatgtcctcaaactgtgtcacgcacaccaatatagaccttgcatcagagtttcagggcgttgatctggcttcagggcgttgcccggttatataaaattcgaccggttactgaagctagcccgtagaagaagatggttccgggaataggtgacttgcccggtgtagttagctatgttgtagactgtagaacacatggttgttcctgagtagactaaggttgcgttccgagatggaaattgagaactccaccaacccgcacgcaaaataaagtgatccattagtgtatgattaattaagaattaaccaaaataatcttgaaaatagattaatatggtatttttaaagcaagtttcttatagaacatttttgccaaaaaaaagtatcatttttgcaaaataatatggtatttgcatgaaaaccaaggagtggaggttagaaacgtctgatgccaaacatagactaagagtaggccccatcttacaagaaagcctcaaattaggtcttatgcagccagtccatcagttctgcgcacccacgagaagaccaccaagtcaccatccccgagcagccctatgccacaacctaagttttctggtgtctcggcttcatcatgattacgtaagtacatacaatgaaagggtacacacgcgagattacaagtcaaccttttccggagagggatgcactgacgcagtgaatgtgtaggcaaatttgttgcaggacatgtaaaaagcatataattagctgagggacaccgtaagaccacacatctgccgtagggcaccacaaaaaactcataattagctgctggtctctcatgacattattttattattttcagagaaaatagagagaaacatagattaaagagaagtttgcacatggctcaactaaatgtatgtgaagcacggatacgtcacaaacctcacgtatcagtatcagatacgtacttcgataaagacacatattagatacactccgatacatatccctttttttcataatttcaaaataatacaaaaaaatcgtcatcgggacgtagattcctagcaccaccgccagacacaatgcctcaggttcgttgtcgtcgcgaaccgtcagtgccgtcggacatggcgaccccatctctgacggacacggcacgccagtatctgcacctccataggacacagcatcgccgccaccgccgccagacgaaatggctctaggcccgcggtcgtcgggaaccgtcggcgccattgccgaacatggcgactccatttccaacagatgcagcacgccggtatctcgacctccacggggcgcaacaacgccgccgctggacattgcaacaactccatcttcgccatgctggctgtcggtcgatctccgtcaccggagccttgccggcaaaaccctcgcgccaccagctttgcctcgtcgaggtgactctattcccctagtttcctctttcctttagccaccatatcaagctgccaccgtcacctcccttgccagctagagctgaggttttcccttcgttgttctggcctcctctcaaagtccctctacttgccaccactttcctcggatgcaaagaaaaaatgaacacgttcaatcgctgacgttgccgtctcctgatcatcggagcaccagcgccctcctcttgtttcatggaagaagaaaaaagaatgagtagagaaggagagagaataggaaaaaaatattccctgacaggtggatcctagcatgggagtgaggctcgattgggttcatggggtaaaactatactttcatagttgtttctttctccaattcctctgaatataataaaatagtcccatgggtgtctaacagctaattaccacctttttacagtatactatagcataaacgcgtttttgcggtgtccctagttaattacacttttttggatgtcctgtaacaaattttgcggactatatatatagagggatgttatgccttcgcaacgatacaaactgattaagtagaataccttgactaggatgctgatattattttttaggtgatattataatgtaatttctattcatagaaaagcatgggtactcagctagcttgctagtatcgtgtaaattgtacaactggacatgattgtttgattggtgctgtgcatgactgcatagctctattcatcgaaattaagaattcaacttgcatatctctcgccaactactggcccatgcttgcatgcaaatccatccatgaaaaccaagcaattatcacccatgcatcatgcacgcaactatctataccaagcaagcgtactatagttcagctataaatagcagatgacaccccaagcaaaaatcaacccaaagcgacacgagctagatagcagccaagaacacttattcactgagtaacactagctcattcgatcccagacaccaatggcttccaaggtcatcgctcccttccttgcccttagcctcctcctcttcgccgtcattgtgcagggttgcacacccaactgctccggcgagcaggtcgtcccgactccacccattgcagtcccgacgccatcacaccatggtgggcacggtgagcacggccgttgcccgatcaacaccttgaagctgagagtgtgcgccaacgtgctaaacgggctggtcgatgcgaagatcggacatggcaccgacgattgctgctcgctgctatctgggatcgccgatctcgacgctgccgtctgcctctgcacggccgttaaagcgaatgtgcttggcattagggtgaacctccccgtcgatctcagcatcatgctcaacaagtgcggcaagacctgcccgtccgatttcacttgctgagctgagctgcatgattataatgttctggagtttaatttcgtgtgatttttggttgtcgattgagcctttttttcatgattccgcgtgaataagtcttgtttcttttggcaaattgatgtgcggatctatcatccattaaattactttaattcaattgttgtaagttgatttttttttgagattgtaatatgtaaaacccattatatatattgttatctggagataattgtggcttatatgtttgctatgtcacccacgaaagcatgaaaatagatctgtatttgatatgatgatgtcctcaaattgtgtcacgtataccaatatggaccttgcacctaagcaatggcgacgctgaaattcttgaaatgtaatatgaccgattgaatttagtcaaaatggcccacagtacatgggccaaactatgtactctcgtttaggccaaactatgcaatcccgttggttggattgccattccagcccagcgtgaaggggttactaaaacttagccctgagaataagatggtccacactgcattgcaaccactagatctactataagatcatcctttcctttataaccaaacaaacaacaaggcacataatcataagattatattatattgtatacaccgactaatttatcggtgtattttagaaattcagatccgaaattgcaaactctgctccaatgtgttctgcagtgtgattcaattatctagataattaattagcggaatgaatgtacatttgtaggctagttatttcaagcatttaaattttgtcttcaaatatattctatttagaatattaagaggtatttgcagtgataaaatgtacaagatatctccccatgtcgacaaccccacccaggtgtcagcaagaggataatgaaaggtaatctagattttcccctcccctgaattttcatgaaagaaattactgaagtatttatatatcttggaacagagggagcatgcatgtacttaattttctttatctaatgttatatgatgtgtgtcaactcaactatggtagttaataaatatagaaaaatacatgccggtccttaaacttgagaggtggtgtcacttaggtccgtaaacttaaaaattgcatatttaggtccacgatcttggtttaatgtattacagcaggtccaaacgacatttgactgtgtctgactgctaaggtcattcccaacccaataactaggatggtgtccatagcattaaataagttgccacctaggacaaaaaatgatgttgcaagtgaataaatgaggaaagagaaggaaaccatgtcttgcatgagacatggtttctacacaacatccaagacatagcattaaattgaagtatggaatagtggtgtttgtattggaagagtagtgtttagtactagtttcttgatgatgtggagtttatggaaatcatgtctagtgttatgagttgggactgtcctaacgtggcgcttcatgtagacaccaaatttacatccggccccctccacaacacagagtggcagtaaacttacacttagacccttcgaagtacatcgttgtaatataagcaagcggatggcctcatggtgaagacgaataactgatggagctggccggcgcgattgtctaacacaacaagcggcttggaatggtggaggttcgcttcctcctccgcctcatctccggcgtaggcctcggctgctggacctacgagctgcggagcttcgtcgacggtcacgaagagctcgctgcacagcgggacgcggtcgatgagatggacgctttctacgacagcgccatccgggagctcctcggtaggactgggttctaccccattgccaacgtgctcatcatcaacattatcagctagcttcttcctggagccatgcctctcgtccatgttgggaatagtcccacatccctaatctagagggagttgaaccaacttaaaagtagagggagctcctcacctcttgagctagcttttaggatgtagcaaggctttctcccggttgggccaacgtcttccggtttggggctaacaagtggtatcagggccaatccaacaatctctagtgcttgtgcacactcaaggcggtgtaagcccaaagcccagtggaccgcgggtgtgaggcccgtatgtgcccgtgtgtggggctggtcagtggaccgcgggtgtgaggcctgtatgtgcctgtgtgttggaccggtcagggctaaggggtaccaatgttgtgacgggggagattgttgggaatagtcccacatcccgggtgtgaggcctgtatgtgcctgtgtgttggaccggtcagggctaaggggtaccaatgttgtgacgggggagattgttgggaatagtcccacatccctaatctagggggagttgaaccaactttatgttgtgacgggggagattgttgggaatagtcctacatctctaatctagggggagttgaaccaacttaaaggtggggggagcccctcacctcttgagctaacttttggggtgtagcaaggctttctccccgttgagccaacccccacctcttgagctaacttttggggtgtagcaaggctttctccctgttgagccaacgttttccggttttgggctaacactccaggactgtgtgaggtggtaccgcatgcgcgaggacgtcacggcgtcaaacctctccgggatggggttgcagcgccaggctggtcccgttggacatcgcccaaaggccaaaatgccatgtgtgcgcggttgctgcgaccggtggtagcgctcgtagtctcgacggagtcactggcgccgcactagcacgccggcaaggagaggactatgatgttgttgcagtgcctattccgatgcggcagcacggccgtgctgctcagcagcgacgatcaccgttgtcgcgccaagatggaactccgtcgcctggtgcgcgccaccaccgcggcactggcaagcgacgatgcttactcctgcatctgcagcaagaggatgacgacggactcctcggtgccagcatcaacaaggccctctccaagaccgcccttcgcgcattcgctgccaacctgcagcgtcttctgcacttgcatacacatgttgaatggcctaagtgaaagtttaccactattttgtgttgcggagggggtggatgtaaatttggtgtctacgtggagtgccacgttggcggtcagatacagtcaaatgtcatttggacctgttgtgatacattaaaccaagatcgtggacataaatatgtaatttttcaagtttatttacctaagtgacattagctctcaagtttaaggaccgaccatatactttactctaactagcatggtggcccgcgcagattgtgcggctagtatcattatattttctatcatataatagcatatatgttcttattatattattcaaatatattaaaatgacaacataattttaaattttgcaataactttacaaaactactaatgtgtaatattcatattgtattttatatacgtgttagttattaattatttttaatatcaaattttagttatttgtaaattatatatattcctatatggactgtagactcgtcttttaatatttctttttttttaatttcgaattttctataaattgtatttctatatagactctatactcttcttccaacattatttatttttatttctgaatttttattatttctaattgtatttctatgtgaactctaaactcatatttcaatattctttaatttttaatttcgaatttcctatattgactttaaattcttcttcccatgtttttcttaatttcaaattttagttatttgtaaattgtatttttatacgggctctaaactctaattttaattttattatatttatttcaaattttagttagttttaaattcctatatggactttatactctacttctaatgttccttatttttaattctgaatttcagttatttcctaattgtatttctatatggactctatactctacttctaattctaatgttccttatttttaattctgaatttcagttatttcctaattgtatttctatatggactctatactctacttctaatgttccttatttttaattctgaattttagttatttcctaattgtatttatatatggactccatactctgcttctaatattccttatttttattttcaaatttcagttatttcctaattgtatttttatatggactccatgctcctcttctaatattccctattatttaattccgaatttcagttatttctaaattgtatttccatatgaactctgcattttctttttctccgattaatgtgagaatttctaggccatgagagcgaacgtggaggctcactctaaacttatctttcaatattatttatttttaatttcgaatttcagttacttctaaattgtattcctatattgactttaaactcttttaataatataatagctacttctagtattccttacttttaattccgaatttctattattttctaattttatttctatatggactctatactctacttctaataatccttatttttaattccaaatttcagctatttcctaattgtatttctatatgtactctatactctacttctaatattccttatttttaattccgaatttcagctatttcctaattgtatttctatatggagtctatcctctacttctaatattccttatttttaattccgaatttcagctatttcctaattatatttctatatgtactcttgtctcgtcttctaatattccttattttttaatttcgaatttcagttatttctaaattgtatttctatatggactctagtctcctcttctaatattccttattttttaattccgaatttcagctatttttaaattgtatttctatatggactctgtcttttctttttctccgattaatgtgagaatttctaggccatgagagcgaacataaaggctcctttttctattcgtttaataatataatagataaatataaggtgcttgatctacgacttagctgaatttaattactttgggccaatcaattaagctttttttttccaagaattgaattaacttcgggaaggaagaggttaggaacttctcccagcacatgtcaaacggggtgactaattatgtattaattaactaaaataaattttaaaactagattaatataattttttaaaacaactttatttgctatcgaaatgttttgaaaaaaacacatcgtgcttacgaacatatataccaaccggaataaacatatatacatagacagcaaagaaaaccgaactctttgttgaaaaagacaataatagtcgatcgatggagcgattgatattgcgtaaaatgaactaccggacttgattgttggcttgctgctctgcacgtacgaatgcatggcggctaaaattaattaatcaatttagcaactagctatatatgtgcctatgtcctccatggaaaaatcgtatcgtacttgtcgcaagcaactagcccattccgcagcaaatccaaatcttccatccggggacaaaccagtgcgtgcagatacatcgtgcatgcatgcaactagcagccactaacacaaacctgtctatttgtaacggctcaagtatcatctgtaacagctcgcccatccgtaacaaacaaaagatacggatgaagaaaccatcttttatcccgattaacaaaagatcacgggtgaagaaaccatcttttatcccgatttgtaacctcatatagttccaggatgcaaaccgggatcaagcatccggaactaaagatgacgatctttaatcccagttaaaatacactggtggagaaactatttgtagtcccggttcgtaaccccctttaatcccagttgtccaatcgggactacgaatccgggactaaatatagctatctttagtcccgagtaaaataaccaggactaaagatcggtgtaccattttttttatttgcatggcgctgttttctgcatggtatatatatctatatgtatatacatatatatatctacatgtatgtatatatatgtatgtatatacatatatatatatatgtatgtgtatatatatatatatatatatgtgcatatgtgtatatgtataaatacatatattacacacatatgtataatttaaagtacttaacattttatgtgcatatatgttaccaaaatatatattaacactaaagtaaatgtgtacatatataaatatatatatacatgcatatatagtacaattcatttgcttgctagctatagctacgatttcgacgccggtgttatgtcagaagaggaaggaccgacgttatggattgtcgatccgtcatagtagaattcaccatcaggattgaggacttcttcgttgatgaatcccatcagttgttcttgaacagccgtgataaaatccttgtgtgggagattatccctcatgtgaatacgctatcattcgaaaaataatgacatatcaatatatgaaattaataaacaacttaacaaatcgatacgcaatgaaattttgaatggtttatgtatacgtacatcaagctctcgtgtggtgcatatttggtttgataggtagtgggcatactcgcatacgttgtagccgcataagtaagttccctggtcctgctttgcacactacatgagaaacgatgagagatttaatatactctttatattaactgtaattagagattcaatataatataattttgtatcatgcatgtactcactggaaaatgaaacctccgtccaattttttctttccaagtcccgcggaccaattgacggaaccgatcccaagccctacatatgcagttgtaagctatgattaattaattattacccgagatcaacataatagcaatagaatccccgcgactttggaatagatggcattatattacctgtctatcagttggaagaccttgtcaaaaatcttctcctctttattcattgagtcgtacacagtgactctgcatgcgtgagatgagatatatatgaaaatatacatgctatatgtatgggaacgaaatttgttcgaacgacaataaatactcactctgctgcgttaggagatggatgagattgtcctctgtgtctttctcgtacttgtcgatcatttcggtgttgattttccgagggtcgatgaacccagtatcgtaaaacccccgccatcgggccctgtgaatctccattctacaatgataaaatgaaattattattgtttacatatatgcaaggagctagttattgtacgaaacaaatcgaactcaaagatacttacaaaatccatgcgctcagaagagagacgtcaagggcgtccagatggtacagatcgaagacatccttgaaatggatccagagaacatcttctccttgcaagaagtcggggtttctgatcctcgctccgaacatctctttacccttggcgttcatttccatgtaccattcatggaatttgtacatctgtgtcgggggactgcagctgctcaggcgtgacaagcggtttaccgagttcaaacttgtatgccacttccgccttcgggattggtgcgattcccaatcagctgatccatagttagaccggtgtctgaaatgaaat

SEQ ID NO: 22565 - DNA, 3863 bp, Oryza sativa
atcctgctgcgttaggagatggatgagattgtcctctgtgtctttctcgtacttgtcgatcatttcggtgttgattttccgagggtcgatgaacccagtatcgtaaaacccccgccatcgggccctgtgaatctccattctacaatgataaaatgaaattattattgtttacatatatgcaaggagctagttattgtacgaaacaaatcgaactcaaagatacttacaaaatccatgcgctcagaagagagacgtcaagggcgtccagatggtacagatcgaagacatccttgaaatggatccagagaacatcttctccttgcaagaagtcggggtttctgatcctcgctccgaacatctctttacccttggcgttcatttccatgtaccattcatggaatttgtacatctgtgtcggtagggactgcagctgctcaggcgtgacaagcggtttaccgagttcaaacttgtatgccacttccgccttcgggattggtgcgattcccaatcagctgatccatagttagaccggtgtctgaaatgaaatccgttatgccaaaatcttcacctgtcaccaagggctcgacctcttggtttggttgttctccaagctgagggactggtttggacttcttgtgataggctttctgaagtgttcggtcatagtccgatagctttaaggcctccttgtttgttgtggacattcccttgaagaagtttttcacgctcgggtcaatagttatcttcttttcaggactccgaggcttgagttgcctctttacttctcctgccacataagcatcaagctcctcttgactgcaatcgtacggcggctccctgtttttggtggcgtcaactttcgccttcttcgttgcccttgtgcgggcatgcggtggagcttagcgagaccttgtcttgggaggtgcaggcggacacggtggagatggaggaggcggaggagccagaggagatggtgcaggaggagctggcggaggagccggaggagatggtgcaggaggagctggcggaggaaccggaggagatggtgcaggaggagatggcggagccggaggagattgtgcatgagacgccgcttgtcgccaagggaggatgatgtactgcttgcgccatagtataatggcgtggcttgtgtctcgtagatgcgtctcaccgtctcctcctgggtagtccaactcgagatcctcgtacgcggcttccaccagctcaacctcgaccctcgagtatcctgctggaatcgacctgcagtggtaagtccctgaaatgtccgttgggatggctatttccgacgccaccttcacgtgatgagaggttatctattagtaatcaacctaagcagaaccttgcggaatgtacaagtcaaaaatcataaaactacgagcataccttgattgataagttcttgaagggaatatgcagctcacatggtgtccgctgagtgatgtcatcaacggggcaagtggtttcatcctgggtttgcatggcgtccatgctctgtgatcctacctgccccgttgaggcgcaactgctacgattgcctgatgggctaaccattgcaggaggaatgtacggctggggattctgggaccgatgtgcggccatgcattcatccaccttccttgccacctcctcttgcatgctgagctcgtagctcgataccctgtactcaagatttgcaatcttcgcctcgatatctctcttactcctcatccaactcctgtacgtgtggatgtcctccttgaatctaatcttccagggaatcacgcctttccctcgtgttcgtcctggatgctcgggagtctgtagggcgagtgacagctcgtccttctctctgtcgtgtcggaatgtgccctgagaagaggcttccactgcgtccgttagttgactggtagcctcgcatatcagatcgctaaagacaagggagccatcaactgggttaagcgttccaccgtgagcatagtaccagaacatcgatcgattcgcccatttagcggtggccggttcgatactcctctcaatcaatcttgcctccatctcctcccacttcggcattgcgacgctatagccgcctgaccctaagtggtgatggtacttcttcttggcggcattttctttgtttctaaccatcatcggttgcccttgttactctgtcttgtaagcaacgaactcgtcccaatgatcccttagctttgggaatacgtcgaagttcggtgttagtcccttcaggatgtatttcttgtagagatatcccttgaagctctggaactattctgccattttcttaagagtccactgtttcactatgttctccgtacccgcagggagcgtgaacgtctcgagcattgtggtccacatcatctctttctctgattccgggacaaagctgtcattatccccgcgtgcccttgttctacgccagtacaccatgctgacaggcacgttatccctcacaacccaaccgctgtggcgtacaaaattcttggctgcttctgccggggcactaggtcaaccgtcttcgtccacctcagttatgatgtgccgaccctctatcttcttcacggcacctcgttgtccgcgtgccctcttctgtccagcggagggatgacttccactagcctcctcctcctcattcccctccgcatccctctccccgttcccctcctcattcaagtactggtttggaacctcgttcccctcttcttcgatccaatactggctgcttccctctgcgattatatcatatagtatctgttcctcattgcgatcagccatctgttcgtacaagaaatatttgctaagtctataggtcatatttgctaagcgtaatattaaaactctactaatcttatattaaatctctaataatcttatattaaaattgtaataatcatatatgctaagtctaacaatcttatattaaatctctactaaacttatattaaaattgtaataatcatatatgctaagtctaacaatcttatattaaatctctactaatcttatattaaaattgtaataatctatatgctaagtctaacaatcttatactaaatctttactaatcttatattaaaattgtaataatcatatatgctaagtctaacaatcttatattaaatctctattaatcttatattaaaattgtaataatcatatgtgctaagtctaacaatcttatattaaatctctactaatcttatattaaaattgtaataatcatatatgctaagtctaacaatcttatattaaatctctactaatcttatattaaaattgtaataatcatatatgctaagtctaacaatcttatattaaatctctaatacaatatgataagtctaataatctaataatctctaatactcacatttgctaagtctaataatctaataatctctgacactcacatttgctaagtctaatacaatatgctaagtctatcacgaatctctaacattcacatatgctaagtctaataatctaacactcacatatgctaataatctaataatcttatattaaaactctaataatcttatattaaatctctaacaatcacttatttacatcacttgcctgcgcgaattccttcgatggctagctaccacttcggcttgagggacgacgacgacgtcttttctataacattactaggaaaatgtattagtctaaacgcaaaggaacatatatcgtatttcacgttttcaactatatatataatcgtatatatatatatatatatgctaggtttaataatcgtttaattatctcgttcgtacacgtttcgctcccgttcgttctcacatttttagtacaagtgcattcacgttcgttcgtgtttcgtt

SEQ ID NO: 22566 - DNA, 2876 bp, Oryza sativa
agtcggcatctgcaggaggcgtagtcggggtcggggtcagccgcgagcgtcgacgttggcggcagcatcggcaacgagctaggcggcggcagtttggagagagagagagagaaagagagatcgagagagagagagagaggcagtggcggctctcacccaagagatgtggcggcggcttcagcggcggaggcggcgaggaccgcaagacgacggcgagagacgacggcggcgtcggcgtggggttgccctaggcagtggcgccgaaggagaagctgagatcgattagaggaaaaacttctaagtgttggtggagaagacgagggcgcaccgggaatatatatacccctagatctttagtcccggttggtgagaacatccgggactaaagatattttcccgctatttccaaattctttttaaacccgattagggttaagaaccgggactaaagataatagcactgaattttgaatttcattacatatgtgtttctaaaatagtaaataatgcattacaattatttaaagtcaaaaaattaatgacaaaaccttcgaaaaattattgttatctgtagtaaactaagtggataatatataataagcacatgaatgatttaaaattgttaaaaattttaataatcatatataattagcatatgcatgatattaaattgttaaaaattctaattaacatatgtaaataccacatgcatgatttaaaactaataaaaattctaataatcatatataattagcatatgcatgatattaaattgttaaaacttctaattaacatatgtaaataccacatgcatgatttaaaattaataaaaattctaataatcatatataattagcatgtcatgatattaaattgttgaaaattctaattaacatatgtaaataccacgtgcatgatttaaaaattctaataatcatatataactagtatatggatgatttcaatttgataaaaattctaataatcatacataattaacatatgccatacaacaattgatttgtatggatattcaatacatccaaaatagtttacatcgtgtacacaacaattacggcaatacatcggcggtgacggttgaccgcacgtactttctcctcactattgttccttccttgtgatcgctacgtgagtaaggggtgtcttcatttgataggaggatgctagggtcaatcgtcaccgtgaaagggggttgcccatcaaactgatcgtaatcctcgtcagtcttgtcctctactccgacaatttttctttttcctgggagaaccacgtggcgcttcggctcgtcaggctctttgcccttttttcctttgctagacatgtccttgatgtaaaaaacttgcgttacatcattggcaaggacaaaaggttcgtccgagtatccaaccttgttaaggtcaaccgttgtcatcccactgtcatcaatcgttacgcctccaccagtcaacctaacccattggcaccggaacagagggaccttgagaggtccatagtcaagttcccatatgtcctcgatggcaccgtaatacgtgctagttgtaccatcgtgtcccatggcatcgatacgaacaacactgttctggctcgtgctcttcatgtcttgggctctcgtgtagaatgtgtacccattgatttcatatccctggaatgtcgcgatcgagccagatggtcccctcgccaggaaggccagttgttggttaatcgtctcattacccatgagatgttgtcacaaccacgcggagaaagtatcaatgtgataccgtgtaatccatgcatcggacttaccgatgtttctagcacgaactagagccaagtgctcctcgatgtaaggagccaccaatgaagattgttgcagaatcatgaaatgggctttacggaataaattgttgtctaccgtcattattgctttccttctgagagtcccctttccccgtagtctcccttcatggcgtgattcaggtaccccgattgggcgaaggacttcaataaattctacccagaattcaatgacctcctttgtttcataccccttggcgatgcttgcctctggacgagcacggttacaaacatatttcttcagaacgcccatgtacctctcgaaaggaaacatgttgtgtaggtacacagggccgagaataccgatctctttgacaaggtgacaaagcagatacgtcattatattaaaaaatgaaggtggaaatatcaactcaaaggtgacaagacattgcaccacatcattctgaagggcttctaatctatccggatcgatgaccttctgcgaaattgcgttcatgaaagcacatagttttgttattgttgcccggacattgtctgggaggataccccttattataattggtaacagctatgtcatcaacatatgacaatcatgagactttaggtttgcgaacttcttctccttcgtgcttattattcgctttatatttgtggagtatcctgacattaccttgatgctctccaagcattcaaacatactttccttctttgccttgctaagagtgtagctggctggactcaagtaatggcttcttttctcctttggttccgggtgaaggtcgccgcgttgttccatatgcttcagatcattacgtgcttccagtgtatctttcgactttccatatacacctaggaagccaagaaggtttacacaaaggttcttagtgacgtgcatcatgtcgattgcgtggcggacgtccaagaattctcaatagggtaactcccaaaatatggagttttttttccacatcgccgtgtgaccatcttcgctctctataggctggctgccaggcccctttccaaacactactttaagatctttcaccatagcaaacact

SEQ ID NO: 22567 - DNA, 10438 bp, Oryza sativa
cgatgttttggcttcgtacggcggtccgccgtatgttcaaagtgcttgcctttcttccgtactaggtggtttgctgcaaggaatcgacgatgacccatgtacacaaccttcctacagtgcttaagatacgtactttctgtttcatccatacagtgagtgcaagccttgtaccccttgttggactgcccggataggttgctaagtgtaggccaatcgttgatggttatgaacagcagcgctcgtaggttaaactcctcctgtttgtcatcgtcccacacggggacaccttccttctttcacaacagtttaagatcttcgaccagtggttttaggtacacattgatgtcgttaccaggttgcttggggccttgaataataatcggcatcattatgtacttcctcttcatgcatagccaaggggggaggttgtagatacacatcgtaacgggccaagtgctatggccgctgctcatctgtccgaaaggattcatgccatccgtacttaaaccaaaccgtatgtttcgtgcgtcctttccaaagtgtttaaattttctgtcgatgtttcgccactgcgaaccattggcggcgtgtctcagcatcctgtcctgttgacgctcttcagcgtgccaaccaaacaccttagccgtggtattatagggaaataccacatcaccttagcaggaattctcttcttcgttagctgcccgtcaacttctcctggatcatctcatctaatcttgtatcgtagtgctttacaaacagggcatgcttctaggttctcgtactcctcaccgcgatataggatacaatcattcggacatgcgtgaatcttctgaacttccagtcctagagggcagactatcttcttagcctcgtacattgtctcgggcaacttgtttccctccggaagaatgttcttgatgagtttcaataaatcgccaaattccttgtcactaataccattttttgccttccattacaagaactctagagtggtatccaactttttgtgcccctgctcgcaacctgggtacaacgacgatctgtggtcctctaacatcttgtccaatttatgggcccccttttaactttcgcagtcctccttggcgtcctgcaacatctgaccaagatcattcgcaacgtcattaccatcagcatccctttcctcctcgcccgtttgatttccttcgaatccagcgtactgaccgaagtccggaatattgtcgttttccacttcatcttcttccatttcaaccccttgctctccatgagatgtccaacaaatatagcttggcatgaaccccgactcaaacaagtggaaatgaatagtcctggatgtagaatactccttctgattcttacacttattgcatggacaacaaataaaacccttatgcctgttagcttcggccactctcaaaaaataatgcacgccgtcaataaactctttggaccgccggtcagcgtacatccattgccaatccatctacatgaaatgaaaacaaatcgtacacaaataattattcgtacaataatgacagccatacaataatgataaaatcattacaaactctgtcaacagtcataaaataatgacatatcattattcatacaaaaattataaaatattacatcaaataattcttatttactatttctaaagttttaaactaatattaatttgttgtagttcttttaattttcattttagtttgttttctattatttaagattaactttcactattttttccttctcaactattttataaaacctttcaaataaactaaatttctatatattctttctttcccatacaaattttctctctcatcaacttacaacaaaattttggagacaaaaaagtgtacaaaacatagctccaaatgtaatatgacaaaaaaaacattagaggatgaagttgctaaccttttagccacctccgatttgtatataatcaccaaaataaattcactcgaaattttggcatgacctcttctcttttttgaagaaattttgaagcttgctcgggctggaggaggaagaaaaggggtgggactttagtcccggttggtgttatgaaccggggctaaagatcgccgggatctttagtcccggttggtaacaccaaccggtactaaagttatgatctttagtcccggttggtgttacaaactgggactaaagatcccggggggcctgacaagccctgatagcatttgaaccgggactaaagaggttggtgttaccaaccgggactaaagatcaaatatgcccgttaccctttttaaccgggactaaagatcatctttagtcccggtttttattgtaaccgggactattgtggaattcggccgaccgacgaaagatggtttctccaccactgatactatatggcctacctgtatatggcctacctgtatatcaaaactcaaaagtggactacattgcctaaatgtcgtggtcgtggtcgtgggtgttacggaatattatctcccagggagataaagatcctttcttgtgaaccaatctgaatcggagtagagataaggtctatctcatcctaagacccctatatatacaggggcagggtgtgacatatgaggttggcttgtactcagaagagatctataatgaagagagagctccaccctatatctgtgttcattgtctatttctgcaatgtttttaagggtaaagggatgggcgcgggtgttctacatcatctcacgcctctactgctatgggagtaacaggaaacggatccggtgatccgctaataggcgcgttggtttacaacacgttatcaacagctctccgttcactggtttgttgctccaatctgttattattattagattggattttaatgattgattaatctcttgatattttcgttgtttgcatgcactaccgcgagaggtgctaccgacgtgatactggtcggtcatcgcgttgcgctatgctaagaggagttgccgtccgtggtcggcggacgtccgtggtcggcggacgtggttggaggacggcgttccagccctgcaagacgcgagccgtgcgcgcctgccttcgccgtgggcgtcgattctcgccgtcgtctgcgagacttcacgtcaatccagtcggcaaaccccacaactgcatgctcgtgcgccgctgggcgatcagccgatcaccctgtgactcgcgtccgccttcacgtacggcgttggcagcccgcgtgttaccgtgccggcagtgccgcacgtagcggcatgcaggatcgatctatatgcatgccacgcatgaacgatcccatccatgccacgcatggcctgagtcggacgggcctgcaccaagcgggcaagcggccaacatgcatgatgcatgcactagtgagcagcctagcatgcatatgctagggtttgattgcatatcgttacgtgcacccgagacatactaccaggagatgaatacgtgcttccatcaagcacgctaatcacggtaattagtaagattggtttctaaactaatttactaattcatagatacatccgggcatgcgtctattaaggtatgcggtgtttttataaattgattatattttctcgtttttcatcatattatggatgctttgcttgcagtagatttgattatgctcttgatctagcggtagattaatttcctgcttttgatctatatgcatctattttatctgatgaaaactgaagaaacccgtgtgagagaaatcattaaaattgatgggataccctggactggagacgtgccaaattcggctgggccgaaccaaccgtctcgcccaccctccctcgcatctatctgtttctctctttctctgatgacgccacgccggaaacacggcgacatattctcagtctgtgcagtcggacttggagacatgttggccattgttcgctgtcgctgttgggtacgccatcggccttgcgtcgatgccgtcgcgggaaacagccgtctcagaaaaagccctaaacccatgtcgttgttgccgctggagttaatgctgaagtgaggcgccgccgccgttgacctcccatcgacgctgccgtcgagccgtggtgggaggatgatgggtcattggttgcctactatcggattaatctccgccgagacgatatggccggatgcaatttgtttgctgttgttggggtctcagttgctgtaacgccccgacattcgttagccataaacacagctaattcacaccgaggtgttatgcattacctgtgatatagtaccagtcccaggatacactagcttttacacgcagaataactgtggaatcaaagaaaactgttttattacatcactgggtagtagtccttacataagttgccaccatggacaggtccatagatgagcaacacaacattacagaaaaccataaaagcgacgacgcagaagcgaacagcgcggagaactaagcgactagcgaatagcgcggagaactaagcgactaagcgactatgcactaggcaaagaacctaggcaactaacttattccacaggcgagctttggggctaggcacgaaacatctagaagtctgttgacggttcttaaatcataatatctgaccgtcattacctacatataatgaaataaaacatggtatccaacttagtggtaggtattattactaatcatttccactagtgttggtgaaatatgtgtatgcaggtattttgagaagaaaacacatccgtcaagcaacaaactgcacctccgcgcattcaggatacatttacacggattggaggccccataagtcaagtaaacaactccaaatgggcccaactatcatgccaataggctgagggtctcaaaattagtgtccacgataaaaaatgggccgaacggagccgtctcgagttcggcccgaacactttttgtggccgttgatcgtgagattcgatgtggatggccctgatctcttcctaatgatggttggagggtagtttggtcgtttcccatacctgtaaccgtcatatggaggctataaatagagctcctctcattcattcacaacacacaactttgagctgaattacaagaggctcttttgtatcttttctacattagaataaggtagagagtgagggcaagctctggaggagtgcccggaagtttggcgctcatccgacttctacctcgacgagtgtagcttcctaggaggaattctggaggagtaccggagctgtcggtacactctgctccgggttcggagaaccttcttctattaagtaagcattcgtgttcctttcttatgttatttaattatttagtctgagtaagatatatttccatctttgcgggttcattgtttagtattcatactaagtgctctagtactaggactctggataaagaaggaagttcctgtacgagtattagagtagtaattaataacttagacgtggtgtctaggttagagagtattagagtagtaattaataacttagacgtggtgtctaggttagagattacctttgttttgtgtatcccatggatttgtccgaggtaggcggcaggtggtgacagccctgaattccgtcccagtaatcctccacgtttggatgcatcatagagctatagataggaaattacctttgcttagcttagaaaattaagaaacatagaaagtcctctctagcctagcctacctaccatcagttgttgtccttggacagtcttagtcttaggtagattacacacgttccctgagttcgatatccttttggggtcacccgaaggtgaagtgctacagcgatattccgtgcacttgtggatttatctgtggtcgtacgaaataccaacaagcatttctggcaccgttgctggggaacggttgctaatttatctgagtctaggtcatcctcatatctttatttttatttatttttcttttattcttttccttgatggagcaacccacaattcaaaacctttctgctcctcgggctgatctttgtgagccgtcctgttcttcaaaaccaatcctttctgatggctacgaaatcagtcctggctttatagccatgattcgagagcaaaccttctctggtagtatcggtgaaaacccatacctctatcttcgggatcttgagctagtgtgtttgtgcctatccatcgtaggcatgacacatgaaactctaaagtggaagttgtttcctttttctcttagagataaagcgaagcaatggtacactatgtctgtcaagaaattccacggtgaatgggaggagcttaagtgcaatttctgccttactttctttccattaacccgtgtaatcaatcttcgattagacatcctttctttccgacagaatgagaaggaatctctcggtgcagcctgggccaggttctcattgttaactcagtctggcccaaacttgtgtttacccgaccatgtgttgttacaacattttcgatacgggttagacaaggagtctgctacaaatctcgatattttcgctggaggatcgttcgcacacaagacaactgccgaaggaaaagaactcttagatctgatcttagagaacgattctttcggccaaagcgaagcatgcccggagatcgagattatccatgagtatcctctgcacgtggagtcggaacccgactcaactgtcgaatcctcattccagtcgctggagccggaggaagaagaaattcatcctccgaaaattccattccaattcaggggtgatctttatgaaaattatgagaacaccctgaattattccagcgaaaagaaggctcatcccaagcatgagccgttcgagaaggtgatgtttgtatcttcgttcgtttcttctgaatctatttcccatcttcatgaaactgaacgtccctcatcaccctcgatcaagcctaagccttgtccctctggccctcataatgatgttctcgtttatcatcatgaaacaacccaattcttgcacgatgtatctcttgagaaggaaaacccttaggccacggacaagcttgagacattgactctggaggacgagagaaaacattccacatatgagcatgaaagtttctctttcaaaaccccccaggattcatgctcacataaggaatccccagagtcctgttctgtggtcgtaagaaataccaacaaagtcttcatactcggctaactcctggagatactcctcggcggttgggacgatgtcttcatcttcatacactatagattattataaggggcaagggtgagtacttaacgtactcagcaagccaggggaaagaatgacatgtcggtttaacaaggaggctaggcttttatttgcgaaagctgcttttttggcaaagtgatttatttcacaaaactcctaatgagtgagtcaagttttagttgtcgggaggaggctcacgcctcgacccatttcacaagttgctttgcaacaacttgtcacgattaacgaacaacaattaatttgtttcttctattagcttcttctcactttcacaacaacacatagtccacacagacatctcagcacaacaacgccatcaaggccctaacaacacctcggtgtcggacgacaccccaggtcacatagacccgttgctaaccacccaggttagccgtctgccacacaggcggactctggaaacgttacccttcccaataaccacttcttcacaaacatttgtcaaacaaatctacgctatgagaaacaccttacacttgcccttgaccgtgggcacggctgttcgaacagttcattaatctctgcagaggttgcacgctttacccacacgagacgaaactgacatcgtttacccgtcggcaatgaaagttcgtgataaggcctttccaaagctaacccatgaaaatcgcatgccacctagttgggctaagatccatagccgagtatcaggcaatgatagccgtcatccactcaggaaatactgaggatgcctcctactcctactggtaccacgccacaatagaagcaaaaagacacccatgatgggcaaaaatgtgtaacacttcgtctcctcatcctcggcatcccacaaccattggcacaccaactcccatgtgataacaatttacttagccagaggcatcccataaatacccgtgtggtcgcactgtaacgtgtttggatggatttcccaaaggaattggtccttaacgacaatacgtagccaaaccacaaaggcatgactccgcatcatcaccactttcacaacacattttatttcacaactactcagtacaacgtaccggatttttaaacatgtatttggaataacccaagtttcccacatggcaaaacctcggtaatcgtataacaataccggcacaaatatttgtggagctatcaaatgtatggaatcatcaacctatgaaatataagtacgactactaggttggtccattggttgaataaacaatccgaggcctaacatgttaatcgtgtaaactaaataatgcatttttgcaaacaatgtatcattgaaaatataggggtaatgtgatcaaagaggcttgccttgcacagggtgcgggtcttctccctcgaaagcggcgtccgaagcttcctcgtacttaggctctaaacgtggaaacaaagctaattaagaaaagccaataaatctagctcaaatcagagaaacaatagtggcactgtgtagatttcaattttagaaaaatttaggaacttgaacggggtcaatcggagttacggttgattttctacgaatttctaaagaataaaagaattttctggaataacaatttttggacggtaagggaatattccgttggaatattccgttagctgggacggcagaagaggggacccacctatcggcgatggatgggaggaaggatgcgcgggcccggcttgtcagtgggggatggaggtaaaaggggcatggggtcagcctgtcagcggctcggctccgccttcttcttcctcctctgctcttttgctcggctcggtctgggatggcgacgcaccgcggcagcgagtcccggctcagcgaccggcggtcggggaggcggcggcgaactccagcgaggcaccgccggcaacggcggcgctaggaggcgcggcgcagcggctctaggcggcggtacatagagtgaaatcgtgagaaagagatagaagagagagatggtgatggtgtggggagaaggagctcgggctgcttccccttttataggcgggcgacgaggtggcgagctggcagtctaggcgcggagctccgggcgtagacggctagcagctagggcgggatttcgagacggatgagatggtgaggcgacggcgatgcgacgacatggcgtcatgcgctggtggcaatgcgacggcgaaacgaccgcgacgcgacatgaagtgacgcgcggagagcgggaacggctgcgagacgtggatgacgtatggccgacgacgactagggccgggatttggggcggtagggatagagaggggtgacgcatgcagtggtggcaatggaacgcgagagagagggagagatgcagccacgtcttagcggataagctccttcgcgtcgaagtaaacgagaacggataagcaagggcgattggataagagaatgactcagcctagggttaggggtgacgaagggtgaggtcgcggccgttatctgttggcgtcgacgcaacagcgaagggaaggcgacgcgatggatggagttaaaggcgacgggacggggtgacacgaggcaacgtggctccgtgtctcccggaaagaaaccggagcgaggtcgggcttggcgcgacgcggatttggcgcggcgcgggtgccggctcggtgcgggggtggtgtggcgcgggtgttggcacgacgcgcggcgcacaggagggtgttttggtgcaatgcgagacggacacgagggtggaacggtgcggcgactcgagttggcatttcgtcgaacactttgtgtgcgtgcactggctggtctgaggaaggagaagaacagtgtttgggctgggccgagtgggccggcctacttcgggagaaaggaagaggagagggtggagaggagttgggccgagggagagagaagggaaaggagaggaggcccaacatgaataggtgagctttcacatttttcccagggattttgagttgaattttgagaaggatttgaaaggaactcgaatttgaatttgacctagggtttcataggaatttgaaaggatttctatagaggatgatttgaaatctattttggcacaaaatcaaataagaaccaaattaactccaaatttttaaatggcaaacttttaaataaatgcaaaataaaatatgggtgctacacttgccgtcggtgagttcggctcgcggcgtcatgaggatgcgcgggttgacgcggagcttcgtcgtgtgccacccagacgtcggcgcaccatatggccacacggagtgatgt

SEQ ID NO: 22568 - DNA, 12172 bp, Oryza sativa
  unsure (1)..(12172): unsure at all n locations
ggagagatgcagccacgtcttagcggataagtcccttcgcgtcgaagtaacggagacgggataagcaagggcgattggataagagaatgactcagcctagggttaggggtgacgaagggtgaggtcgcggccgttatctgttggcgtcgacgcacaagcgaaggaaaggcgacgcgatggatggagttaaaggcgacgggacggggtgacacgagcaaacgtggctccgtgtctcccggaaagaaaccggagcgaggtcgggcttggcgcgacgcggatttggcgcggcgcgggtgccggctcggtgcgggggtggtgtggcncgggtgttggcacnacgcgcggcgcacaggagggtgttttggtgcaatgcgagacggacacgagggtggaacggtgcggcgactcgagttggcatttcgtcgaacactttgtgtgcgtgcactggctggtctgaggaaggagaagaacagtgtttgggctgggccgagtgggccggcctacttcgggagaaaggaagaggagagggtggagaggagttgggccgagggagagagaagggaaaggagaggaggcccaacatgaataggtgagctttcacatttttcccagggattttgagttgaattttgagaaggatttgaaaggaactcgaatttgaatttgacctagggtttcataggaatttgaaaggatttctatagaggatgatttgaaatctattttggcacaaaatcaaataagaaccaaattaactccaaatttttaaatggcaaacttttaaataaatgcaaaataaaatatgggtgctacacttgccgtcgttgagttcgcctcgccgccgtcatgaggatgcgcgggttgacgcggagctccgtcgtgtgccaccgagccgccgccgcaccatattgccacacgggagtgatgtcgtcgccgccgtcctgccaatcaggtagtggacgggtcatcgatgacctcctcgccgtgtgccgccctaactcccttcaaagtcgacagacgacggcctccgacgctgccgccgtgctcgaggggccggtgcaccgggcggtggacaccgttgcagacaatgaatgggaaaggggaaacccaaattccccccttctcttgctcggtcatttaggcttaccagttgggccggtctacctccgcctgaccgaataaagcccaacagtaacgagacagcccaaacaaattaataaaaataataaacttggaaatcctcatgggcctagagtttcggaaattcggcccattaggcattttgggctacactgtgcttgctagcccaaataagatcatggcctgaacggtaattcggcccgattaatttcggtttattgacaacttgcgtttaagcccccagagtgctgggtttttacgctatagttcactgtttaatggaattttacagtttgaaccttataattaacaagagattatattaattttatttgtgtggctatgtcttgttgcttaggccctgtatagtttggttttgcatgtgggtctccggactcgtaaataaccatgtaatggtgttttttaagcattgctttgcttttaaaattgatgcaattccaactaaataatctggagatggttttctaggttatgatgcttccataaattgtgttcatatagtgtagaattcaacccttggaagcattatgatgggtttattttcctgcatttatgtgtgatggttttctatgtggtataaatattgggaatataatgccaaataagaccaagtaaataatagaaaatcacttaatgcatggaaattctaggaaattaaatatccatggctatggataagaccactctttactgatacactcctccatacataaatggtgatatcgatgtgtctacaagatggagtcacgtatacttgttgttgagatccatgcttttgccgaattcactgcgcatatcatctacttgcgtgctgcgttctctgagaactgcatgaaacgatttggatgatagtgtgggtgatttcatgtaaaggccttcaatgactattgtatggctttgggcattaatatagatcactctatccctatgatcacactcaagaatgggattctgagtcattgaaatgtgtggaataagacaatgtgtttgggattcattgtgcctttcccctactggcttaacatctcaatcagagtatggtcggactacggtcgacattttgctttcccaatggttgagagcacgcttttctgatttggagataaatgattatacctcaattctctagcaacgtggagttgcgaggttcaatagtttgagatatttttcactcggtctagtgaaagatgtaaagtgttttccaggtggtggaatgacactgttcgtatggttgcccttggtgtgcacatatcttctcactattatttggaacctgatgtcttgcgaggacaccggaaaattggatgcaaatctagtggaataagcccgagggtagatgctgtgaataggcatgattcccactccactatagcgccaacagctaaacttgggtgttgacccagtcttggtcctcgcatggatctagcgctaatgaccacctttggttgatgccgatggttggtggtgtctgtctaataagttgttctgacaacgggagttgtattgctagtttagagcatgtcctaggagaacattggtcgactatactgttgccaagcagtttatcttttgcttagtttggaactttgtattagatcaatatttctcagataaatagcgttcttggtctttcctgttctattctaaagcttatcttcatgctggaattgataaaatgctttagtttagaataacaattagtgtatgatccgaggagttacaaccacttacacagttcagcgtaactgtatttcaaacaaatgttggctatgcactattgcgttttatcgcgctctcgtagttgatgactactccctggttgtgttggttgatcacccatgggttgatgaccatgcttgtcgcacactggcgtttttcgcgtgtggacatgtgcgagtcatgcaaaggttcgtcgtgttgcatgcgttgagcttgttatgccaacgacggttgcaccgacacattctactatttttgtggatatgtctgaatataatggttttattgtgaatattaccattgttggaggtattgattatctcccaatggctatgtctaggggatattagcaaatgtggtttgataattcgctcgtgcatcatacctaatacatgctgcttaactataacccaattctagagtttggtatgagtaattggggtcaaacttgggcattaaacaaactggacattaacccaactctgcaccacaaaaatctgcttggcagcgtaggctagtggccgtgcatttttgctatcatactccttgtcgagcgcatcggaatgcgttttgccaccataggttgccttcttaagcatatgacatgggatgtctaatgcacgtcgatccggaatcgattgtgagtttgaatggcacaaggtgagcattaatccatggagattgcatatggctaaagtatttgcatgttggttgcatatacatttggtagcaatagtggtttttgcagacttgtatatcctaactaggaggttgaggataacccttcggaggaaggaagaacactgtagtcatgccactgtattggtatatatccaggctcactttaatgcaaaaatctctccgattaaagtgcataatatttcccaaatatatcgccaccgtagcatacattcatgggagaacatttgtgatcgaggtgaaattcctaaatcctatgccacgatatggggattggtagtatgctattgtaagatatctcggcattagggggagagaattgcccattttggaatgcatgtacatttctttgagtgaacgcactaaatgagctgaatttgtatgtttagttcatactcctggttgcttggtgcacggagtttttgccaacaaaatcatatgaggaacaactggatagttgttaaaaagagtaatgctcccaattatggtaaatgtggatagacccgggaataatatcgtatccatataagacttatggaatttgatcatgttatgtgaggacgcctgctaacacgatccgtgggccttagtcagagcataagagttctcaccggatgtgagcatactcctctgattctcctagtggagaattcaccttcggaaggtgatatacctcataatgatgttcgtcgtggagacgacattcctagcaattcgcacatattatggtgctaggaatatggaacaaccatggatcgatcgttttgggaaatgacgaagatctggttaaatgtgtaagtgggaataaatgtgtcgcctcttgctaatgattctctgtgagagaacccggatctggaaaaagtccatggcatgagcatgcgatgctcaaatcgggtcaaatggaaatgcaattgaggctgaaccgaatcactaagtaaaagtcgcgaatgttgttcggatttttagggtcattattgagataatgaggtggtgatgtgcaatggttcaagtaggtccttgatgagacctctcccacgtaagttgaatgttccgctaaataaaggtattggcaaaatggcatgaaattaaatatgcagttaacggatttaggaaatccgtgaggtcttgaatagactccgtagtgaagttgcagcatgtaaatctcgtaccaatgggtattctgataagagtaccatttcccgttgggagaaaatctcattgatggatttttctctgaggggagacctcattgatgaatttttctctgagatacaaaataattagtaagtctgaacacaccatattgtataatcccttggagggattaagacccatttatgacccggtaagattgcgatgaggaacctgctaaggtatacttagtgttgttggctatgtgttatctcccatagtgcttaaattttcagactagctagttactctgatagttacaacatatctttggaaggcttgtagttgatcttgtggatctccaattgttgttgacatcgtcagagaaagttgcaatgatcaagagatgtgtttgcttggcacgtggcctaccgatgaataatgcggtcgagagatgtgtttgcaatatggggcgagatgttgccacaggcagcctagctagctagcttacgaccggcaccgtgcccgtgcagcagccgcaccgcgtcatctctcaaatttcggaccacgaactcgaaggcagccgcggctcctgtgccgcggagacgtggagacctggagaaaaacggcatctcgtcgcctccggccgccacgtgaattggctcgatcgcggcggaatggcgtacacgccagcgcgcgcggatcaggcggtagcagagcgctttctcgtcgcccggcggcactggcgggcggcgtcgagtggagtggaccgattgattgcggcagcgactgatggcatggcttgggtcgtgcctgtgacggcccgccacgaatagaggccttatcgcgctttcgtcccgtacgtgcttgggcctcgttcctcaccgcacggcccggaccattttctatcttgtgcggcacaagagtgccctgtatgtatacttgccacggaattcattcctggaacaaattttactttcgcttttccctttctcttttcctttgcgaaaacaaaaggagtagttattcgatctgtgatctgtgacgtagagccagcaacgatcgaatgcatatgcatcgatgatcattcgccgatcgcttctttcccgaaaattcattggcggatcgcttggctctcaagtaaaataatatagtactatttagtactccccgtttcaggttataagacgttgatcaagatcaaactgttttaattttgattttaacttagtcgaacttgaaacatcaaactcaaaacttcaggcctgttcaaattgtaatcaaaataaacattaccaaattttgacaatattaccatcctagcaaaattttggtatcctagcaaaattttggcaataccgaaattttggcaggatttcttatgtaattactaaatttggcaacaaactaaacgtagatatttttttagcaactttgccaataaatggtataattgaaaatgacaacaatctgaaaagcaccttcttgtaacctgaaagaagggagtacaagacaatacaccatgtacctatagtacgtatatagcatatgaaacgatcaaatgcctatatattgttgcttatcctattgctaccatatgatgcatcaatcaaacaaacaatactacgctttcaggttaaatatttctctcacacttcatttgattactcgtttgttgatctcaaataatatattggatcatacctgtctaacaaatttgccggtcaattcaggtctttgaccaatgggtttcaatttccatccggtgaacgacagcgactggttgatcagggcggcgatgctgctgagcttcaccctgcaggtgatcctcgtctttgtcgcgcccacgcgcaagcgctcctgccacccgcttccccacctcgccgtctggtccagctacctcgtcgccggctgggtcgccgtcgtcggcctcggcctcctcctcaacagcctcagcatcagcggcagcaacaatgggtcctcctccatcttcgccttctggacgccattcctgctgctccacctcggcggccccgacaccatcaccgcctactccctcgatgacaacgagctctggctgcgccacctcgccggcatgctgttcgtggtcttcgccgcattggtcgtcttcttcagctccgtcacgagcaaccccatggtcacggccaccgtcctcgtcttcgtcgccggcgtcatcaagtacggcgagagaatctactcgctctactccggaagcgtgagaggtttccgcgacaagatgctcggcgagcctaatcctggccccaactatgccaagctcatgacggagttcgagtccaagaagaacgccggcctgatggtcgagatcatcgtcgtcgacggcgagcacaaggaggcgctggagcaggcggaggtgatgaagaacggcaggaagagcgtggagacgatggcgtacgagctcttcgccatgttccgggtgctcttcgtcaacctcgtcctcagctacaaggagcggaggatcagccaggcctacttcctcgacctcggcgacgtgatgacggccgccgcggcgttcgaggtggtcgaggtggagctcggcttcctctacgacatggcgtacaccaaggcggccgtgtcgagcaccaggagaggctgcctcctccgcttcgtcgccacggcgtgcctcgtcgtcgccgtcgtcctcttcgtgctcatggacaaggccggcgtccgccacgtcgaccgcggcgtcacctacgtgctgctgcttggtggggtggcgatcgacgtggccgggtacctcatgctcctctcctccgaccggacgctggcattcctcgacggcaagccgaagctagcttggcttgcacgggtggccagggccgtgcggctgccgacgaggcggtggtcggagcggatcacgaagatgaacctcatcaggtacagcctaagcaagcccgaggaggacgccgcccgccggtgctggtgctgcaggtgcacgacgatcccgcgcgtcgtgcgctgcctcgcctgggtagccgacatggtgggcgtgagggagatcttggacgacttcttcttcatccggcacgagccggtgagctgcaggaagatcaaggattccaacaaggggaagaagtccatcgacgtcctcaactacgtgttcgatgggctcaggaagacggccaacgaagtaaggtactccggcggcaacgagatggaggaggtctgcgactaccgcggcggcgaggggataatcaatgagctcgtcggcgacatccagctgatggagctcaacgtgaacgacgtcgtgcgcgaaagcgtgagaagggagttcgacgagtgcctgctgctgtggcacgtcgccacggacctgtgctcccaccgccgccgcgaaatggaagtgccacggaacggcgacatccagagcttgatgtccatcagcgagaccctgtcggagtacatgctgtacctcctcgccaggcgggccggagatgctgcccgcagcgacggcgacggccgccgtcatcgggctgctccggtaccgcgacacgcgcgccgaggcacgccgcctcttccggtcggcggcggcgtgggaccccacccaccacgacgcccagaggatgctgctcgaggtgaacacgtccaagaagccggcggttgtgaagggcgacgagagcaagtcggtgctgttcgacgcctgcatcctggccaaggcgctgctgcagctgggggacgacaccatgtggagggtggtggccggagtgtggagggagatgctcgtccacgcggctggcaggtgccatgggagcacgcacgttcggcagctcagccgcggcggcgagcttatcagcatggtctggttcctcatggcgcacatggggatcggcgacatgtacaggacccaggtgggggacgccaacgctaagctcgtcgtccttgaccagtagacatgcatgcctgctgccgcatatattttaatactccctctatttcaattcgtagcaacttaaaataggattagatccattttaggactacaaatctcgacatatatttattcagattcgtagtcccagatctaatcacattataagtagttatatattaggctagagagagtacatcacttacaagtgaccttccgcgaggcagcttgattcgttcttgttgtcttaggttttttttttttggtgtgtccattgaggatcaagtagatgatggcgactatgtgggttgttactaccatctggattgggaagattgattgatggcagttgaagtcgttcaactgtgttaaccgattgtaccgaaatttttacaatttggctcttttaaaaaactagttaaaaaataagccttttgctcagcgccaaccttaatggtgttgtgataaaacatctcagcggcataaccattggcgctgagatcttattcaaggtggcatgatttcgccatgtaatcaggcctcagtgccaatttagttggcgcggacctcttgacattttaaataaaaaaaaggccatgtataaacctcaacgctgctagcctggtggtggagcccttgctttgcatctggcaggtttcacattcaaatccctagttctactttttatttcctacctgccctcctatttttctttttaagaatttggaatgagcagatttgatgatttaaattattgcatttgtcttagtaaaatatttagcttaatatctactacgaatttacaacaaaacatgtgttttcttttaaaaaaaatggagaacaaaaacctaaaatggtaaatattatataagtgaatttcaattttcaatttcaaaaataaaatggattttgaaaccatgcaattttttaataaaaaaacttaagcagaaagatgataaattgagcactgggtaagtgagaaaaaaataggaggctatggggttcgaaccttgaacatggatgaagcagcaaagtggacttacaactgagctgtacccttaaatctaaatactatagtttgattctgtatacttatatagttcatcccactaagtttagttaatactatttctatcttctctcattaagccacatcaccctaattatttttagcatttgaatgatagatttatagttcaaattgtctcttctttcttctctcataaaactatacaatctcaattatttttagactcaaaattcataagtatcaaaatttattttagtttcaataatcatatcacatcttatttgtacatattaggcaccttaatttcccgtagcaacgcgacgaggtattcatatagttatctatatattcatacactaaggtcgtgccatctcaggtagaatgttagcaccaatggtaaacatctcagcgccatcatggttggcgttgagtaaacggctcatttttgcaattagctttttatacgagttattattgcaataaattttttaaaaggatcaaattgtcaaaatttcggctgattgtgagtgcatcactttggttgtttttggtgtgtggtaggtgcatttgatgctaccggcaagcatttgatgaaccgattgtgagtacaatggcgaagattacaaggtgaaaagattgatccattcatcgagattcgacaacaccgcactcgtatgtcatcctcttattagaggtgttatttcaggttttggatgaaaatctagatctatcttcatatagcaacagcaatacaacacactcatcaaatccttgttgaacacctagagtgagtgatgtgaaccattcctactatggataaaactattgttcacatcatggattaacaaaaagacataaagatcaattcgtccaagtgctgaaatccgattcggccacctgctatattgctgacttcaaactgtcaccaaatgtgcatatacgagctccgtttttggcccgtgagtacttgtcaagtcatcttttcaacagatctagcctcatctccaaattcatttctgtcggctgcaatcacagaaacaatgtgttgcatcacctataatgggtctatgggcttgtaacttcatctggacctagcccaggtggggctctcatgtggggtgcgccgcaacatggtggagcatgaccctatggaccccttggtcgtcctcccacctccttaaataggtaggtaccccttcagagtttcttgagttttgttgattagatttagcaacttgctacttgtttgtagcgcacgtgttggataaaccgtttgtctgtttgtttttggaaccccgccatattgttatttcagagtaaaaccttcatatctatttgttcttccaattcggtgtgtgttctacttgttcttacttgtttttcgattgcttataggatgagtgccctcgtgaccgggttgacgcgcaccgcaagatcgcggcgaccactagagacagtattgttgacggtcgttatagaccaatttcgaccatcaatacttctagaaataatggagacctagcaattcttgcatgcatttttatttagaaataatctggttccacttgtacttggtaaagtaattgtatataggagatcacttcataaatggaggagaaacgatggaaattcaccgatcaatcaatcagagcctgacatgtggtagacatatggatggatgggcccacaaacccattaaaacatttgtaaatgggcccaaccaacatgccactggccaagtatccatcaaacaacgtccaagaggaaggactgggccaggaggcctgccaaaggtcggccgaccccggcctggctccgttggcccatgcccaaaccaatgacggttgtaaccgatttgccaatggcagttgtaccggaattaacgcccacaaccgtcattctcaaccactattccaatacacaccaagaaagattcaagaagaagaagctctcttagtttactcactttgctctagtgctagtagagttagaattagaatagtctccttagttcttcaagtgtaacatcctgaaaattcctgacattaaaaatcactaaaattttgaactttttaaaactttttgcatcatgctggaagttatggttgttattgcttgccaaaccataaatcgacgcaatggaaaaaaatcaatctaaagatttacacccgagcaatagttacgatttacaacgatacgatatttattatcaatcccataaatatttatgcacatgaaagccaggccaaataaagtacaagtcaattattaaaccctgtggtataaatcacaaatcaaatattaaataatcaaaccatgttgatagcctgatttcatatttaacaaaaggaaacaacatagttgaatataattcacttgaatccaatctcacatgaaatataagtacacatgaaatgatgatcacatcaatggcccgatctataatagagtttctcactagaatatataattaatatttgaaacaccttatcaagctcctcatagcatgaaaatcactcatataa

SEQ ID NO: 22569 - DNA, 21152 bp, Oryza sativa
ctgcccattgctccccacactacccccaccacctcccctcccttttccctctctttcccatccccagcgttgccgcctcattggaagccgccaccgccgccgctgagccgatgcgccccgccgccgcgatgtgcctcgtcgccgcgccgtgctccgccgtcgacctcgccgccgcgtctccgtcgaccccgccgccgaaccggtgagcctccccctcccccaccgcttgccgtcgcgccgtgccgcccgccggttctagccgaggctgtgagagagagaggagaaaacagagaggagagagagaaaagagaatggaggagagaggttagagtgggccccacctgtcattaattccatccaatttcccttagaaaaataattctgtagaaaagaaaatcaagaccttgaccccacctgtcagtcactatagcttgtggataaggttgtattataaataaatgaattaggaacagtaccatttcgcaattattagaattaattcaaatttgaatctttacactagcataacttattcatttcagctccgatttgagtgaaacttgaacctaaattcataagctttccaatgatatataattcactatttgataaaatatatttataaatattaaataattaatatcaagatgatgcataatagtcaacttaaaaatatgctaataaataaaattagtattgtacagtagagtggatgtaataatatttgtctctaacatgtcttgccactgtaacaaccacacaaactaattttatgtgatgtctcaaatgaatggatgtagaggaaaatactagtacttatttaatattcgatggccatataattaaatccatggcttataggttatttaaatcaagtatagccttatgattatgtaactaaaatataaacacacatagatgaatctttaacctgtttaggagaataataacagagctagatgtggaggaatcactaagtaaattaatcgatgcaataccatatagaatagcatatatatgcctaaattgattaccacttattagtaactcaatagaaccggtgcttaaacttgtcgcatcacatatacaatatcactcatagaaactagctaatgtataattaaactacaatatattcaggaatcacttggagcattgggtagtacactttctaaataagctcatgtacagtaggcgaccaaaaccttatacgttgttgcacacatatattgtacatcccattatagttatacaattaatttatctttttcatatattaaactagggagtatataagaaacatgaatagtagataagtactaattataaatcttgacctcatatgttcatagttcaattgtaactccggattgttcattaagagataatctgtaactataatattataaacttcccgaatttaacatatagagcatggataattattagcccttttataatttataatggcaagtaaaatatgttcataattaaagtaaagcttccatcaataaaataataatacaaataattcactataattgtttgattgatcctaaatccatctaacaacagaacctctagtatataaccgtcctatttagatagatgcatacatagccataatccttccatagccatttgatagactaaaccaccgattagccaaatatatatgtatcccataaatgctatgttggttaactcctaaataggccacgatgacaatagaaaaattaagaaactttagccttagcatgattgggatccattagcaaacacgaatagtacattttgttgcgcatatttgattgttgtttgaatattggtttttctcgcgtattatagaccttgtgtatcgcttagtcgtgaggcaacgtctgcaacttccaggaggtgaaggttgatcaagattatatcaataataaggattatcctgagcaaggcaagtcatcactattccttgaacatgttgatcccaattgcgaaattgttttgtttacaaataaaattgcatgcaatgatgaacatcctacttgtgattatgccatgccttgattattgtttacccttaaatctttgtaaccatgtttacgtatgagtccctagtcaactatgacaattgcttagaaatgctattctagaatcatgcatactcatatttatcaaatgctatatgcttgggcaattacctttgggaaggtaattgagatgcggcatgtggagacatgagcgccacattgccatgatgttgatgacatgatttgtgaaaggagaaataaaattaaacaattgttttcgactggggcggacggaggatttgggtggtatctgggaaaggctagtaccgtccccggtcaattaaggactgagccatgaagttaagcatgaaacaaccccccgtacaaccgtacttctcgaatgggtatagacctagcggattagatagccgagcggaggcagtatccctgcatagatggttcacccctgagtgaggcaggtgcgctacgatgggacagccgttgaggtagggctgagaggcgtgccctacatcggtgtcaccattggtaggactgccatgagtgtgtgagagagagaacttaacttgaaccataatttaatatgtgtgagacttctctttctcgggagcgccagaactcctcacactgctagaaacatggacgcctagagtgcatgaggatttaagttcatggagcgggtactggcaatgcgaggttatcgaaaagctttgccatgacgcgtctcatgtgttgggatgaggctcatgtgttgggcagtcgcggagtgcgggtaaagtgtacatccactgcagtgtgagtaaaccaaatctattcgaatagccgtgctcgcggttattgagcaccgggacatgtattacacttggctagactctaaattcttaacttgtgggggatgggatattgcatgatgaattttatgctgatggagccacatcccgagaggagggaaggtggacatcctcagaaaaccatgacgattcaatggcgggaagctatccttgggatcacaatggatggtggacagaaccgtcgttgtttaaagtgaacactggtactaaaatttgatcagtctatgctaggttttaggcttgtgaaaagaattgtaaaattagctttatgcaaaagaacctgaagccattccttgaaataccctctatcatatgcattgttgtggtggcttgctgagtacggttggtactcacccttgctattcatatatcttttagaagagtgtttaagaaaagcccttgtcggtacgcttgcgtatccaataacatgatcggagtgcggtcttgttctaggtctcgttccccagtcgactgcctgtggcatgttaaccgggcccttatattattttgtgttccgctgttgttctctgatagttgttggcctacctggccctaatgtaagtatttaactcttttagcctgaattcattcgtgatatgttgtgattcaactatgtatgtgtgtaccaactattgatccagggattggtacggataaacacagatgatttccgatttccaaaatcgggggtccacatcaagtcttctggagaattcaagtatggttctagtaactcttccctctttatccgataatgaaatattcttctttatataatttggtcctttactatatttgcataattatttgagtaccaactttggtttacacttatctcgtattaattatgcggctagcttaccagagatatgcaatggtattggcttagtgttcatttatttgattgctctatgttatctgcagaggtgtagaatagtacttagtaatgtaagcatggtgcttagattactaagtatcattaaatggttctatatgccacggatctgtagaggcaggacgctgatgttgacaactcagtacgagtattcgtcgacgtgtgtatatagggctaagcaagattcatggtgcgggtattcctctgtatctttaattggttgaatagccataatggattgtcgtaaggaactcggcaatcaggggtggtttcttgatataccaggtgggcatagttagggggtattagccacatagttgtaccatagaaagtgtatactaaaatgactatatatattagaagtacataaatggtgcttttattacttcttctctgcttaacctagacttatattttagtaagagtattttaaactgaaccttctatgtgtcaaatctatccttatcctcaactgattaacccatgcataagactttgatttacataagtaagataagaatttatagcatagtactctcttaccatatcttcccatggaattaaataaatacgataccttggaaatacttacgggtgaaatgctatagcggtatatcgtgcgcttgcggatttatttctgtaaccataagaataccgtctaatatttctgccaccattgttggggatcatattcctagtaatgtcgttaagaaatatcaacaggtataaatatcaacaggtatatcggtgaacgtcgcctccatccatcaatcgagttatccaccacctctcatcgaaagattgggaacaaaccttcacgggttcatatcagtgagcttccccaaggtagctgatttgttcttgttatcttaatttattttgtttttgtttcatttttttggtatattcttagtaaacatagagactaggttaatttcatttttttatgaaatattcctgttttttttaaaaaaacaaccttgtcatgttatcttataaaaaaggcaaccttatgttatcaatatgatagttcctcaaaactagaatgtgaaagatggacaagtccttaaagtggcctcattagcagaaaacgtgtagtagatattatcttcttataaagttgatgcccactaacttctaaaactcaacatgcaaatgtgtcacatatcatccactatcaattattatccagagtattttaaatcacatgtgtaaaatcaaaggtgtttttgattattattctgtgatgaacaattggcataggagattattggttttgttatttggagtttatttacgaagtggttttggagatgattggatttacaggtgaatcacaggtttatcattttatgtggaccggtcagaccgggccggtgcggtcggtcagaccggcgtgtaatgcgtggtcagactggcgtgtaatgcgcggtcagaccggcgcagcccgcggtctaaccggtcgacgctgtgtcggtttcggtttcgggttgtttgtttggatatccgtgattatttcatgattatgacttctagatggatactatacatatgtaatactattgtttgctactaatgagtgaagttggagatagcttggtctcggaatatggtttctttgtttatttcatgtgcaggtgactcgatgcctcgggagagtatttgcggtgatggaccgggagtcggcttggggataagacgacgtccgtggtggtcagagatcatgcgggatacttaggctagagttgatgcacgtggttgatggagattcgatatggcatacgatggaggtattgtgtgcgtatgggatgcggagtcgaatttggaaggagtccaaatttgatatgattggttatgtaaagtttgtttcttgtactagagggtttcctaaggtgtttaggactcctagtatgagtttggttcgtggctttagggcgcctacctcgggtataaatagagggggagcatgaggcttccagttatcgctttttagagaatttgagttgagttttgagttagggtttagagtttagtcgaaatttttgtaagtagtgttgttggtgcactatgtaaacgcagagagaagtaataaagtcgtcatccactttaagagttcttcgatttgtttttaccgggtttcgacggtctaaccggcgatattatgatggtcagactggcggcaagcagcggtcagaccggcggcatacgagcggtccgaccggcggcggcgacaggtgcggcaggcatctcagcgattcaaccgatcgacctacatcggtcagactgacgttcatcaggcggtcagactgcgatccgtcgaattagagggtaacttttatttccgctaaaagttttcgatttttgggtataccaaccattcacccccctagttggcttagtttttgttatttgatcctacaagtggtatcagagtcttgttttcttctttggatttttatcggtctagagtttttgccatggctactcctgctaggttttcaactaagaatcatgttttcgatggaacggatttttctcattggtgtagtaggatgcaatcttacattatggctgaagattatgatatttggagaaaagtttctcatccttatgtgattcctgaagctattaatactgctgctgaaaaaactgcttttgaacaaaattgcaaagctcgcaacattcttttgagtggtatttctcgttcggattatgatcgtgttacgcactttcgaactgctcatgaaatttggaatgttttgagtaactttcatcaaggaacaaataacattaaagaacttcgtcgtgatattttcaaaaaggagtacattaaatttgagatgaaacctggagaagctttgaatgactatctttctaggtttattaaaattttgagttatcttagatctgttgatttttcttatgatactaattatccacaatctgagatttctcgtcactttttgaatggtcttgacatgtctatttgggagatgaaagttacatctattcaaaagtctgttaacatgtctactttgactttggattcactttatagaaaattgaaaacacatgagatgaatgttctttctaggaaagttgattctaagtcaagcgctttggtttcttcttcttcttattctttggatgttgatgctttttcatctaagccttcttttcttgctgtttttaatgtcacatccgatgatcaactcgaacaaatcgaggaggaggatttggcttttgttgctaatagaattctcgagctacgaataatgccaggaacaggaaaagaggtggtccaaatcgttgctttgaatgtggttcaattgatcatcttcatttgcattgtcctaagcttgggagaggcaaaagagaagacaaagatggtgagaagaccaacaacaataagccgaagggttcatcccaagggaggaaactagagaatctcaggaaggcttttcaacaagtaagcgccgccttcgagccacaaaatgatgtagatggtgaaagtggagatgatgataagggaaagaacatctccgatgtttgcttcgtggcgcgtggtgaatctgacacagagtatgaagataatgaggtaagtgcttttgaggaagctattaatgttttgagtgaaaaaaataagaagtgtgagaagatgtatagaaaacaggaatttatcattgaatctcttaaatatgaaattgctagattaaaatctcttattcctaatgatgatgattgctcaaattgtgaggttttaatgaatgagatttcaaaaattagagatgttaatattgcacatgatttgaaaaatagatcttctcttgcttgtagttttgctttgcacacacgcactttggatgagttgtttttaactaaaaagttgttgcaaaaatatcaaattgcttttcatgctaatttgaatttaacatgatttctgctaaaaagttaaaacaacctcatgatgttttggattgctcaacatgtaatttgaataagttgaaattgaaagatgctttaggtcgtgttgagttcatggaagatgttgtgaaaaataatgaagtgctttcttgccctaaatgtcgtaaaagcaaaggtgtcatggtagattatgcaaattgtgctaatttggaaaaagaggtttcttatttgaaaaattctttgttaagattttctgatggtaaaaagaacctcaatatgattttggatcaatcaaaggttagcacacataaccgtggtttaggttttaatccttatactcataattctagacaccctcctgttgtgttaggtgttggtgctagaagtggtgagattttggttaaacctgatactaacaaaactgtgtttaaatctgctggtatcatgtctaccttgaatgcatcttcttcaaaatccaatgttgtgcatgcaaattctcctgttgttgcttgtgttgctaaatcttctaatgtttccaatgtgtctaatcatcgtgaaaaatatacttgttctttttgtggcaaagatgtacatattgttggtttttgttttagattagctcataaacagaaaaaggagagagagattgcttttgcaaaatcaaagtggcaaaaatctggttttccctcgaggaaaccggttagaccgcagtgggtcccgcggtcagaccggcccccggtcagaccggccactgtacttcggtcggaccggcctcgaaggaatttttctgaaaatcctaaaattgattttgcacgtggatatatgcctattggatcttctggtcgtgtgtctcagtactggattcctaaatttttattatcatctaaccccagtactgaggcttcgacttctgcttgtgtgtaggctttggtggcaaggaaggagaacgtgtggattgtggattccggttgttcgcagcacatgaccggtgataaaaattggttctcctcactcaaaaaggcatccaagactgaatcgattatctttggtgatgcttctacaagtgccgttctcgctacaggtttggttaaggtaaatgaaaaatttgaattaaagaatgtagctttggttgaggacttaaagtacaatttgctttgagtttcacaaattgttgatgaaaattttgaggttcactttaagaaaactggaagtaaagtttttgattcttgtggtgattctgtgttgaatatttctcgttatggaagagtgtttaaagctgattttgaaaatcctgtttcacctgtcataacatgtttggttgctaactttgataaagatatgatgttttggcatcgtagacttggacattttggtcttgatcatctccctatgtagagtcgtctggatcttgttcgtggtttgcgtaaacttatcaaagatcttgatttggtttatacgccgtgtcatcatgctaagatggttgcttattcacatgctcctattgtttctatgatgacggatgcacctggacagctattacacatggacactgttggtccagctagagtgcaatctgttggaggaaagtggtatgtgttggttattgttgaccatttttctcgatattcttgggttttctttatggcaactaaagacgaagcttttcaacactttcgtggtttgtttcttcgattggatcttgaatttcctagttctttgaaaagaattcgaagtgataatggtggagagtttaaaaatgctttttttgaacaattttccaatgaaagaggtcttgaacatgaattttcttctcctcgtgttcctcaacaaaacggtgttgttgaatggaaaaatcgtgttttggttgagaaggctagaaccgatgtggatgaatataaaactcctagaaaattttaggctagggctattaacactgcttgttatatttcaaattgggttttcttgagatccaaacttggaaaaactttttatgaacttcgatttggacatcaacccaaagtttcacatttgcgtgtttttggttgcaagtccattgtcttgaaatctggaaatttggataagtttgaggcacgttctaccgatggattgtttcttggttaccccgcacacactcgtggctatcgtgtacttattttggagactaacaaaatcgcggagacttgcaaagtttcttttgatgaggcttgtccaggtactagacccgatattgcaggtacactgtcacaggttcagggggaggatggtcgtatttttgaagacgagagcaatgacaacgacgacgacgaggtcagctcggccggtcagaccgccggcacacctccggtcagaccggcacaggaggtacggtcagaccggccagggtcgtcggctgaggattctgttgatgctgttcgagatggtcctccgtagattacaacttcgaccagtactgacacagaacgtggatcaactttagaagtcgcttctcctttgcacattcaacgacgacatccactggaacaaataattggtaatataggtgagcggactacaaggtctaaggtaacgactcatgatgtttgtgcaaattctgcatttgttgcttcttttgaacccaaagatgtgtcacatgcattaactgatgaatcgtggattaacaccatgcatgaagaacttgaaaattttgaaagaaacaaagtttggactttagttgaaccaccttctggacataatattattggaaccaagtgggttttcaaaaataaataaaatgaggatggtttgattgtgagaaataaagctagacttgttgctcaaggttttacccaagtggagggtttggattttaatgaaacttttgctcctgttgctagaattgaggcaattagacttttgttagcttttgctgcttcaaaaggttttaaattgtatcaaatggatgtgaaaagtgcttttctaaatggttttatacaggtggaagtttatgtcaaacaaccaccatgttttgaaaatcctgattttcccaaccatgttattaaattgtctaaagctttgtatggtttgaaacaagctcctagagcatggtatgataggcttaaaaactttttacttgtgaaaggttttacaatgggaaaggttgacaaaacgccttttgttcttaagcatggtgataatcaactttttgttcagatttatgtgaatgatatcatctttggttgttcgactcatgctttggttgtagattttgctgagactatgcacagggaatttgagatgagcatgatgggtgagttatcgtactttttgggattgcaaattaagcaaacacctcaaggtacttttgtgcatcaaacgaagtatacgaaggatcttttgagacggttcaagaaggagaactgcaagccaatttcaacaccaattggttctacagctgtgttggatcctgatgaagatggcgaagctattgatcaaaaggaatatagaagtatgattggatctttgttgtatctaactgcttctaggccagacatacaatttgctgtgtgtttgtgtgcacgctttcaagcttctcctcgtgcttcacatcgtcaagcggtcaagtgaataatgaggtatttgaatcatacacttgagtttggaatttggtattcaacttcatcttctatatgcttaagtggatattccgatgctgattttggaggttgtagaattgataggaaaagtactagtggaacatgtcattttcttggtacaccattgattgcatggtcttctaggaaacaatctagtgttgctcaatcaactgctaaatctgaatatgttactgctgcaagttgttgttcacagattctttggcttttatttactttgaaagattatggtcttatttttgagaaagtacctctcttttgtgataatactaatgctatcaatgttgctaagaatcgtgttcaacactcacgcacaaagcacattgatattcgttttcactttttgagggatcatgttgagaagggagatgtggaattgcagtttttggacacaaagttgcaacttgctgatattttcactaaacctttggattctaatcgctttgcttttctttgtggtgaattgggcataattcatccttttggcatggtttgagggggagtttgtacttcatggttttatcaagcaataatatgacaatgagaaaaattgagaaaagagagctttgtttatgcatatggtattttcttgtgcatgctagcaatactttgaaggtttatttgtctctagcatagcttgtatgtattctagtcttttcatgagatttagattttgcttttaagggagatgatacatgacatttaaattctatacttgaattaagcaaatatacaatgttgatgctaacatatggtttgatttctaaatgctttatatatatgctttattgaattgttattcctcaaatagctttaattggtcattgtgaaaagagaataaaaatatgaaaaaaaatgaataccgaatcattggaaacagtcttgaggacaagaacgtattcgatatgagcaaaataatgggtgccgaatccctggaaacagtcttgacgacagggacgtatccggaataaaaaagaaaaaatatgagcaaaaaggctcaagaaaagaaaaagttaaaaaattctcttggttattttgtgctaaaggttatttgagaaagagtgataaatgcaataggtatatgtgtttagtgtttattcttcaacctatgtgcttgttaagatgttgcattataaatcatatgaaatcatgaattttgattgttgattaaagcttaattataaaatctttggttcatggttatactttaatgcatgcttgttatattacacatgacatgatatgctatatgtgttagggtcatggatatcacatacctaatagtagttgactaaatctcggcaggatccaccacatatcatgtcttatacggaaactgacttcagatatggagggagttctggataaggaaagacaaccagagttctacatggaaacgacaaggactactcagattgtatccatattggtttccctagttctactggacaagcggacacctgtgggtataaataaaagcccccctaggaagacacgaggacacccatgatatgagacgatcaacacgatcaacaaccaccatgggggaccacgagacaatcaactcccaacacaatcaacatagaagcctagatacgccaagacaaaccgccgaatatcgacatcagagatacgcctggatcgaccctatccggtaccttcagaggccggccgtagggatctagcactgtctctgattccgtcgggcgcgagctcgaggaggaaggctaccctgttgtcaactatgagttagaccttcagaccggcatgtcgacaacagttagataggctaccccacatattgtactggtatgattatggtgaataaaaagcaacatcggctccggccaacaggatgtagggctattacatgatagctcaggggcccgaacctttataaaaatcctcgtctccatctcttttacctcagtctcgcgtataccctagcaccgacgatccccatactgtctaaataccgtagtcgcgacatcaaacgtcaacagtggcgcgccaggtagggggattttggtgcttcagaatttcaacgagatgggttcaaaagacggattctccgacaacaagctactcgacgactttgctgtggggagatccaacccgaccagagtatgtctcccgatatgatcggaaccatcgtcgtcaacaactcgatctctcgagatcgaccaaacttcaagacgttgccgccgcggagaacagtgacttgatattatcaactaggaggtctccgatctccatctcttcagaagcgacatcataaactgatttttggtaacctcggtaatgccgctgcctgctcagaacaccggccatcgaggaaccaaaatcaacatctcgatctattcactagattcttttgggactcggatcgttctcacaccccgattaggatccaaattttggacccctgacgcatactgagaacatccatcccgacatcatgtgttcccgggattattgatcacggatgtctaccaagataaatcaacggccgcccgtgatcaggtatttagtagattgattttttaaaaatggtctactaatttcgtagatacatccagcgtgtatctacaaaggtacgtaatattttatatgcaatttatcgtacctattcagatgatacggcattgtcagatctataatttattatgtttacctagagcttgttttttatacaatatcaattgcgcggatgtttccgatgttaaaccaactacggtctaacgctgggggctcgctctattttcttctgtataaatcatgcttgtttacggtttacataatgcctaatatttacatctgctcgttatatcctaataatactagaacatccatgcagttttttgagtacatactcgacattatttgctatatatcttgccttctagaaaatatttttcaggaacaattgagcactcgagtaggtcatggtcgagtacaccgcattatcgagaacgatctcgacaaatgcagagtcgtcacgcccaacctaccaaagaagaccgacgacctatctcatagcaccagccatcgctggactactcgagaaaaggttgttaacggataactcctcacgaacaccgtcggcttgatcacccaacatgattgcaagaggacatccggatatgctataagttgggtatgtgagtcatgctggccacatgatatgcacatgtaataaaccaactttagcgcccccataagtgattaagagactcctactcctggttctcgaaccaggaagacgtagtgatctctctcgcctcactttaagtggtcgagttacgactactgcctggtcctcgaccagcgatgtagtgtttctcccacaacttccactttaagtggtcgagttatgactactgcctagtcctcgaccagcgatgtagcgtttctccggctacttccacttcaagtggtcgagttacgactactgcatggtcctcgactagtgatgtagcgtttctcccactatttccacttaaagtggtcgagttacgactactgcctggtcctcgaccagcgatgtagcgtttctcccactacttccactttaagtggtcaagttacgactactgcctggtcctcgaccagcgatgtagcgattctcccattacccctgcttcaacaaagttgatgtcaggtacacaagatcgccaagtgttttacccaaagatcccttaccacggtgacacctagcgttgaaacctatcctactgtccctttacgccgtcttgacaaggcctccgaggaacctgagggaactttggctgggaacgcccagagccgataaggccttgtcggatccttcagagacgaaagaccatgtaagatctggtcgtgtaagagttctcgccatgcgtattaactaagccgtgtaatcggaaatagattttccaacttcacggctgggggctaggatcagtgcttgttcaaccgaggcaggtcaaaggtccaagagctttatcatccgagaacgattctccgacgacaaggttgggggctagggagagtgtatgactctacaaactgactgatcaaagtcggtaggagagaagacgctcatacacaaaacattggtcagtaaattcaatttgtttttagttttccatacatattataacatgtcaccatttgagcgttcgctcgggggctatttctatttgatattcttttctgagtattgatttcaggaaaattctattcgacattgacgaagactccatgtctctatggttctacaccaagattgactaaggcgaatacgacaaatgttgacaaagctccgtcgcagactctacgccttctcgatcacttgagaacggttgctggatctcgacaaggaatacggaatgaagagatggtgtacccgccgagataaaatttcttgacttcaatccaaattctcgattacagcaagacgtgagacttagtcgtacactctatagtttctcggtagacatcagagattaacttagacaaaccttttcggtgcccgcacgaggctgacaaaggaagtccaacgttatctctaaactcaccgagaacggtcacatgagctcgataacagttactccaatgtctgcgcgcggttgagaatatgaattcgttcatttgcatcaaagtcgggggctatggtcagggttatggataccacatacctaatagtagttgactaaatctcggcaggatccaccacataccatgtcttatacggaaactgtcttcagatatggagggagttctggataaggaaagacaaccagagttctacatggaaacgacaaggactactcggattatatccatattggtttccctagttctacttggacaaggggacacctgtgggtataaatacaagcccccctaggaggacagggggacacccatgatatgaaacgatcaacacgatcaacaaccaccatgggagaccacgagataatcaactcccaacacaatcaacatagaagcctacatacgccaagacaagccgccggatatcgacatcagagatacgcctggatcgaccctatccggtaccttcagaggccggccgtagggatctagcactgtctctgattccgtcgggcgcgagctctaggaggaaggctaccctgttgtcaactacgagtcagaccttcagaccgccatgtcgacaacagttagataggctaccccacatattgtactggtgtgattatggtgaataaaaagcaacatcggttccggccaacaggatgtagggctattacctaatagctcgggggcccgaacctttataaaaatcatcatctccatctcttttacctcagtctcgcgtataccctagcaccgacgatccccatactgttcaaatatcgtagtcgcgacatcaaacgtcgacaatatgtatgctaagctcttgaacattaatgaacataattcctatgcttgatgaaatcattgtcaaaagggggagaagtaatgtgaaattttttggatttttgggagaagcaaggtgaatttctgaaagcatgtttttggttcaattgggaatttctttgtttaaaaagggggagaagttttcttttggctttttgagcacgatgtgtacatttgtacgaagtgtgctttttaccacttttgtttttatttttccaaacaccaaaacattttttatgagtttgctaatgtgttcatcaagggggagattgtaaaatcaaaggtgttttttattattattctatgatgaacaattggcattggagattattgattttgttacttggaatttatttacgaagtggttttggagatgattggatttacgagtcaatcgcatgtttatcattttatgtggaccggttagaccgggccagtgcggtcggtcagaccggcgtgtaatgcgcggtcagaccggcgctgcccgtggtctgatcggccgacgctgtgtcggtttcgatttcgggttgtttgtttagatatccgtgattatttcatgattatgacttctagatggatactatacgtatgtaatactattgtttgctactaatgagtcaagttggagatagcttggtcttggaatatggtttctttgtttatttcatgtgtaggtaacttgatgcctcgggagagtatttgcagtgatggaccgggagtcggcttggggataagacgacgtccgtggtggtcagagatcatgcgggatacataggttagagttgatgcacgtggttgatggagattccatatggcatacgatggaggtattgtgtgcgtatgggatgcgtagtcgaatttggaaggagtccaaatttggtatgattggttatgtaaagtttgtttcttgtactagagggtctcctaagttgtttaggactcctagtatgagtttggttcgtggctttaggctgcctacctcgggtataaatagagggggagcgtgaggcttccaggtatcgctttttagagcaattgagttgagttttaagttagggtttagagtttagtcgaaattttttgtaaggagtgatgttggtgcactttgtaaacacagatagaagtaataaagttttcatccactttaagagttattcgatttgtgtttaccgggtgtcggcggtctaaccggcgatataccggcggtcagactggcggcaagcggcggtcacaccggcggcatacgggcggtccgatcggcggcggcgacaggcgcgacaggcatctcggcggttcaaccgatcgacctacaccagtcagaccgatgttcatcaggtgatcagaccggcgcatatacttcggttaaaccgcgatacgtcgaattcgagggtaacttttatttccgctaaaagttttctttttttaggtataccaaccattcaccctacccctctggttggcttagtttttgtgattcgatcctacaacatgcaagtttgtcacatcattactcactagcaattattatatggagcattttaaatatcatgtcataccatttacaattttgttatatttctataactcaatatgcaagcaatatcaaatcattatctctacatcatttttacattatttaaacatgcacatctaccatttctataatgtataacatatattcattcacatatcccgtagcaaaacgcggggcatcaactaattggaaagacaagagtagccttcaatgcgggaagtagagatggcattagaatacatagctttaaagaagggcatttttgataatgggaatatatatactgcatcgagtagatcggatagaaatgatatttcaacgcattacatgtcaattgaagtaattaccaaggaagaaagtaggcaattgacaatgaaagaggaatgtatttgtcatcaacctattcttaattatcaaggtctgcctagagggaacactacctagtttgcaatgacagatccagcgtgggagggggaaactattctaaactctcgtggggatgccctttcattgtttgcatatcactcaaatggttgtgaaaaatattgaaaaaaaattgagaagagtattccgggcattacaacgaaagaaacaaattaaaccatagctagttaataatatgtttagtcccccccccccaaaaaaaaaaaaaagtttttccatggatccacacttgctgtctgtactaaagacatgaacctaccaatctacatacgctgcatttgttctattgtcataatatattctacttctaagacatcaattcaaaaggagaaaactgcaagtattacttgtgatttggtttattgttggtatttcttatgccctcacaaaatgtatccaagaaaacacagatttattggtgtagcactttactttagagtattttatggttatccgataaatagaacagagtttgtgaaacacagataaaaggaatctcacacctatctagttatgaagaaatctgagagaactattggagcctaacaagataaagccatgagcaaatctcggtaaagaaaaagaataatatgagtttacgatgctggttattttaggcacaagacataatccaccacgcagagctgttgaataggccctcttgacaatatcagcttcttattagaaagcttatgagatctagtttcagatatttttggtcccacattcaaattcatcctgagctttccaagatctaaaaaaacaagtgcctctttgagtcggagtctgttttggtattagcccttagttatttcggttttctattggctgctttaactctaaccctagctctatttattgcctggaataagatacgttttgtttgaaataaattgaatgaataagacagaaaagaaaaaatctctcttttggattcttggcattctacgcatcaattaccaattttttttcttggtcattgagattcgtgcataatttagtattgttttgggccttgaattttgtaattgagtcttttttttggtaggcccatgttatggtcgacctcctacccctgtgaactcataaatagataaccgctgccacctcaagtttagattttctttagattattctgtctaacaataatttataacgtgattatttgtataacattaatttatctgtaatttatttagattaccttcctccttgttcacatgaattttaattgcttgcaagatcaataatcatcgaggttatgtcgattgcaagagagcttggtcgataatgatgagatgtccaggtgtagcgcttgtgtggttgcgatcgactgatccgaagctgcaaaatgtcaacatcttcacatcgacaaatcaaacctaagatctagcaccaatttgcataaagggacccacaataaaattctcatttttagttccttgtagataaaaaattcgaacatgatactccatccgtcccattttaagtgtagccataagtttccgtgtccaacgttcagccatccgtcttatttgaaaaatttatgaaaaaattttaaaaattaagtcgcgcataaagtattattcatattttataatctaattacaataaaaatattaattataaaaaaataaataagacatacggtcaaactttaggcactaaaacccataactgcgtttattatgggatggagtgagtattttctaaaattccgcgcagacatccatagtttgtatcccctataggaataagttcactttaagtccctctatttgtcggtcagtctgactttcgtcccttgaccgtaaaaccgggtacgaaccgtcccccaacttacgaaaaacgggcaaacaaagtccctcggcagtatggagggcggttttggctgacgtggcgtctatgtggcgcctacgtggctcctttgactaggtcttcgtcccacgtggcattgacgtggcgattacgtggcaattttatctcgaaaaaataataaaaatagtgggacccatatgtcagctacacaaaaaaaattaaaaaaaggtggggccatgtggtcccatatgtcagcctccttctctctatcccccctctctctcccccctacattgccaggagagaagggcgagcggcggcgctgagggggcaacgggtggagcggcgacggagtggagcagcgacggagcgaagcggcgcgatggccggcgggagaaagcggagcgacgatgggcgacgctgcgacggagcaaagcagcgcggcggccagcggtgaacggagcgacggcgggcggtgagcggcgggagaaagcagagcggcagtggggcgaaatggagcggcggtgggcggtgggcggagcgacgccgacgccg

SEQ ID NO: 22570 - DNA, 14539 bp, Oryza sativa
cccgccgcccatcgccagccgcccaccgtcgctccgtccaccgccggccaccacgctgcttcgctccgtcgccccctcggcgccgccactcgccattctctcctggctgtgtgagagaggggggatagagaggagagggaggctgacatgtgggaccacatgggccccaccttttttaattatattttgtgtagctgacatatgggtcccactatttttattattttttcgggataaaattgccacgtaaacgccacgtcattgccacgtggaacgaagatctagtcaaaggagtcacgtaggtgccacgtagacgccacgtcagccaaaaccgccctccatactgccaagggacctcgtttgcccggtttcgtaagttgggggacgggtcgtacccggttttgtggtcaagggacgaaaatcggactgaccgacaaatagagggacctaaagtgaacttattcatcccctatatggctggaaaaaagctcgtggcccattatagctcgctcaacttgtggctgacttggctcattttgatttcctaacaagccaagctgttgtttcagctcgttagcgataaggatccagctcaaactggcttgcatgagccgcttgtgatgtaaacgagctggtagaaaagagaagctaacagccatataccaacttggtggcccagtaggaggctggtgcatggcctaatatccaaatggcccaaacaaaacattctaaaaccctagcccccaatttcccatcttcattatttcctcagttgcatattataagactttctagcattgctcatattcatatatatgttaatgaatctagatacaaatatatgtctagattcattaacatcttcataaatatgggcaatgttagaaagtcttataatataaaacggaggaagtagtagtgttctgcaatatctagttccaggcttccagccgccgccctcctgcattctgccaccaccagatcccgctcacatcatgtgccagatgcgagccaaaatccaagtacgccaccatagccgctcgctctcgctgctgcaggcagcgactgacttcgtccatcgaaccgtcctcgctgccatggcatcgtcggtcgccacgctcgcccgcacgatcttgccggtcaagaacaccactgctggctacggcgctgtgggctgcagcctcgtcggctgtcgcgctcacccgcatgggctcgtcgctttgtgtgcgccgctgtgggctgctcttgcccctgccgcttgatctcccgctatccctacgccttgtcgcatactcgcttgcgctctcgctcttctcattagacatcttgccctttgtagcttgcaaggtaaaacaagctggctcgagctacaaacgagttaggacgagctgcgttttctgctcgtttagataacaagccaagcttagcctactcattatctaaatgagctaggacgagctgagcaaagccagctcggcatctacccctaacccgctatattcgactacaaaatacgtaattgtacgtaccacccccccccccccccttcatggcaagcagcaacgctctcccctcgccccgcctccccatgagcaacagcagcagtgatccacatgacgactaaaaacaccttcctgatctctcccaccgcccccaaaaatactgtgggcttctggatctaagcaatggtggtgagaagacagcacctcggcctccagtgagcagcggcggcggtagccttggcctccgatgggtggtggtggccttggtctccggtgagatgaggcgatggaggcttccatgtattgatttgtgttttagtttttgtgatgaatgttatgtgtgtaatattctaggatgattcttacttattgttgtttgatgtgtgagattttttttttcattttttgtatgtgttcttggctctaagcatcagctctgatttgagccggtggatcaaactgactttttttttctcattgctagctccttcgattctccacattagtgccgctaatgggtgtcagttggaaaatccagcacttatgtgggtttctaaccaacacccatgttcacattgcaattcaaatgataggacataagctaagctcaagcctgctgggacactggaatttaatttgttttcttgtttcataattaagaaaggaaaaataatttctatgattcatgcagaaacttaagcgtctcatctctgcttgttggctttgtcagccaaaaccaatttaaatgttactcgtagaacttaatttagttgattttgggtattatcatggtatattttccagcctggattgaaccatgaacaatatgtgtgtgtgtgtatatatagacacacacacattttgcctatcaattatttttggttttcattcatatgttaacattttgcccatgaataatatagcctatccatatgaaattttatgcgcgttataaagggggttaattaatacgagtttgtggagcttaattaaaatgcatgcaactaattatgggaattaattgcaggctttcagcctacgtacgtttcgaataaaaagaaaagagagagcagaagatgcttgacgtgcccaccggcaatcatcagcacccctgctgaatatatggcctgcagtaaacaagaagagaggctgaagctgtgcgatgacgtagaattgctgttttgcatggtccacctgaactcgatggtggactcccaaataagggtatttgtaatgctggttcctcgaggagtactatgcatgcaacagcttttttttttttgtctcttcttttattttaacagaagggaaacagctcctccccttttcattaaggaaaagtatcagttcagctaaaaaaaacagaaaaaaaatcatccaacacacatttgtgtaacccccaaaacaacttagctgaaacaagttcacacaagagggctattgaacctgcgatgcttaaaaaaaaactagaatagttaaaggccctgtttagatcccatgataaaattttttaccatgtcacatcgaatatttggatacatatatggagtatcaaatataaacgaaaaaataactaattatacagattgcgtgtaaattgcgagatgaatcttttaagtctaattgctccataatctgacaatgtggttctatagtaaacaaattctaataatggattaattaggcttaataaattcgtctcgcagtttacagacggattctgtaatttgttttgttattagtctatgtttaatactttaaatgtatgtccgtagtgacacaccgaaactttacaccctaaatctaaacacagcctaaaccgaacagaatgtaaatgctctctgccgccgttttctttcttgacacttcaacttctttatatctccagctggaaaaggcggcaaaacttgcgacttgttttagcaagcgatcaccccattgcagctcgtttgttcttccctccgaattccgatctctgcaaaatggaccacgatgaaacacggtgacaaatctgatatatcagatcaatgggatgagaaatccattttctctcaaaacatgcattatttatggctttccaaatatatacaccaaagtactgctggaataccaaccgcaatcagggtttgtcctttttctcaaacttttggaaccagtcacccaacaaatgatgagtgttaaggattttctcaaattaaagccaaatgaactagccaccacattccaaataaatgtagtcaaaggacaagaaatatgatattcttagtcaacagccaggtaaaactctagctttaacagggattttgaaattccataatttcctaaaggggaagtttagacattgtaattgtgaattattatataaagattttacagagaaacattttctcttatccaagtcccacattaatgcaccttctcattgttaaggacaacattttcacaatccctctgtagcttaccccaggcaacagcctttccttctatcaggctttcctaaagggtaattttaccatccttgataaggtacctggaggtgccatattttctagtgtaaaatttaatgcctctagctactaatacctcaaggtactaaaaattttagtgtaaaatttaggtatcttaaggtattttctcaagaactgtaatttttttctctcctaaactgtagcctatccagcccgcccttaaaaactttatctactatcctaatttttgacaaagttatattgtacaattctagatacatctcaacaagtgatgaattctctagccacttttcctgccagaaaagggtatcttcaccattaccaatctttttggaacagaatttcataaaatcgtctttaatgctcatgaacccattccagaaaaaagaaacaccaggtttgaaaacacactgtttaagggtgtttttttttaagtatttagccttcagaagactttgcaacaaaccctcttcattcatcattttccatagccatttccccagcctccctgctttttgggtctgtaaactttctaaaattgaattagacgatatttcttaattctctgatcctcctgccagaagaatctataccttaaataatccatcttatttttcactccctgtggcaccaggataaaaagacatcatgaacatggaatgctacttaagctagagattattttagtcagtctaccaatgattgccagcatcttcccctgccagcaccctagtttctaattctattccatcttgttttcagcaggttttcaatccttgttatatattcttttgttatctattagtataccccaagtatttcataggtaatatgcccagtttacatgttagcatgttgctataaatttcacttttctcactagcgcttcccaaaaaaaacacactcttgttaaagttaatctttaaactagacatttgctcaaacatacacagattgaacaccgcggtgaacgagcgaggttgagcactatcctggcttccaagatcatgcaccatgtgatttcctaggtcaactaccgcccgccatgtctcgctcgattgatcttgatgggcacgcacagcataagatcgagcaccaggggagcgagacatgaatggcgtgcctacatgatgtagatccaccttccatgttcgaggagtcaaccgccaacccgccagtggtggtcgagcggaggctcccatcaagccaagactagtggtagttaacactaggagagggcagcggtgctaagagatttgagttgaggagaggtgagggcagtggcaacccttcccctttcctgctgtgttatcagtagaacattcattggatagcatcctatttcttttagataatggattttcattaattcggcctctatatccacgagagatatacacagccaaaaggatacaagagcacttagggtgtgtttggttgagctgtagcttttaaaaaagtagttgtgggctgtgacttttcgaaaagcagctgtggaatatgggttgtggcttttggaaaagctcgtttggttcaacagctgtggcctttgaaataactagtccggcttacaagcgggccccacatgtcatacacacattgcaaaagagggaaaaaggaggggaaaacagaggaaaaaaagagaagaggcagagcgcggtggcggagtcgggcacgcagcgtcggcggggaggaggagcgcgcatcagcggaggaggtcttggcggcggcggcggggaggcctcagcgcgcgtcgcgtgtgagtggttgcgagaaggggatggggaaaaacaaatcgaactgttttctcataaccagtggcaggtgggtaatttttttgctcaaaagccattgaaagcatgggtaggaggagctttcaatttgtactagagcaaaaacaaaagcaggttcaaaagcccaaccaaaggcacccttagactcacaccacatcaaagaggagaacacacaaaaacctacaaccttggtatatccctcctccactgaaatgaccaaaatcgacgagtgcagattgtctagtcgccaccgccctagtggattgtcactgcaaaccttcgctagtgccagctttatccacttcaagtgagatgacgccacttgccgtcagtaagcccaccttcctctatcgtcgtccagacagaacaagacgaccagacacgagccaaaaggatccgcttccgcttcagcggattacaaggcctacgccgcccataaggccgcctccaacgttggaatcctcctctgtctctcagacacccagcccactgtcacccctagggcaccacctctaccagagtcctctgccgcctccactgaggatatatatcttcttcctcccggactccgaggcctctggtgcccctagagccaccgccaccaacgggatccgactcctcctcgccgagatccttgcaccggcacttagaccgccgccgtcccgggccaccgctgcccctagggtcgttgctgcctatggaacacctccgtcggatccgccttctccttgccgaggactgtctgttgacgcttaggtcccatcactgtcctccgccgtagcatcctatggatagttggttagtgtatggtcattgcaacttgcaaggcaataggccctgggatcgattcttgcccctctctgaattatatttatatattcttttaacttttcaactccatttttactctaactccattgaatcttctgtccatatttaattcaaccccattggatcatcattcttctttcttccaatccattcttaatttcctaattttcttttaacttcattgaatcttcattattttttttagttcttgccctttcttaatttctattttcttttgatttttcaactccattggatcttcttaatttaatgttttattttaactccattgaatcttatgtcttttttaatttaacttcatttggatttttcattagtttttcttccaatccatcatcaatttccttttgtttaacttcattgaatctatattctttttttaactctagtggatcataaattaaatggtacagtagatgccaccttaccccttggatttttaagttaatggcatattagatgtcacatataataatttcttttataaaatggctgttgtaatatgcaagcctctctccattggatcttcattttaatggtatattagatatcatctatacttttttagaaaaaaaaacttttgcaaatcataagcctctcgctttcatcgtcatgttatgaattattggagaaatcttggcacctctaatacccaaatcctagcttctcctttgagagggtcgtgaaggacaaaagagagagggagaagacaaaagatacatgtaggggcgtacacgtatctattccctctatttcaaattataagtcattttgattttagtcaaaatcaaactactctaaatttgatcaatcttgtggacaaatatagtaatatttacaattccaaattagtttcactaaatctataattaaatatattttcataatatatttgtcttgggttgaaaatattactactttttttctacaaacttagtgaaccttgaaacaatttaattttgaccaaagtcaaaacaatttataatctgaaaagttgtttctaagaaacaataccatctgttcctttttaactgccaaaaaagaccggcatatgtggactcgatccattaaagtcgtgcattcgttgtgagacttggtagcgaagccaagcaaaccgcaaagcactaatcagaagtaccttagacaaagatttgatcactgactcgatgaactctatcatattggtagctacatatggacatggagaccggacctgaaagtgactagcgacaagaaagatcaatcactaagccagcatgcatcaaccaatcatagtagccacataatgtccttagatatttcagattacgataactaattaaacagtgtaacatttcaatgttacaaaacaatcctctagagaagtggcagggatcgaagaagataacaacattatacttgatcctgggagaatttctcatgggattgtcgacaacaagtcctgtatatctggaggcaataccgcaaagtcgttacagcacaaatcatttgatataagagcgcaacagtgtcacacaaacacgctgtccagaaactttattttattgaaacaacccataattatactgtataaaaatagaaaattgtacaattggtaaaaataaagttgctgcgcaatctatggacatacatgttgatactttcatgcctcgtcacaagccatatgattttcctcgtgcctcctatttatggaaaaagacttcaccttttatataacttttctagataatggagaatttcattaatcaataaaatcataccttttatataaaattataaaagtagtccacaataatgatataaaggagcaatatggtgctaaacctttatgttcaatattatagctgctttgaaattttataaatgaaattatagctaaggcaatttccaacaatatagacttcactatttacaacattatataccttacattgtggtctaaactatctaacgtgtgtactaccagtttgatgcaatatgggttttttctaacacaatactctctccgtcctatatgtcgcacactcgttttaaaattcaaatggcataaacttttactagcaattagtgataaaagtatagtattgtaaacttcatatttggatgtactttattgatttcactatggataatcatattttgagagcaattggcagttaaagtttaatttttgagaccgtgccaacacttataaaaaacaaagtttctatacgaggacgtaggatgcaagtgggtcataactagtgcgtctacaaaaatcgagcaatatttttttgcatacggctcattaaagacctgcatgtaaaaatatatttttcatagacagattactagagggactgcatgcaaaaaaaaataagcttatttccccatgcgattctcttaaggagtcacatgcaaaaatagattttcacatgtggacctcttaagtggtccgcatgcgaaaatacccgcctattttcatagatattttctcccctcctctctcctttcccactcaacacttcaaaattttccacttcacctctcccttctcgcactctctctttctatcttcttcatctctctcttcctctcctctcttctctctttctctctctcaccgagtgggagcaggcggcgcggccgacgaggaggcaccgagtccggcgccgcccagcgtgggacggtgggcgcggactccggcggtggaggccctccctcgcccccgatcttgtggccgccgccctcccctaccccgatctgccggcaaaaggaggaggacaagacggcagtgacggtgatgggaggaggacaacggcgacagcgacaggagacaggaggacgatggtggcggctagaggatgaggacgacggcggcggctggaggatgaggatgacgtcggcggtggctggaggatgacgatggcagcggcggcggtgtattttttatttttgaattttttttatgatttttccttttcgcatgcggtcagcttaagcgcgcacgtgcgaaaattagattttcgcatgcggttgcgctggcagcatgtaaaaatcatacattttcttccatgcggcccgcccaatcgcttggccatttgcaaaaaccgattttgtagtagtgcaatcaagttatattttcggatggatggagtatatttgaacttagatgatagtagcttatgcggtgtttgcatacttttgaatagttgaacgtactcttaaaattattatacaccagcatcaaatgtaacatgtaaataattaaagatgagtacataactgcatcacttaaccatctaattctaggccatcttatatatatcatatagaagatttttcatggaaatagtcaacggtttatatcatataggagtataagattttcatggaaatactcaacggttcaatcttcaggaacaggatactttgactttaaggggtaacgatagaaaaacctggatcctctaacttcgagggagtaaaggtaagtgtagtgtatgagtgtagtgctacagtggttcgtagatggcacagcaggcggtataaataaaacaaaataatataaacttattatattacagctcctatttcaatatacttatcatagaaactgaaactataccaaatattttttaaatcctgaataatatagagtggagttgacacttcgctgcctaaaaattaggctataaagacccgccgctcctcggctctactccacacccgaagtagaagccgtaccaaacgggtctaaaactaaacgacatttactaatataagagcaagtacagtagcatactattagccagctataaacatattttagtgagataaaagatgagagagaaaaacaacgggctatagatctatagccagctacagagtacggactccaaaacacaatgcgtgtatgataggtgggaccatatattaatagtatagtaatcagctattgcatgaattgactgttatatcggctatactattaaacttgctcgaaacggggatactcgtagctatcagctccaagcactctcccttcggagtaacgactagtaataatggttgacataaagccataagcacgcatgatcagtgttggatccaatgcaaacaaggagaatgattggtggcttgtagagagaaatgatcaatgctggatcctgtggcaaacagatcacgcatgattaacacaaaactgattattaccacaccatctgcaatgacatccggggttggaccaaagaatgcaactgcagtggcggtggggcccggctcagcagggagacaaatcgatgggtgggtcccacgtgcagcacttgagcaggtgagtgcagtctctgttcattcttctcgtaccctccaattcttctactacaatgcacggattacattggctaaattattcagagccgacactaatcactgagtcatgttgcttgcagctgcctcttgcaggggtgacatggagggtttccagaaaaataatcagtcttaaactgaaaaaggaagatatattactttccaaaggaaccgttggtgcagcaaagaaattgttcttttttcctgaggataatacttttgggttagttatatgtgatatactagtatgcgtctaatgcccgaaaagtatagatcgaaagtgtcaatgtgaagatcaggttggggtaaaatctggtcgattatcgtaaatttttttctctaattaatggtaatgacaaactaaacacaatcgtggtaaaatctggagtatttgattaagctccttatagtgaaacctattcatctgaatttaaatattagatttgacacaggtattcataattataattaattattttttaatggtgggttcaaaaaatatcatggctgcccgtcgttcgataatcttaacaaatctcgtcttagtttttcaaatgtgctcttgggtgtagtggtttgtaaaaaaatcatatggccacccgtggttcgtcaattttaagggttgctttgatatgtaggaaaaatatagaaattttggaggatttcagttctatgaaaaaattctatgaaggcctttggaaagtataaaggattgaatcatatcctatcttttaaaatttttatggaatgggtaatcctatagggattttggagaaaagttagcaacaagtccaacctctcgaaaaaattcctttgagtctatctctctcatccgattattgtgtttttctcgtggtacaatcaaatggtcgttcttgtgtttttatgggttttataatcctctgttttacacatatatttctgtcgtaatcctgtattttttatatccctccgttttctattcctactgctcaaaaaggccctaagaaatatcagtctagttgtacagagatgtttataagagtagtggttcctcaatctctatatacgtttggtccaattttggtccaatcttgtattatataactgggtccacgcacacacaaaccacaatgcatgtgccatggctaatcccccctctctgtcttttcccatttggctcaccatttgggcgtgggttactttgtcgctagtgcattgattttcattgtacatgcttttagttttgacgcaaatgaatacgtcaattcaacatgcgagttaatgagagtttggcccggctcgcgcacggtttataaccacaatcaattttgaattttatattttagaattattaacagtgtttttaagtcgattttgttacttatccttgtcattaaagtagagaggaaatcgtgttcttgttgttgttttcaatttcaatctgattgttactcttacttttccaattttatgatttttgctcatttgtttaactgaagcttgtgcttgggctccattttcttagacgacttaacagtgtgaaaagccaaaataggggtaaaattatgtcctaatgcttgatgtcaaagcaaatgaaaaggcataaagttataggaaagtaaggacaaatctacatagagaacatatttttggcgccattatgtactagtaacaaattgaggggacaaacacaagcttccataagaaatatatatatagctaaagaaaaggagtaacatcgtttgattagaaaacagagacaagaatacaattgcgctgaagtggctacgaaaatatttttattgtaaaactattcttattattatttggacctctgctttgttcgcttatagcctagggattgccaaaaccagtgtaaagtaccgtcagctagaccgaaaatgggagcttcagtggccagtttttcgactaataattgtcagaaagacccattatgatcggaaaaacataactcctattggggacatactgaaaaaatggaagaagtgggtcttgcgcgcatccgctcgatatctcaccacctgtgtctccttcctgctccactcgcctccaccatcacgtctagccagcctcaatcgctattgccacagttagaaaagcatggatccatactaccacggaaagtcctcaatccgcctctcaaccattggcgatccgtgccatagccactagaaaggcctcaatccatgccgccacaggtctcgatctatgctactcattgacaagagatcttgatccgtattgcttccactgtagaagactcgatcaacctcattgttgttaacgagggatttacccctcgtacctctacgatgtccactagtattgattcgctctgtcaccgccgtctccaccaatattaatccacgtaggttacacctgagcttttatggttgccgccttaattctgtatgggcagtgattttgttggaatttattgccaaattctactgcatgttaatctatttttattgttggtttttaatttggagacttttctgaaaatgaatgttttactggtcatgcgatttccaaacgataaggatttatatgtttcctggtaatttcgggagacacgaacaccaaaacaggcccttaaagggaaaaaaaagaaaaaaaaaagggatatttcaagctgtttgtacccctgccgacgagagtagatgaacggttaacttccaacttgcacctttacagaattacaatgcacttgaggttaaagttaagcttcgcctagacgacgcaggttgaggacttaagctttgcatggacgatccaagatactacgtccatctatctatctatcactggtggagaatccatctttactcccggtttataacctcttgtagttccggttttctaaccgggactacgaatacaagactaaaaatagcgatctttagtctcgggtgaaataaccaggagtaaagatctcccggttggtaacaccaaccgggactaaagagaggaatctttaccaaccggtactaaagagaggggcagtcccggatggtccattttctttttattttctcccaaatcgagtaagatgtatataccatatcaaacaccaaatcctcaaatcgagtgtcatgcgtatacccaaatccccaaattaaagtaacatcccaaatcattcacatcacaaatacaaatcctaagttacatcacaaatcttaaaaaaaaatttacacacaaatcaaatgcatcacggatcgattatacatctcagatctatgcaatgagtcacaatttacaaaaagaaattatacatctctcaatcacaaattataaaaaaaaatggagaggagatctggcgcggtgccgcccaccgctgctcgccacgggcagtgcctgccgccccgtgcacggccccgccgcgcgccttgctcactgcctcaccaccggtgtgcgaggccggctccgccaccacccggctgccgtgtgagggcgcctctcttttggaagctgccgcctgagaagtggggaggggaggggaagggatggggcggatacagaggagaggaggtagaggaagagatgggaggag

SEQ ID NO: 22571 - DNA, 11940 bp, Oryza sativa
gtccggacgagctccgaccgcgacatggtctgggaccggctcaagtcaaattcattccagttaagataaaaatttcagaaaaaaagatctggaattcttatgctgttcattacatttttcaatttgttgattgctgatatgaacatgttgcaggttggatgaggatatgatcgaggtgctattcatgaacaattcgacagccgtggcgcctaggatggacaacccgaagaaagtcggcatgccgcaatttaagcaagaggagagagttcttgaccccaagaaggcacagaacattgccatcctgcttcgcgcgctgaatgtcactctcgaggaggttacggatgcgcttttagatggtaagcaataattgtttggcctctgtttactactctctccgtccgaattttaactttttgcttttaatgtttgaccacttgttttatttaaaaaatttgtacaaatataaaaaacgaaatgttatgcttaaaatattttggataataaagtaagtcacaaataaaataaataataattctaaaattttttgaataagatgaatggtcaaacagtacaaataaaatgtcaaaatcccttatatcatgagactgagggagtatgataatttagataggaaaaaaggcatatcttactaagggcaagtaatactagttgttggattctgttgtgatctattctgaactgtcctcagaaaaaaatatcatttgaactgtagggcagcagaccagcagtagtatgagtaaggttactaggagtataaaatactactacatgctaatacagcaatacacacctctcagcgatgcagaattggataaaaactataaacactttgcatctaattccagtaaccatatgttgttcatctataaataggtaatgctgaatgtttgggagctgaacttttggagaccttagtaaagatggctccaaccaaagaggaagaactgaaactgcgagatttcactggggacttatcaaagcttggttcggcagagcgctttcttaaagcagttcttgatataccgttcgccttcaaaagagttgatgttatgctataccgagcaaattttgagaatgaagtgaattatctcaggaaatcttttcaaacgcttgaggtattgcagttcacgttgtatttgtctctatcatgggttactgcattaacatatattgttatatgccatcatttactgcataaaactaatactccataaaacatatatggactagatgcttgaatttggactgcaccatggtaaaaaattctaatatattacactacctgaatttatatatcatcaagctgtgttagttttgaaaaatttatggactctagtgcacatttgagttacacaaacatttaaaatttcaatccgaaattagtatgtggtacactacttaacataatataaagttctttcagagtttttgttcatgatttacgaatctttctaaattctttatatcatggaaaattttggcactaaattttttttttggtgcttattaaatcacatatactgcaataattaaggaacttgacaatatattcatgcactcgacaaaaatggggtctgggaacccttgggtagcaatgtattttcacaagatattaggaagtttggagatttatattgcagatggttggtcaatccttggccaggaacatgcgtgataactattgtgtgttaacaccattttagtttgtttgcttgcttttcaagcgtactaacttttaccatatacagaaattattatgaagtccttaaagtctctcactggctctttttagtagcttaacacttctacttgcttttcaggcagcttgtgatgatttaaaaggcagtagattgttcttaaaactccttgaagcagtgctgaggacagggaacagaatgaatgttggcacaaaccgaggtgaagccaaagctttcaagcttgacaccctcctcaagcttgcagatgtcaaaggcgccgacggtaaaaccacactgctgcactttgtcgtccaagaaatcgtccggtcagaggacgcaaaatctgaaaaggctccagaaaaccacatcacaaacatcgcgaaagttgaacagctgcgtcgacagggcctaaaagttgtgtctgggttgagcaccgagctaggaaatgtcaagagagcagcaaccatggacttcgacgtgctacacggctacgtatctaagcttgaagccggtcttggaaagatcaagtcagtcctccagctcgagaagcaatgcagccaaggggtgaatttcttcgcgacgatgcgtgaatttctcaaggaagctgagcaggagatcgagcaagtgaggcacgacgagaaggcggcactcggaagagtgaaggagatcactgagtacttccacggtaacgcggtgaaggaggaggcacaccctctgaggatattcatggtggttagggacttcctctcaatgctggatcatgtttgcagggaagtcagccagcaggacaggacatttgttgggtcagcgaggtccttccgtatatcagcagcaaatgcattgccgatcctgaacatgcaagggcagaaaggaggaagagagagtagctctgacggagatagcccgtctatgtaggaagaggtcagacttcagaaagggaggcactctgcatttttggaatgaacagaaccacagcaatctttgatagaagaatactttgccaggacagatgaagcacacatgtaattttggtgagaagaattataggtgaaatccttttgtataattatggatggttcgaattcttttttgtacaaaataaataagttcttgctgagtaattttgtttaattttttcgataatggaaatcaacccagcctctacatccaggatgtttcaggccatgctgattaatttttttagggctattctctatcgtttctggtctaaaatcaaattatattttggccgtctgataaaacagtaagaaggaatcggtctatagcttctcaagttgcgcgattaaattgcaccacccactcataagttgctctatggacaacccattttgcttaaaggaaaatactcacaatattgttaaatttgtgtcaaaattatgcatccaacttcacctgatgaattctttgtagaacgaagaaagatgagaagggcaaggaaagtatcacactgatttttctcactgggaataaagagagacgaccagggaaggacaacaaaactcaaaagaaatcaatgataaaaatagctcccagcaaagcctcgtcatcatcatcatcgtaatcttctgccggcctagatcaccctcatttctctctacctttttatctgcaagcgacatctttgcgtagaggtaaagaaaaccgaagcatatatgattactgggcatgcatcgcgtacgtggatcatatctttctgcagaaaagttcagttgagtcgctcattgtctccttctcttagtatattttgctttgcattgacgcatccaaagaaccaaaaattagtcttctatgagacactttgagacacggatgggagcagggaaggaatgaagaatttgttgtggtcagattcggccatatcactgcaggccctatccgggaatcggggcagtctctctcgaggcaggctctactgaaaaagaaaagctggagattttctctgtagcttctgtaagaactttcacagtacgcttaggtgtcattcggcttgagccaaccaggtcaaagattcaactccacgtcggtctctctcgttgccccatgaagaacacggagccaagttgagcctcaggttccttgtcatgattagcatttctcgtgctaaaatagtggcatcgtggatcatgtatgcttctaagggcttgggcctagctagcaaccgacgcctagcaagtgtagtaactgcactgctatctccatgagaatcaaaaccagagtcctacgctccttactatatagctgagtgtgtttaattcacgttaaaattataagtttggttgaaattgaaacgatttaatagaaaagtaggaagtttatacgtgtagaaaagtttagatgtgataaaaaagttaaaagtttgaaaaaaaaatttagaactaaactccgctaaaatcaaaaccttctatcggcgatcgtgggcgacgattatgcacgattgtcggctcaaggaattggtgttgactgatgcgtgaatcatcagctaataacactccttccctcaccctttttctcatttgtttgaattgtttttggaactgctgtttttttatacagtgctccctgattggatgaggtgaactggttgcaagctgttccacggtgatattgctgttcacatcatgcctgcacacaggcacacagcctacagcctagtactaattagggcctatttcaaacctccgtattggagtagcatattagcaacatgtaaaacgtgtggcccgttttattgaagtagtatattagtattatgtaaaatggacggctagtatataattaattaagtattaactattattaaattaaaagatttatttgattttttaagaaaacttctatgtagaaaatatttgcacatatcatattgtttagcagtttggaaagttacattaacaaaaacaaataaggaagtaatagtttggaagttgtagtttggagttgaaatttaggactcggcattggcccctctagcttaaattctcttcacatatgaattgacagaggtgaactcctgtgggccaaaaaaattctaaacaataaccattactccctccgtttcatatcgtaagaacttttggttttacctagatttattcattgatcaatgtatgtgttttatatatgcgtctagattcattaatatcttttacggaatagctatctgtctgtcgcatgatttttatgggctgtatcatgcgttttattggccctctgatatgtttgagattcgtgcactcttttttttttctattttctttgtgggttttttagtatttttagttgtgggccttgggctttcacggttatgttggacctttttttctctttgtgggacccactgtatgttgtgtccatgagagtttatgtagggcccacttttactgttgaaattttgaaatccgcgccggagagagggtttgtctgaattacatcgtatttacactataattacatatgtaattttagtatatttacgatgtaagtctgaaaattatatatgtaattttagtatatttacgatgtaagtctgaaaactacttgagcccatttaaacccacgtgagctttagattgtccacgtggcccggttgttggtttggattttggttggatatattaatgtcatccgttagatgttcatctaaagggtaagaaatctgcatgataggaggctaaaaaatctatcacatgatgtatatatagtccctatcttttatggatctagacaatgctagaaagttttctactgtaaaacggaaaaaagtagtttataacgcttctttgagtagcggttgaatcgattggaccgacggtcaggctggcgtaacaggtcagacttattcagctagacaaaagcccgtctctcagccagtaaccggtaatggccacaaggcctataagccataaggcccggttatttgttgcacgctcttggaataagttcagtttaagtccctcatgctcacacctagtttaagttacatcctcaaaaaaccacaataccagatatacatcatacgtatctcaacttgtaaaaccagtgtgcccaagattataagccataaggcccggttatctgttgcacgctcttggaataagttcagtttaagtcccttatgctcacacgtagtttaaattacgtcctcagagaaccacaataccagatatacatcacacgtctctcaacttgtaaaaccagtatacccaagattctaggtagtatagtgtctggttttggttttggatgatgtgacgagtgagggggtgtttggatccagggactaaactttagtccctttcatatcggatgaatttggagtattaaacataaactacttataaaactaattacataaataagagctaattcgtgtgacaatttttttaagcctaattaatccataattagcgcatgtttactgtagcatcacataggctaatcatgaattaattaggctcaatagatttgtctcgcgaattagtccaaggttataaatggcttttatcaatagtctacgtttaatatttataattaatgtccaaacatccaatgtgataggactaaaaagttttatcccatttaaacagggtctgagacccacatgtgagggttatttcttctccctccaaccactcacctctctctctcaacctcctattcttctgtctccatcaccgactctgctcaagcttctcctcttcggtaacgcgcgaccgcggcctcgccgatgggcgcgagtcccttcctccgcctcggaccgccccatcgtcacccagcatccgctcccccttcttctctcgctcatcttcctttttccacgaagccgcggctttgcatcaccgccgtcctaccttgctcttctgactgatcagtcgctgccaccaccacagcaggagccaaagcccaaaagactgggaatgcaatctcggcagcagccatgctgcagcgtctccatcgcccactccatgaaatttctagctatctacctagccagacagagaaataaattccaaagaaaaagaaaaccaaacatatcaatcagagatgatgccaccaacattttactctgatcaatgtcgatccagatgatgcaccgttctccccaagattcaacgacctaggctagaatacattttgcaagcagaaatttgattggtgtggggagacaagatccgggatcaccattgtcggttgtggggagcgaagcggagctccccgcggccagaacggagccgcaatcgcgcatcatcgatctctcgccaaagtcggttctcctcccaccgagtccctttgtcaccacattctgggagctcggtaaactccgtttcacctccgcggccgcggccaatttcgagcaagacggaaatgcccaatttgatccgccgtcgggcgctctccatccaatcccctccacctggttgtcaccttgtcagtcaccttaggccggccgtcatcatcgaagctccatcccgccgctcccgccttcccgaacgaggacgccgccgcgtcgggaccgtcagcctcgcgcgcgcgtgcctcctctccactgctggtttccttgccgcacagaggacggcctcctcagcctccggcgaggccgcggccgctcggcgccgacgaggagcgtgagcagagtcggtgatggagagaaaagagaatatgagatatagagaggggagaggtcggaggaagaagaaatagcccttatatgtgggtcccactcaccacaccagctaaaaccgagatactgtacagtgtggaatctcgagtacaccggttttattggttgagggacgtgttatatctggtattgcagttaaggacgaaatccaaactccgcgtaaagatgagggacctaaaatgaacttattcccacgctctttccatcaattttctagggaataagttcatttccattcccttaactagtgattgaatctgattcgtatccgttaaccacaataccatatatcttgacccctcgattattaaaaccagtgtaatttgactcgatggttttgaaggacggtttcgctgacgcggtgcctatgtggtagtgttgacctgatccttgtcccacgtgactgttgatgtggtgcttgtggcagtagaattaaaaaagtatacgtgggaaccatttatcatgcacaaaaaaatatcgtgggacccactaacatgtaggccccacatgtcctcctctttctcttcaatccttctccctctctcccttatctcactctctccctattccccttcagccaggagtggggcgtcgcagcgcaagcagaagaacacggcagcacagggtcataaggaggaggctggagatgatgtccgcacgttgcacagcaaagatctcatgctcctcctgcaggatgcgcgcggcggagctcgagaggcggaaccagggtggtagtgcactggcccgacggactccacaaaggtggcagggaaccaccacaggaaggagatggcgcgactgtcgggagtcttgactgagcggcggagcttggagaccgtggaggcgggggtcagctacggcgagaggaggctggcgaggaacacgagcgaccagaggtcccgcgcctgggacagcactaggatgacattgaatgacgcgtccttcttccaccgcatcttcacatccacgtacgccatggatcggacaagccctacgagtggcggaaggggtcgcccctcccaccgttgtatcacgacggtcctcttgttggagaagagtagatggatagagccacggcccgcctagagaaggttcgtacctatagttatctcaccggagtcatcctcaaattggcggtggggagtggcagcggggcgagctgctgccgctccggccctcgctgcttgccgccagccaaaggggaagagaaaggggagggagagaagggaaagagagagggaggaggaagaagggaaggagagagcgaggggatgatatgtaggcccccacatgtcagtgggtcccataattttgtttttgtcaatgaaaaatgggtcccactcctacatatatgtttttaattctaataccacctaagcgtcaatgggatgaagacaaggtcaacaccatctcataggcgccacgtcagcgaaaccaccctccaaaaccgtcgcgggagtcaaattgtatatgttttaataattattaaggggtcaagatatcctgtattgcggttcacggatacaaatcaaattcgaccacaagttaagggagtcaaagtgaacttattccattttatggccctttcctcccttatggttgcgcgaatgtaccgacatagggctaggggtggtaatgggtcaaggctcactactctttcacaacccacctcaactcttaaatattttgagcacaagaaaattattaaatttcagcacaaccctttttggcccaaccatcatattttgtaggtcaagatgttaagcccattaccatcccaacatacggcacgccaccctatcagtccgtcatcatgggtggtgactgccaagcccactggacctctttcgaccccacatatgaaaattcattttcgcaatctaaatcagcgaggctaaatctagcacagtgacaaaccaacgaggctaagtccctcagctctctctctctctcagctagtccatctccatcacacctactccctccctcacacatctcctagggcagctgatccatccctctccctccagacctcttggtggcagacaaggcctgccacggcatccggtggcatcagaggcagcgacgggtctctcccccattcccgcacatcaacaccaaccacacccgtagccgatcagccttgggaggccgcgttaggacatgtacaatggtggccacaagcacttatggtctcaagttgccacataggataaggccacacaaaaaccacgatgtctacaaaggagaccactgctaagtgtatgttgtgtttcagcccctaattatttatgtgttagttcttattatatttgttattataaaattatctattttagaccttctaataaaaaaagaaatagatagatacccctaatctctatatgggcccactgtcagcccctccaatcttttctctctcatttattttctctaccttatcgtcatcctctccagccgttcgtgttcctcagtctcgtcgcctccgctttctctcaaagctgccgctcctctcccctcaacgccgcctccacctccggcctctcccccgcggcggagccccatggcggcggcgccggatttggccgccggtttcttccttctcctccctccctcttctcgcatgatcgacgtaccaccggcagcggtggatgccctcccatccccatgccgcgacggtgaggggccaccggcggcggggaggaggagttctcgacggtgagtcccatggcggtggcggtgaggaggagttctcgatggtggtggggaggaggagttcttgatggcgcgggctcgccggatctgacggagggaaccacaacagcggcggttcctctcctcctcccttcttcgggcggcggggggaagcagcggtggcggcggatctggcgactggacgaggcgacgcacgggactccggcttcgccaacgcgtggcttcgcccttcccgagcccaggcgtggcgcttcgggcggttcttctgcaagtgccgaatcggcctgtggagccacgatccccactgtgactggtgctcgcgtccgacgtcgaggtttgagaccacaagtcagggtcacgcgttgtacatggccttacaagccagcaggcttagaacgctatggtcgctgtgactgcatatgaaccctgacgatgacgatgactacgatcgagctcggggaaagcggatccgctgccagcaagctcgggagaggcgaaccctccgccggcgggcctggggaaggtagacccgacaccgatgtgctagggagaggtgtatccagacatgccacgcgattccctaggtggctaggtggggcgatggtgctcagtggtggggtgtgttggtggtggtcgatgagcgccagtgttggtgggcctcagcaattgcatgacgacaacgtccgctatggcggttgcgatggagggtgccggatatggtgaggcggtacttgggagacctctccatgcatgcggtccttggcgacttcttctcaacgacggcgacgaacggcaacatgcgtctaggtggcttcgttacttggcgatgacaacgatgatcgcggctcaatggctttgttggggagctcgcgatggccagatcctgttagttgtgctattgatggattgatctaattggagatttttgaataatctaaatttgtgagtgtgtggatttgtgaatttctgtcagtgtcaattggatttgagggctactgataaacgacatcggttgttgatttttttttagcgctaaaatgtgtttttgcatgcggacgacttaacttgaccgcctcaaaggtcttgaattgcatgtgaaatggcctggccacctaccaaaatctatttttccgcaaaaaaaccattttttaagtgctaagagcatttacaaagcaaaccatttataactactagcctcgatttgttcacctgcatttaaactactgatatgcaatggatggcactaatacaaaagtgaattttctatacgaggccccatcatttttccatgcagaccataactagtggcgtctgcaaaaatcgagggtcattttcccatacggctgcttaagtggccctcttaagagggccgcatgcaaaaatgagctcattttgcatgcggctcacttaagcgaccatatggaaaaatcgattttttcatacggaccacttaagaaagccgtatgcgaaaataaaaattgaaaaatttgaaactagtgtatctcactcatatgaactccaaattagatgatctttttcctaaatgtttctaaaatcatgctctatcatgttattgtgttgttactggtattatattggctattttttcttgtgactttgttttatcaattaaaaatttgaatttcaaaacttcaaatgatattttgaagaagtaaataatttcatctgaaaaagtcatcaataagaaaattgtataactcatcaagatctataacttctattttggacatttcttcatccgatgaagaaatttataagattgttcataaaatgtacatgtcttat

SEQ ID NO: 22572 - DNA, 616 bp, Oryza sativa
tgatcgtgatcacccaccagatggaaaaagtgcttgagattgctgatgaggtaatcttattagataaaggtaagatcttaacatcaggcacgccatatcagatctttactaaccctgagatcatgcaaacaacatcaattgcactgcctcatgtggttcaagtcattaatgacttgtcattaagaaatccgatctttaaaaaactgtatgactacgaaccaagaacagttaaagatctagcaaaagtaatcaatgaagtaatcaagaactatgaaaaacgcaattaatgggtacatattaagtaattcagttgtccataaaactaatccatcaattaaattgatcatttttattgcttttgttgtgatcattttcttaccaactggtttagtttttcagttgattgtactagcaataatctcattgatcttcatgatctctaaacttccgtttagaatctattgatcgactttaaaaacgatcattatcatgttcttgttcttgtttttaattaactggtttacctatcggaatcctggttttttaaatatctcagtctgagctaacaataaccatagttacatcttaattggtgattataatgatcattcagtgg

SEQ ID NO: 22573 - DNA, 789 bp, Oryza sativa
cacaaccccaaagcctgcaccgtcgccgccgccgccggagccaccaactgggccagtctctgctcgccggctgctcagaccgctcccagcagagggccccagcattgtgatacccagggcgccagcaatggcggtgacaaaggacaacgacgccaccgccgccaccatgtcagtgcgaacgcggggtgaagccgccggcgacgagccccggccaaagctgaagccactgcactgggacaaggtccggacgagctccgaccgcgacatggtctgggaccggctcaagtcaaattcattccagttaagataaaaatttcagaaaaaaagatctggaattcttatgctgttcattacatttttcaatttgttgattgctgatatgaacatgttgcaggttggatgaggatatgatcgaggtgctattcatgaacaattcgacagccgtggcgcctaggatggacaacccgaagaaagtcggcatgccgcaatttaagcaagaggagagagttcttgaccccaagaaggcacagaacattgccatcctgcttcgcgcgctgaatgtcactctcgaggaggttacggatgcgcttttagatggtaagcaataattgtttggcctctgtttactactctctccgtccgaattttaactttttgcttttaatgtttgaccacttgttttatttaaaaaatttgtacaaatataaaaaacgaaatgttatgcttaaaatattttgaataataaagtaagtcacaaataaaataaataataattctaaaattttttga

SEQ ID NO: 22574 - DNA, 697 bp, Oryza sativa
tagtcgtaactcgaccactttaagtaaaaatagtggaagaaacgctacatcactagtcgaggacaatgcagtagtcgtaactcgaccacttgaagtgaaagtagcgaagaaacgctacatcgctggtcgaggactaggcagtagtcataactcgaccacttaaagtggaagttgtgggagaaacactacatcgctggtcgaggaccaggcagtagtcgtaactcgaccacttaaagtgaggcgagagagatcactacgtcttcctggttcgagaaccaggagtaggagtctcttaatcacttatgggggcgctaaagttggtttattacatgtgcatatcatgtggccagcatgactcacatacccaacttatagcatatccggatgtcctcttgcaatcatgttgggtgatcaagccgacggtgttcgtgaggagttatccgttaacaaccttttctcgagtagtccagcgatggctggtgctatgagataggtcgtcggtcttctttggtaggttgggcgtgacgactctgcatttgtcgagatcgttctcgataatgcggtgtactcgaccatgacctactcgagtgctcaattgttcctgaaaaatattttctagaaggcaagatatatagcaaataatgtcgagtatgtactcaaaaaactgcatggatgttctagtattattaggatataa

SEQ ID NO: 22575 - DNA, 599 bp, Oryza sativa
atgctcaccttgcaataatcaatcaacctcagttgaagaaaaaggatccagaaggagaagacgtttggcttataccccagttgagctgcctgtgggagtggagccggagcttcgctagattttattttccgctgcaattttcttcttggtgaggactaagtgcctcttaagtaagtatttatcgttttagttaatttgatgaatctgtatattaaattgtcagtttgtgtacctcgactgattcctggacgaggattttatgcacaaataagttcggaaattactagtgaatttccgggcgtgacattgttctagccaagagtcaagtgcattgcttccatttgtagagctagtgtggcacttgatcatctccacgccgggtcatcgcttgttactcttggaggttgccgcctcctagacggcttgtgaaggagttgcccggtgacctcttgtcgcacccggaaaaatacattttccagaacgctagtgtattaatccccgtcccaggaaaagccggggtacaccacacaaacaggatacaaaaggcacatctttattatatcgataaatttacattattacaaagtcacttcagccct

SEQ ID NO: 22576 - DNA, 817 bp, Oryza sativa
tgcaccaagcgggcaagcggccaacatgcatgatgcatgcactagtgagcagcctagcatgcatatgctagggtttgattgcatatcggtacgtgcacccgagacatactaccaggagatgaatacgtgcttccatcaagcacgctaatcacggtaattagtaagattggtttctaaactaatttactaattcatagatacatccgggcatgcgtctattaaggtatgcggtgtttttataaattgattatattttctcgtttttcatcatattatggatgctttgcttgcagtagatttgattatgctcttgatctagcggtagattaatttcctgcttttgatctatatgcatctattttatctgatgaaaactgaagaaacccgtgtgagagaaatcattaaaattgatgggataccctggactggagacgtgccaaattcggctgggccgaaccaaccgtctcgcccaccctccctcgcatctatctgtttctctctttctctgatgacgccacgccggaaacacggcgacatattctcagtctgtgcagtcggacttggagacatgttggccattgttcgctgtcgctgttgggtacgccatcggccttgcgtcgatgccgtcgcgggaaacagccgtctcagaaaaagccctaaacccatgtcgttggtgccgctggagttaatgctgaagtgaggcgccgccgacgttgacctcccatcgacgcttgcgtcgagccgtggtgggaagatgatgggtcattggttgcctactatccgattaatctccggcgagacgatatgccggatgcaa

SEQ ID NO: 22577 - DNA, 828 bp, Oryza sativa
cattgttaactcagtctggcccaaacttgtgtttacccgaccatgtgttgttacaacattttcgatacgggttagacaaggagtctgctacaaatctcgatattttcgctggaggatcgttcgcacacaagacaactgccgaaggaaaagaactcttagatctgatcttagagaacgattctttcggccaaagcgaagcatgcccggagatcgagattatccatgagtatcctctgcacgtggagtcggaacccgactcaactgtcgaatcctcattccagtcgctggagccggaggaagaagaaattcatcctccgaaaattccattccaattcaggggtgatctttatgaaaattatgagaacaccctgaattattccagcgaaaagaaggctcatcccaagcatgagccgttcgagaaggtgatgtttgtatcttcgttcgtttcttctgaatctatttcccatcttcatgaaactgaacgtccctcatcaccctcgatcaagcctaagccttgtccctctggccctcataatgatgttctcgtttatcatcatgaaacaacccaattcttgcacgatgtatctcttgagaaggaaaacccttaggccacggacaagcttgagacattgactctggaggacgagagaaaacattccacatatgagcatgaaagtttctctttcaaaaccccccaggattcatgctcacataaggaatccccagagtcctgttctgtggtcgtaagaaataccaacaaagtcttcatactcggctaactcctggagatactcctcggcggttgggacgatgtcttcatcttcatac

SEQ ID NO: 22578 - DNA, 8297 bp, Oryza sativa
tagaatactcaagctttgatatcattgttgacgcaaaaaacacacactggcctgagagatttgctttactctagtgtagatccaaagattcgctttcgggttcagagcgtgccagttggtttgatcctgcaactaataagaaacagagaatccaaagttaaatccataaacgataaccgatcggctagattgctgatgatgtatcgtctaaatcaagccgatgcaatctgatctagatcatcaatggagtatataacgaataaaggactaaatttaatttatcggctatagatatcaataatatataatctatacttcaaaatatatttaaaccaagtgattgggatagatcggattgctcccgagacagtataaattacttatgtctaaaagtacccccaaagtaaagattatataagctcatgtcatagcaagtagttaaatctagcgtgtatcggctattgctctgatacttctttatactaattaagatatcattgtggattaaatatattaaacaataatcaatctattgttagtttaatctaagcagattgatatcaatcttaacatattttaccttattgagatcttgatataaagggcaaatttagcataccaagtagataaattaagaacgagatagctaaaccaggtaagatcagctgaaactctgatactatctctattgattatcatgaagcaagctagagattatggatctagatgttacttaataggtcaaactcaactgatgcggcattaagcataaggagaaacataatatctaataaacatgccaatgaaaacctttttgagatggtagatatgctatacaatctaactcgacgaacttatataattctatcgggtgatctcgatgttgaaaactagctgacaaaaccagataagaatattggcctagattatataacatatgtgataactcgatgatttatgtaaacaagattagggtgtcataaagatgtaagcactaatcctgagaacgcaagccgccataacaagttttatcttttctgtcggagatcgcaaccgatgcagcctaactcgaaagcaagaacttgtcgaaacaatgaaactagaaaaaagatggcgatacactgaaagtgttattgaactgattttaattgtttacaaggtatcgggtcatatttatatccaaaatacataatatgtccttatcgaacacgactccacttctattacaactctaaaatacgaacaagtcccttaggcggactcttaccaaaaatatctataaggaaactactagaatatcctaattaatagatacaattgccttcctcggactccatccacaattggcaatacttatgcaccaccttaatcgatcctgacaatgattctagaataatcttgccaaaatcggctacatcggtttctccctatctgatttggtatcagctgatgcaaacggtagctgacgcgcattctgtttctgagaataacaaacttcttccaaatctgcttcggctttgactccaaatccaatctataatttaccaaatttcgttgttaataatcatctgtaacacccattgttcaaatccgcaataattcactaaattgactattttcgcataacaatatcctatttctactttcctcctcacattatataaaagggttaacccgaaggtactatggttgaagctaaccaggtgtaaaagctggcccaaatctatctaaattatccaggtgtaaaccggagcaagtacacgcatacgggctgaactaggctatgtacgtgttggggtattacagtttttcctctatgacatagttgttacagatagttagaaatgttttctatggagagaaaaaattttagtagtgtattgtggagagactcttcattaaaaatagtgcaagctaacatgggtgtctgctgcaagagaactggtgatagtggcgctagccaagaggctgtcccaaggaaataactggcaaaattcgctacagaatactcaaaatttgtgtaatttgtttgtacaaattgtaaaaacgtgtcacaactaaaatatacttaaaaaactgataatttgttggaggacactttcagcttaattggagaaagaaattcttcaaaaaaaaagaatacccttagggtcaaaagcttttaagatgagactggagtgaaaatgaaatatgatgtacgctagtgatgtactttgggtgatggcaaatttagagttgtataacttctcaattttattttaatatatcatatttgaagcatgtggttctaagggcattctcgtcttttttaaaaatgtatctctccaattgagccaaagtgtcatttagcaaattatcagttttttaggatgtctttcagtcgtgacatatgttttcaatgtttatcagtaaattacacaaaatttaggtgtcttgcagcaaaataagtaagagaacaggaggttagtaggatggcgagttggtttcactgtaattttcatttgtcggagaattaaactgcatgaatatgtgtaccatgtaggataaaacaacttccaaatatagttttagaaggagtaaaatgcacaacatgtccttaaactcgttcaaccgtgtcattcaatagtgttattcccgtccaaaattgccctgactcggaacctcggtatagtagtccgtgacctggaacctccgtcgttgacagtgatgtgcttaaaaccaaagaaaccctttctgcatgggtagctgtgtacccttatgtatagtgcgtcccacgcaggcgtggtagggtgatgaaatgaaaaagttccccatttgactgtgtcaaaagaaataaaaaggtgtgggcatatatatatatatatatctgcactaaagaacacataaactgctggtggttcacagcagaagcaacggtgtacatcttgggcacacggtttaacgagaggatcaatgcgcacatatcttacttttggagtgttcaaatgattcacccatatttgtttatttttgtttcctcaactcaaatgatctgcatgcaagcgtgcatcatgatcaggttttatttttctccggaagaagtaagaatttttatccaacattttgttttaaattaatgccgacactttggtagttgggatacaattctttttagctcgggattactatatcacatacttcctccgtcccaaaaaaaaatcaacataaagggtagtccaaattcattgtcctagaaggggtcacgtcccctcctagattaaattttttttggaacagagggagtatatttttatagattattaagaactcgcctccgtgagaggtcttatttttatatttctaaaagatgccacatgataagaaataaagaaaattgatgattggaataacttacgcaatacattgttttacttttactgtttcataagcaataaatacaagagacaagcatgtatcttttcaaataaaaagagagacaagcatgtatgtttacaaacaaacagtacgttgtctttgaattgtgactgagatgaactccccttcatcactgttgctcctcagacgttatcggttcagatgagaactacatagaaactctgcattgatctatttatatgaagcaaacatatattacaaatgttagcgtaggatcgaacataataatcaaacctaccagagaggaaacctgtcagagaagggtgaattgtagggaacactaaaaatcaaaatctttagcggaataaaataaatcctagacaaagttgcaatatgactgttgtagttgctccggtgtaacctcctggatgtcctgcgatctgaccgccttgacgttaccagtccaaccgcctgcgtgccaccagtctgaccatcgagaactagaaaacactactgaaaagagctacaaagtagatcaactttattccatcaagacgtgtttacaaagtacatctaaagcactcctatctaaatttacaaattacaatctaaacataaaagcaaaccctaacttttctcttttagaaaatcgatgaactttgagtctcagccctttttctatttattcccaaaatatgactgcccacagccatgaatttaactagaactaggaatcctaatcacatagataatccacacatatccctttataactccaaattaacttcaatcctccgaaagttggacttcaatctatgcatgcaattccctttgtgtgccatatagaagcttcacttccacgtgcattgttctttagcctttatatcttgtgtgatcttcttaccgtctagacctcaatttttccaaagtctaatcccaatccatcactgacaatattcccaaggcctcaagcaacacctatacacatgaacaaccaagaaaccgtatctgagtataagttcttactcaacttgacgcacattagcacacaatagtataatatacatatagaaataatttagaagttataaacatcaacaatcaacatagtctataaaaaaaacaagctaaaatcggctccaaactacacttagggcccctttgaaaagcaggataggaaaaatataggaataggaaaaatgtagaaattgaagttgtatgtttttccaatcctacaggaattgaaaacacagaaaatggagagaagagccctttaattacaccacaggatacactcaacaaaagaaagtttcttaagaggtctaaccttttgcttattttcctatggaattgatcataggaatgcaatcctatggaagtttttctatcctctttctatgaatcaaagggctctatagaaaaaaaaattcttagaaaaatgaatcctctaaaattcctttggtaatcctccatttcaaaggggcccttaactagtctaaccaccggactgctcgaacaccttcatttagatcgcaattacccggtccggtgtgaccacacatacacataacgtctaaccggccttactagttaccatgcgatttgaccgcctgcaccctgacacttctccaatttcattaccacttcataaatattaacataatcactttttttacctttgagagttatttattaccaagactaaattatcacatgattttcatgattttaaagtaggatgctgtatgccattactgaagttaacaacctgacatcctcattaattgttatagtggagaatcctctattttagttctatagaggccatagcaatccatacgcacaccgctaggtggtatgaagtgatgcaagcaaggcatatatgttacgtagcaccaggtcaatcatcatgcgctagttaggacgagtgccgtgcacaaaacgatgaaacatgcatgcattcggactatatattagctagcatatagcatattattgatgcaggatagtttcatgtgtagtggcccaataaatatcgcaacatatatctcatactccctccgtccaaaaaaaataaatatcgcaacatatatctcatactccctccgtccaaaaaaaaaagcaaactctgagtttccgtgtccaactttaactgtctgtcttatatgaaatttttttataatttatatttttattgttgttagataataaagcatgattaatattttatgtgtgacttgtctttttaattttttttataattttttcaagtaagacggacgatcaaatgacatataaagcagggttcgtcttttttattttatttttttttttttgacggagggagtacgagatagtggcgccacgtacatgcagagatcattattccaacacagcaatgcacatttcactccgatccccaatccaatccaatcccatcacagcctatattctataaatcgccagcatgacatatatagcacacacatgcgtagtcatcatccggtttttgcagcgaagagcaaactgtgtgcagttattatagaagcctcatgaatgagtcatagtccatacgaccaagttaatcggcaagaattttgaaaaaagggttaaaagtccacttagagcaagttcgatagtatagagccaactactaattctaaatcatttataaacaatctaatagtttatttatacaatagttacttataagcatatactacaccgttaatatatggtcacacctctcgtacacacagaatatattggagtctatgttgcagctggctacaaatctgtacgttttgcttctctctctttcatatgtacaaatagggtgtgttcggatatccttttcccaacccctcttcctcgttttccacgcgcacgcttttcaaactgctaaacggtgcgttttttgtaaaaaaatttctatacgaaagttgcttaaaaaaatcaaattaatccttttttgaaaaaaaatctagctaatacttaattaatcacacactaatagatcgctctattttccgtgctcactgtgctagcctgctattgtacttgatcttactctcccaaaacttgcgcgatcgatcagcaatccatcagcacactggcgtattatcaataggttatttgacacccctaggccatgcattcttaatgacaaggtatttaattaattattgaaatagctcgtacaatacattgtttaatttttgttattcactacatagaaacgatttttacagacacacttctattttatcataggcaagctaactgtctgtacctaaaaagatttaggtgttgttcggttaaggcccgcctcttaagaagcatgtttgtaaaaataggctattttcacaaacgggtcttttaagaggttagcttgcaaaaatccattcattcctccgcctatagttcgcgcaacggccgcccctccactcattatttcctccagtccacatgtgcatcctcccggctgcctcccctttttaatttatctcctttgtctcccactgccccccatgacttttctctcttctttctgacccacttctctgatcttccacttcccccttctcatctgtcatctcccccaccctcctctctctcccatggcagcagcggccttggactaatcagatctgccgccagcgcctacagcagcagcggatccgcccaatctagggacggcaggagcgatggtggtgaccacagtagcggcggccttagactggccagatttgtcacctgcacccatgagagcggcagatccctccagtccagggatggcgggagcagcggtggcggcatacgggcttaggggtagcggcatgctcgggaagagcggatctgccacctgcgggctctggagtgatgacgatgatgacctcgtcgagggctgcaatgacggagccaacaagctgcccgctgctagctgcgacaatgacgggctgcggcggtgatgatggccactagggttagggtttctacatttgtttttttatttctattttaaaagttcgtatttgggcatcgtaagttgaccgcttacaaaaattgtgtatttgcaagcaacctccttaggaggtctacctgtgaaaatcaattttcgcgtgtggttggaacacctgcatgctaaaatcacgatcttcgcaattacctcgagagaggcggtttacttgttcaactgcaaaaaccacttttgatcgtctgaaaagatgttttctgtagtagtgatttcataggcaacacaaacaagagacgagctatgttagaaacatgtgtagatatagtttcatcttgatgaaacttattttatctctcacttcattaattcattaccacatcataaaaatgcttacatcatattctatttaacgagaatgaaatttctatcgggagcggcctaaccgtatccagatagaccttaaatattgaagggtggctttacctacgtggcaggtacgttgactgaacagtttttcacatcacaagttgatcactggaccataagtgtttctttggggaaagaaagtaaaatgctttcattaattaggccctaatataatatatcagctggcatgggcttgtacacgtcatcatactatctcttcacaacctgtagttgagactaacgaaatgtcatcaacccaccaaaacatttaatttatcgttccttccttccatttcatacaaccttaagtagcaaaattccctcttaattatcttgcgctaacagtcggtgttaaacttaacatgacatttctctatcgtcacgtcgttctctcttgtcaacatcagcagattgatttagttgacagtttttatgggatagctattaattcctgttgtgcatgccagatgggctaggcagaggatagggctactgcaggttccctagttgtacgaaagtc

SEQ ID NO: 22579 - DNA, 7586 bp, Oryza sativa
tacccatacatacaactgatgtatacgactttcgtataactagtgcttaactgctgcttgctctggcccacatggagagaaactggcttggcttgtatgaagtgaattgattggcaaatgaggcagggtctgttgtatgctggagtcggacgatgtatagcggtactcacaaataaactagttaatagtacagttcaagctatatatgttggatttactacccgatcaaagttcagaggctttttatacaggcattctccgaagcacatgaaagaatacatacatacccatttgcatctcttcttgaatcctgatcaacttaattaattatacacaatatagcttagctacatgtagttaagctagatcgaaatatactccatctgtcttaaaatatagcaacttaaaattaaatgacatatacgttctagctagtttcacaaatctgaacagatatgatatatttcatacatccgattttaaaattgctatattttaaaacgaagggagaaatctacgcccggtggccgatccctgggctgggtaccgacccctgcggcatccagccgctgctgtccgggcggatgatctcggtcgccggcggcgacggtggcaatggcggcgctacaccttgcagcaaatcatgaggtgaagtagcttccttagaagaagcactagtctccttgccattcacagcatgatcacctggcatcatcatcatcctagctcgtgcaaggcaagaagatgacgatgccaacaagaggagagcagtgaagaagatcaccattgccgccatgtgtggagctggagccatattgcaaattgcaatgcaaatgtgggattaattatatatagggcggtgtgcagtttgtgagtttgtatgcgatcggcttatcttgtgagaatatgtgatcaacaactagctgatagaggcgtatttataggagaggagtgggagatttttcagaatgtggtgacaagaaatagtgagcaagtggatcaagtgtgtggtttttgtggtggtgcattggtggttaatgggttgacgtctgaattggtagggtatgtttgtattaattcgatgtttttttcgatggtatttatagtaaaatcaatctaagcagtttaacttttctattctaatggatcatatctatttatactactgccataaatactgataatagaattatttttcctactgataactagtataacttataaatcaacggttaaaatcaaacctactagctagtaataaagagatgaccataaagagtattcatacgatcgagtatggtcttgttttcaagcttttgttagcttcttaattgcttaatttcattatagaaaaaaaatatcgatcatttttttcatgaattgatgaacacacatgcatgagcgaaattgagttagtcaaagtcaatattgtgtaataacttttctttaaactaaagtttcaaaagaacatgattttcattccatgatttaaatgtaatagattttattaagtatgagtttattaacaaatagctagctagggtggaaaaattcatggttatattctttctctttagttttcaatttattgcaaaaaaaaaagctaaaattgatatatgaaagcttgattcttcaattaattacgtgtctttcaggtgcctcacgtttctttcagttccgtcacatccactacttttgatgcatttttttttgttccactaaaccgaaagcaatcgaataccagtttgacagatagacgaaggaatagaatttggcgtgcgtgcactcctataggtagctcagtagctggtacttttttggtccttttaaacatggtattgtaaataattaaaaccattgcatactcggattagtgcattatgtgtaaagctgtttatcctgatgcaaagaaaagcatgttgacacactccatacttttaacagattgttgattatagataagttatcctgcttggtactgatgattcttgtggtttcgtcaactcaaaaggatgagtattttggtaaatgccaccacaaaagaagcatatggctcagaaatcccatcgtaaaggtaagatcttttgcagcaagtcgtgaatatgaaaaaaaaaaaaggttgccaaatacactgtaggagaaacaatctctttagtaccggttatagcaatcgagaccaatatgcatactaagtcaaacaaagaatatgtggaatgtgggattcgaactcaaaatctctcacctcaatactcacgcgcgctactattacacctactacacatatctacttggatcaaaatgctttctttttaaactaatcctatagatatctttagtatctgatactaaaaatatttttaatacaaattagtgttatcaacttatactaaaatgcatcttcagtaccggttggtaacattaacgggactaaaaatcctccagcatcagtctcacttggtgttaccaactgctactaaagatgtatttttagtattagttgctaacaccaaatgagacaaaaaatttctagggacttagacttttagaaccggtatatttgtgtttttttaatcgagccggcatatttgtgtttttgggcttagtataaaaaatcgtttctgtagtagcgatggtatgttgatatgcatatattctggtgggagaaaaactcaaaaacacagttgtgtcctcgttcctccacccaattaggtatcaactaacaccaaaatatgtgtttcggctctttagaaattaaatccatatattttggaatggtgggaatatatagctaaggcttttttttaaaaaaaaaaccttgtatcgcattgctggaaggaattgacttaaattgttgcatcgatcgaattgatgggtaatatgtactcctttgatttgatttttaacagtaaataagatggagtttcctcagtgcttaatgtaggattgaatcacaataactaagccaaccagagaggggtgaatgattggtatacccaaaaccgaaaacttttagtggaaataaaagttaccctcaaattcgacggatcgcggtctgaccgaaggtattgcaccggtctaaccacctggaacacgtcggtctgaccgagcttaaactccggtcaaaccgccaagatcgcctgccgctccctgtcgccgtcgctggtctgaccgccgtgtgcccgccagtctgaccgccgcgatgccgccggtctgaccgccgatgcgtcgccggctagaccgtcgaaacccagtgaaacacaaatcaaagaactcttaaagtagatgacgactttattgattatctctgtgtttacaaagtgcactaacagcactccttataaaaatctcgactaaactcgaaaccctaactcaactatcaactcaattgctatcaaaagcgataccgggaagcctcacgctccccctctatttatacccgagataggcagcctaaagccacgaaccaaactcatactagaagtcctaaataccttaggaaaccctctagtacaagaaacaaactttacacaaccaatcataccaaatttggactccttacaaattcgactccgcatcccatacgtacacaatacctccatcgtatgccatatggaatcttcaccaactacgtgtattgaactctagccttagtatcccgcatgatctctgaccaccacggatgtcgtcttatccccaagccgactcccggtccatcaccgcaaatactctcctgaggcatcgagtcacctacacatgaaataaacaaagaaaccatattccgagaccaagctatctccaacttaactcattcttagcaaacaacagtattacatacgcatagtatccatcttgaagccataatcatgaaacaatcacggatatccaaacaaacaacccaaaaccgaaaccgatacagagtcggccggtcagaccgcgggctgcgccggtctgaccacacgatacacgccggtctgaccggcagcacatgcccggtctgaccggatccaatccagcagtacctgtagattcacctgtgaaatccaatcatctccaaaaccactttgtgaataaaatctaaatatcaaaaccaataatctccgatgccaattgttcatcacaaaataataatcaaaaacacttttgattttacttaacagtaaatgagatagagtggttttgtgccaacatctaaatacacagcaaagcttaggcatgtacaacagttgatcgagatgtttgcagagtaaatagtactactaaacacaataacgaaacaagtggtcagccgcttatatcgcccccccccccccccccaaaaaaaaaagtcggtacaacctacacttatatatttctttgaaaatttcagataaaaaatatttatggtggaaaaatgtatgcttgagccatgtctcactgaagaaacgactacttccacctcaattagtcaattactttttcaccatcgcctccaacatctcagcgaactaaggctgtgttctttttagctactccctccaggttgataattcttgtcattttgaataaggacatggtctttaaaaaaacaactttgaccattattttttaatatgtatataaatgttaacaaatatatgattttattaaaatattttttaagactaatctataccacaatatttcaaagataaatattttagaaattattcataaccaaagatttaaatgtttgacctcacccttatccaaaacaataagtattatcagcctgaagagagtattgcaacttagctactcctcgatttcctagcacgcttttcaaacttttagcattgcattttacataaaactttttatatataagttgtttaaaaaaatctaataaatttattcatcaaaattttatatattaagtattattcatatgctaatcacatttcttgttttacatgtggctaattagccgttttaagcatccgaaaagaacgcagcataagatgtcaatgtagtcgactttgtatgtatacccgtaattacataagtacgtaataataatactttaatagtctgctgcagattttaaccatattcttaacaataacactccctctgacaagaaaatacaattacagtactcaatagataaattaacagggaaaggaaataacctagctaaatgccccttagtaaaggaattaatggtggtgcgggagaggatggttcatgccaggagagatgctaggaggaaaagtagtactttgcaatttgcattctttttaagttaaaacttttcactacgtgtctgaatatacccttatccaatatataaagccggtagttaattagtatattttgggacaaaggtagctaccttcatcctaaaatatactaacaatctagtattggataatatatcccagcattatgaatttgaataagcatatctagattcgtacttcactctaatttaggttgttgtgttttgagatgaagtagtagttttagctcttgctcagggaaagagctctttgactagactaaggcaaaattgaatatagttgtaagttgtgcaaatggaaatgcatcctccgactttagggcaacaaaggaagagtgggacagtaatttgtattgagtttgacgctacagtaattcacagcagcagcattataaaagtatcattattatcacagtacatcatggtactgtagcaaatcgatcgatctcctccattcaaatgcaaatcggacggctgtaagcgtcccaaattcacaattactatgtatatatatgctcctggattgttgacatcttagcccttttagaaagcatattttgtaaatagatcctcaaaaaagttactgcgtatagggactcatcattggtgtcgagattgaacatcttggcacaaattaatctggcacatgcatgccgaaaagtctatttgacaccaaccctcggtcggtcacctatgaaacaacttctttcccctcccacccctccctgaatcctatagatttcctataaaattttggaaaacccgagaaatggaaatgtactatacataactcattttcgctaatttatttttatttatgaaaaaaattgagtccagaggatgtgggtccctccctcctccaccaccccctaaaccctattaatccactgtcaattttttgggaaaaagttttgacaaatcaatgtattaccattcattttccctaatttgtttttatttaattagtaataagacttgatggaatctaggatgatgagtgggaagtcgggtgactgggtgagggatcgcactaacaagatttgtacttgagatgtcgtgtaatttacctcgaggccaaggactctggcactcagtttcggttcattttcataataagtttttttaagggcctatatgtgaaatatgttttttgaaaagggctacatagaaaaaaatatatccagatatatgctcctctgactttaccatgaaaagtcagatgatcaaatcctttgcaaaatgcaaatgcttgtacataatgcactttgagttaggtcaccatactcgatcatatgcatgcatgcatgtaccctgtatttcgttttacaatagaagaccagcattgacttctgttgcaacttgcaagttataaaacgtgtacttagtggatactatcatatgtaccttgaaaaccttatgcttcagaacatatagctttttttttttgcgaggaatgcatggttcagaacatataggtagaattgtaagttgtcttgcatttttattttcctacaaaattagatcgaagtggcattttttcggggcaatcagaagcaagttaattggatgccctgtcatttctagaacactaacaaacaaatctgacaagactacttcccaatgaagaggtagcatgatgcaaattcagcatattttccagggaaatgttccaactcatcacaagtcaaatctgcaaaagggaactattggggatagctctagctttctgtgatacaatcatccaattaatattctcccttttgactcctggctaggtagtgtgctctccactttggtagacctcgcctgttcatctgacacgcatattatttgtgcacaattgatcttacattttaactacctttttctccacctgtgatttgctagttaatggcctagcttattgtcataaagtgcaatatatatactacatatgttcttttataatatcacaagttcacagcatgtatatatactaatataaaagatagtagtggttgtggtgaatcaccaccacccaagtatcatgcatgcaggacccacgaactatgagttacttgtctcttaacccccacatgccatagatcccgtcgaaagaaaaacataatataatattaatgataatatattagataattagagaaaaaaaccgttgcaacgcacaggcattatgctagtagatgaaaagagagcatgcatgcatgaatctgccgtccaagccccatccgttgtctttacaaaaaatattgtggtcaatgcgttttgacatgaaattacgtggaaagcagatgtgcaaatggccgatcgatctcaattggttgctgtggaa

SEQ ID NO: 22580 - DNA, 6150 bp, Oryza sativa
tcatctattaaaaaatggaggtagtattaatcaagataccaaatcacatacttatgcatatatatgcaaaggatgacagaagcaaagtgtcctagggttagggcaagttgccttttgaacaaagttttgcttacgtacggctgcaagatagcattaattttgcactcatcgatccatgacgagttgttaactacactaaatgaaaatgactttggtacacagctagtacgtttgtagtctaagtacgtactgatggcagtggtaccaaaaatgggaacccctggttttgatggtgctctgcggaaatccattagctgatcctcgcaccaatctctctctgcaatgaaattcttttgttggttgatcccctgcacacctcactttgcacaactattctccattctgctaccacatgaccagatcgaacaattcatcacgaaacaggcatgtatttagttgtgccgtgatgaggaaaaaatgacacaattaggcagagttggattcaacactttcccaacttctactccctcatttttcacgcgcacacttcccgaattgttaaaagttgctttacaaaaatcatattaatttttttaactaatacttaattattcctgtatgctaataaatcgctctattttacatattaggctgtgttagttcggtttgagtggttggaaacaaatctcctacgcacggaaaacggagcggtctattagcgcgtgattaaataagtattagcaaattttttttcaagaatgaatcattataattttttaagcaactttcgtatagaagagttgggaagaggtaacaacgaacacaaccttagttcccaaccacaccttaatcgtacacagccttaaaatggaacaggacgagagagacgaagaaacaataataatatcccagagtaaattagggaagcaacatcgggataaaagggataagaattcacaagaaacacgcaagttgaggaaatggatatgtatgttgtcctttcctctgtacggatcactctcccttctccacccaaaccaaattaaagttatgtcaactttgacggcatacatgtaggcaacagcacatgcgagcatcacccatctgtactatacaaaagaaggcaattcaattcaattaataagcaccatgatgataggtatatacatcttctatcactaggcaaatgatcaactccatattattccgtcgtcactcaccgtcattgtctctattattacctatcaaccgatctagattgttaaaattacatcattttgggaaggaaaacaaaagcattgtacgtagtataactaaacataactatagggcacttatgtaggtccttttgtagcacgtgtaggacgacactaattaagcatgcatatatatatggtcaaacaataccaccgtgcaaagttacagaaaaaagaacatgaaaagaagtttaacctatctctatctctctaaatatatgtactctctccgtttgatattataaatcattgtgaattttcatttaaacttcttggatatttgaccaagtttttataaaatatagtactacctctgttacagattataagtcattttaactttggtcaaagtcaaactacttaaaatgtgaccaagtttgtagataaatatagtaaaatttataacaccaaattagtttcattgatatatttttatagtatatttatattatgttgaatatgttactattttttttaacaaatatatggtccaacttagaaccgtttgtctttgaccaaagtcaaaacgacgtataatctaaactgatggagtgcactaaattagtttcattacatctaacattgaacatatttagtagtttctttattttgtattaaaaatattgttttaattttctataaatttggtcaaacataaagaaatttgacttagaaaaaaaagtcaaaacaatttataatatgaaatagatgtagtactgtgactcataagaaattcccacgagaaaaaaatgaataaattaaatatagcaaggattgttgaattgtaacggttcattaaaagatcgaaaagttctggtatatatataacttggtaactgtcaaactttattcttcgaaaaaatgaataaattttctggccaccaattatggtaagaacaaagattaatgaaccacataaaaattgagtgaatagtatcatatactcggcaattattaatttatacagtttataaattaataaaatacaaaaatgagactcaatttagccttatgtattagttcaaaatttcagaattacttactagatgaaacacatcacattgttgcaggaaagttgtatggcaacaaataaaatggggggcgtagtggatttgctttgtagcttagggcctgtttagattccctggcaaaattttccaccctgtcacatcgaatgtttgggcacatgcatagagtattaaatataaacgaatttttaagcctaattgctacatgatttgacaatgtggtggtacagtgaacatttgctaatgatggattaattaggcttaataaattcatctcgcagtttacaagcggaatctgtaattgattttgttattagtctacgtttaatacttcaaatatgtgtctgtatatctgatgtgacacgctaaaacttttcacccctgatctaaacacagccttacaatatccatacaaatattaagataatataggtttgtaggagaagagaaaccacacatagatcaatcacccaaagtctaaaaaaacaattaggtgtgatatggtaaaaagggataaatccattttactctcctcaattcttcactttgcctaaattttaaaacacaaccccaaatttcaaaaccggcggcagctgcgtggggaaggggaagtgcttgtgtgaatccgggcaggcggcggaattgttagcttggaaactaaactaatggccgtaaattaggtctgtgcaggagattatctttcctttgggccactaggcccatgggccaagaatgtacgcactacatctgcctacgcctccatcaggtatacgggctgcggcccatgaacaagaactgtaagtaaacctggtaacactttaacagtagctattatctttttttttccctgaagcttctcattcatttatgtccatttaatcgctaatcgaggcatggggcatttgggtcacagcaaaaaaaaaaaaaagcaaaacggtggaaaaatttggaaataaaaaagaaaatggtcgaaatgacatttgtagcaagatgttttgtttaaaagtggcattctaaccaagccacattccagagatgccaaaatgtcaattttcttgtgtttgagggaagcataaaggaaacgaaaaactcatctttttcgtgttcacatttccccaactattaagcggtgtgtgtttttttaaaaaaaattatttaaaaagatattttagaaaaatcatattaatcatttttgagtttaaaataactaatcatcaattaatcctatgctaacgtcttacgtatcttatctctcgtttcttctctggtcaaacacacatctaatcatacactgtactacctctatcagaaaatactcgtcattttagctagtttagcctatagtattaaggccgtgtttagttttaaacttttttttttcaaactttcaacttttacatcacatcaaaactttttacacacgtaaacttccaactttttcatcacatcattccaattcaaccaaactccaattttagcgtcaactaaaacacaccctaaggttttaaataaaaagactataatccctactaaatatggttgagggtggattgatactttgaggtataaaatagcttgaagtgataagtttttatgataaattttgaattctaaaatgatacttcacctaggcctaggttgttttttcgtgtgccaaaatttaagtatacggaaacacatttgaaatattaaacatagactaataacaaaacaaattatagattccgcctgtagactacgagacgaatctattaagcctaattaatccatcattaacaaatgtttactgtagcactacattgtcaaatcatggcgtaattaggctcaaaagattcgtctcgcgatttacatgcaaactgtgcaattggttttttcatccacatttaatgctccatgcatgtgtccaaacatttgatgtgacgggagaagttggaagtttgaagaaaaaattttgaatccgtgtttagggtgtgtttagttcacgccaaaattgaaagtttgattgaaattagaacgatgtgacgaaaaagttggaaatttgtgtgtgtacgaaagttttgatgtgatggaaaagttggaaattggaagaaaaagtttgaaactaaaccaggccttagttccacactaaaattgtaagtttgaagaaattgtaacgatgtgacggaaaagttaaaagtttaaagaaaaaaaagttgaaatctataacaaggcctaactacatcatggacgagggagtatgtttggctgttgaaccattaattacaaaccaccgctccaaggcgccaaacccattgaagttgtagcaaaatgcaagcccagctggcgccttggcagcatgagcttccaacctacccgaccgttgcgttgccctcccaaaaccaaaccaaatcaaatcacattcacaccattccacttcccccctttctccctcccgaccgttgcaaattcctccctccactaaaacccaaatcccccacttcccccaccaccgcgcctttccgccatggtgtcgaggacgcccacgaagcagccgctgtccccgctgccgagggcggccagcggcagccccaccaagccgacgccctcgccctcgccctcgccggcctccgccaggcgccgccgcgtgctccgccgcgggagccccgggaggatcaagtcgctcgccgcaacgttcgacacctccctccgcggctgccgccgccgcctcctcaagctcttcgcccgcctcgccgtcctcggctcccccaccaagcgccgcgccgccgccgccggcttccgccgcctccgctccccgccgcggtcgccgtctcctccaacgcccaagccgaatcaggtagcggccgtctcgccgcagctcccgctcccgctcccgccggtgtcgccggggaggaggacgctgttcctggacctcgacgagacgctcatccactcccagaccgacccggcggcgcgggcgcggcacgacttcgccgtgcgccccgtcatcgcgggccaggcggtcaccttctacgtcgtcaagcgccccggggtcgacgcgttcctcgccgcggcggcggccgcgttcgagctcgtcgtcttcaccgcgggcctccccgagtacgcctccctcgttcctcgaccggctcgacccgcgcggcgcgcttttcgcccaccgcctctaccggggcgcctgccgcgacgccggagacgggaggctcgtcaaggacctcgccgccacgggcagggacctccgccgcgccgtcatcgtcgacgacaaccccaacgcctactcgctccagcccgacaacgccgtgcccgtggcgccgttcatcgacgacgccgacgaccacgagctggagagggtgatggggatcctgtccatcgccgccgagttcgacgacgtccgcgacgccatcaagcgctacaaggaaatcgtcgaggcgagctgaagaagaagaagaaggtgtggctactagcctactactaaatattagcttcttaaatcagtttcatggcagaaattttccccctttcttgtaagatccttgaattggttagggatttgggattcatatagtggtggctacctgaacctttcaggatcttcctgaaaggcagattgtgggaatggattatgtggttcagaagcttcagcacaaactgaaactggaattgggaaattctagaatgctgagaatgttatgaaattggagaacaaattttgttttctactcatgtgcatctgatttcagtaaattctaagattgtggaaatatattatgaagtagttcaaaagcttcagcacaaactgaaaatggagttggggattctagaatgctgagaatgttctgaaattggagaaattcgagaacaaattttgtttgcta

SEQ ID NO: 22581 - DNA, 5708 bp, Oryza sativa
tggcaatgtaaactatccctttatgtctgaaacttcgcaggtgtatagcatcggttacaggcttctgcgtttcgattaacttgtatagtagacggatttttttttagcaatttcatttcaaaaatttcccctttgttgtaaaattcttgaattggttaggacttggggtattcacatggtggtcaacctttcaggatcttcctgaaaggcagattgtgaaatactcctacattatgcatatcatcagcttcagtgcaaactaactggaactgggtgttccgagattagttaaattgaagatcaaattttgtttagtggacatgagactctgctttgagtaacttcaagtgcgtattgtattgagcagttcccattcatgttctatagagagttttggaaatgaaacccatcccttttatctctgaaacttcccaacattatagtatagtgttgaacaatttacaggctcctctatattggaatactttagatgaaaagacaagaacaagggacgtgaactagatgacgcagctacttgaaattagttttgttgttgtgcgttgcaaacaaaaaaaagaaggcatactagtacttgttttcttgtgttcaaactgcagagacaacgtattgcgtactcctgaatcaccattatggcattatccctgaaactctgaaaggaaccaaaaatcctaatgagctaagcagaaacggtttttcttctgtgagatttaacacaaatgacttagcattatgaaataaacatgtagaatgtcaaacaactttttagctgaattacttctatataaataacaaattcttttggaactgattgctatgaaagagactagctcccattaaaaatttctgaaagtgactagtgcgaacgttgcagcctaaactatatcatactatattactgacattccgtgcactccaaactcttctttattagtgattgtttcaatgaatacaatcagcaaaattacaacctttttttctcatgaaaagatagaaacttgattgagagtactcttttcttagattgatgcctatattagaaattagccaagaacttcaattccaacaccacaccaaaatactacagtaaaattgatgctgtttttttgtatattgatgcctatattagatagttgccaagaactccgatttttaataccacagtaaaattgacagattacgaaggggaaaaaaagcagtgaacgttttcttttcatgaagctaagagcaaagcttgtaccgtgactgtactggtgaggcatacacggaactagtctactttatgggcaatctgccaatgcattggtcagaaaatctttttgtcaaaacgggtcagcctgacagcgagacgcgcctgctgattaacgtgacacaaataatggtttgaagtaaactttattttattgtttatcttcatatggagatctttcttgcttgctatgcatactaaccaagtgttcagacttcagatactgatgtgtattaactattaaggcaaatcttgactggtaactgacatttgggcaccaccaaccattttatttttctgggagtcccacttgtcagtgacacatatccgcggtttgatgctgaatttctgaggaacctggaggacagattgcaaatttgcaagtagagtagtctttgaacaccttatatccgtgcacaaaacggtggtcaatccaggaaaccgagcaaagagttggacacatgcatgttcacaccgagctggaggccataaatagtagagaccaagctgcatcttcttgttatcttcagttattcagaagttcagagcagtagaggaagaacaggataagatcatagctagagatttcagagagagaatctagagagagagagaagagatggctggaggagagcatggagttaatggccagcatgaagaaaccagagctatggaggaaggcagcagagatcatcaagcaaggtgtgagaattcagagcaagatggaggaagcaagagctctagtaataaccaccccatgttctctgtccaattcgcgcagaaggtatgtgcacatctcagaccaagatggtttcattttgatcaaattcatcttgagtttccctctcatagatatatgtagtatttccctttgatcctggaatgtatagccaagctcaaacaagttctccaatccctatgaccctacaataattctgcagagaacaataaagaattcagtagcataacaacactataacagacaaaggaaagatcaagatcagaatttcccatgtggcttgtttttagaggcgcatgtggtagtagcatccaaaattttcagtaataatatactgttgcggctacggcaaaatcccaaaaaagaattatctgttcttgtttgcgagtcattgtcgccttcatggagccaagtcttcaacatgattgcgtcttggtcatcggcagcaatagtagctttcacagaaattaggattgggttggctactatgacaagcaattgttgtcaatcttgggatcaaacgatgaacacgacattgctgctaatgatagatgatgatgatgaattgctgtttgtaaaatcaaagtgtgtttgattcttattctgcgatgaacaattgtcatctgagattattgtggttttgataaacacaaatgggggggcaggtgatcgcggagatcttggggacgttcttcctcatcttcgcggggtgcgcggcggtggcggtgaacaagaggacgggaggcacggtgacgttcccggggatctgcatcacgtgggggctcgccgtgatggtgatggtgtactccgtcggccacatctccggcgcgcacctcaacccggcggtcaccctcgcgttcgccacctgcggcaggttcccgtggcggcgggtgccggcgtacgcggcggcgcaggtggccggctcggcggcggcgagcgcggcgctgcgggcgctgttcggcggcgcgccggagcacttcttcgggacggcgccggccgggtccgacgtgcagtcgctggcgatggagttcatcatcaccttctacctcatgttcgtcgtctccggcgtcgccaccgacaaccgagctgtgagtttgatccttctccaaaccattcttgttcttgtacgttttccaaactgtgttcaatgttacctcttccgaactgttccctcgtactagtagttttctgcgtgtaagtttttttttaatcgctaaatgatgcgtttgttgcacaaatatttatatttgaaagttgttttcaaagatcgtattaatcctttttcaaaatttaagataatatttatttaatcattcattaattcaccgctccgttttacgtacaaggagataaaaggttcccaaccgctactatcgaacacacattgagttgtgtcggtaagtagtgatgacggagtggattgaacgaataatgctcataccatattaatttttatatatttttttaatttagatatgaaaacaaatacaaagtatctcgaatacatgtatgaacaattatgggtgttattaaacgctataaatagaagtcatcatagtgatgtgatctgctgactagcctaggcggctgcctgtggtcgacgggccttggatcgaccattacctatgcccttgtgccctgtgtgttggggagatgggggtatcagatcatagcaatggcgagattttgatgaggcagaacggaaagatgaggacagtgaatttataatggtttataatcttgttgccatacgattatagctcataggaattgataaatcatttctaataataaaatgagaggttagtactatctccatctaaaaaaagtttatttttaacatatcccacgtacatcaatacaaagttaaaaaaagactaaaatgtccttcactttttcaaactccattacacttacaatacatcattgtttcaaatatgaagtcttcgttgaacggagggagtattcaattagtaatggtacattggtacatagaaaatggtcatttaaagttgtaaacaaaaataataaagtgtaaaaaattgtcttaatgccttgcagttattatatgttgaaaatagcactcgtttatagagaaccatgacttgctcggttggcaatggtttggtgactttcactatgtagacgcatgtttcatatttcagacttgattatatttccctcagattaaatgaaaggttaaaaaatatgtcgcacctctcccatcttaatttcatcagatagccggtaattcttcctagccatctcagcaaaaagaaaaaaaaacatgagagagtagtaattttcaatcagcaaaggtgtaattggagaaagtagtaatatttcatcagctgtgtgtgtgtaaaacgagaaaaatatgaaagaagtgtctcaaaaatcatatagcgactttatgtttacaaaaaatgcagaaaaagggagaaaaagggaggagtataagacgagaaaaatgcgagtatggtgcgcgtacaagtacaaaatcactgtaccatatatgtttacaaaatggtattcatactttattaagacgatcgccatcgttatcctgatgcgccctgatcctatttttctaccaaaatagttgctagtcgctctcaagatttgaagctagtgacttgttgggagttgcaactacaagccactcttctgacattaatttcaacattagtcatacaagcagttgacccaatatataatgcatggaatgagttttctttttcatttctttcaaagtaattttatagactgaatactcatggctcctcctatttgcagattggtgaactagctggccttgccgttggagctaccgtcttagtaaatgtgctctttgctgggtacacgtcttgaaccattgatattactccttccgttcctaattagatgtcattctaacctaattagatgtcattctaacttttcgcttgcaacgtttgaccattcatcttatttaaaaaattagtgcaaatataaaaatgataagtcatacttaaagtacttttgataataaagcaagtcacaaacaaaataaataataattccataatctctttaataagatgaatgatcaaacgttacaaacaaaaactcaaaacgacaagtattttgggacggatattgtacctctttttttttgagaaattcggttttactaatttgtgtttgttaaaaatgcatgttacaattattattttcataatacgtctgctaataacttttaaatataataaaactgaaatgtgaatgaagttgaataggctagccctatccactgtagaaagaagtttgttgatcctcactgtagaaagaagttgatgtctatatttatgcagattcaagtaccaatgtgaaaacattacttgtatgactgagttttcaacttacaaagacacatatctataatatagataaaggggtcctggaacaccaataggcataaataccttatggactaactagaagcatgttttccaaaagaacaattgtagcacatttaataggacatgtacagccgactaacaaagtcgccatctctaatataatcctcattatatatgaacagtatatattaaagatagcagcaatagtatctataaacagtattaacgagaatgtgtacacaagtttcgggtgtgctctcgccgtatacactaacactaacaaggtgttatataaaattct

SEQ ID NO: 22582 - DNA, 4619 bp, Oryza sativa
agcacatttaataggacatgtacagccgactaacaaagtcgccatctctaatataatcctcattatatatgaacagtatatattaaagatagcagcaatagtatctataaacagtattaacgagaatgtgtacacaagtttcgggtgtgctctcgccgtatacactaacactaacaaggtgttatataaaattctaaaaataattagacatgcatttctactattactgtacttatatataaaattctagtttcagattcatcgttaatatatagcaaagaaaacaggaaactgtgataaatctatactcttaaaccagcaaaattttcattttctatgaccaaaatatattgaattttcagttaaaagtctataagtaggtgtagtaatactataagtacttatataaatttatttttttaaaaaatattttggagacatttattaccgcctccgttttcaaaagaaggaaacttctgtgaaataattctcgataaactatgccaatgctgcaaagaaacacatttttttctctcctctacttgcacagcagtaaatgacctctacttgcacagcagaaaaagtcatttaatgacattagttactccgtattatcatggtacatgctctattctctctgtatggtttagctagtcatatatggatttcttcaatttagtcaatgacaataatattcaattggacataatctgcaggccaatatcaggagcgtccatgaacccggccaggaccatcggaccggcgatcatcctcggccggtataccggtatctgggtgtacatcgccggcccggtttttggcgcagttgctggcgcgtgggcctacaatcttatccggttcaccgacaaaccgctaagagagatcaccatgactgcatccttcattagaagcacaaggaggaactaggtcccagaattgatcagttttattgtggtaaaatgtttcctttttttttctgtagctagtgatgttgatggaatgaatgggcagtaaaagtaattgacactgtgattgcatagattttacatgctttggttggcttgttgtagcttaaatggtgaaggattgggttacttgttgtaattatcattctgaagaaaaacattgacaccaaatggctgtgctagaattttgataagatttatttttatttgagcattatcgatcacaatcaaaagacctccaatacagcatggaccagcaaagcgataggtgcaaaaatccagtcaaatgatgcggcgtccaacaagcgggtactgaacaaaatatgcatttcttaatcatttggcctacggcttattaatctacctaaaattaatttataagtaaaactttttatacttgtgccattggcgatttaaatgccaatctagtgatttgatgcaattaaaaaaaatcaaattcaacttcaaaatttaaactaaaaaagggcgaaaaaagaaaagaagaaccaaatctgtccgatcaaaaaagagcgaaaaaaaagaaaaagaaaaacgaatccgattccgcggtaaaaaaagggcgaaaagaaataaaaaagaaatctgtctgattcctaaaaaacgggcgcaaaaaaaaccaggtgaaaaaaacgaccagccaataaaacgaatccgcgtggacgcggtaaaaaaaagagcaaaaaataaaataaaaaaaacaaatctgtcggattaaaaaaaagaattatgtgtgatgcggtaaaaaaatcggatcctattatatttgacacggggctatatatctatatcttctctatctctactacttaaaaaaatttaaaaagtttccgttgtccgtaataaccaaaaaagggcgaaaaaacaataaaacaaaaaaaagaaagtgtgattcaatttacttccgtcccccgtgaaaatcttatattatcttaatatctctctctctctctctctctctatatatatatatatatatatatatatatactacttaaaaaataaaagaaatttccgtcgtccgttgggaaaaaaaagcgataaaaacaaaagatcagaaaaaaaagtccgactcctccggtggaaaacagagagaaaaaacaaaaaacgaagagaaaaaaaaacttccatcgcaaaaaaaaaaatgtccgactctaaaaaaaatccaactcctcggtggagaaaaataaaggcgagaaaaaacaaaaaaagagaaaaaaaaacttctactataaaaaagaaaaaaaaaacgtcctacatccctgcccgcgtgatgaaacgccagccaaagcaaaaaaaacaaaattgagcaaagggataaactagattgaagttcccaaaattaaaagatgataaacgatattgaaactcccctaactcgaaaagagggaataaaatatattgtaatttcccgacaaaatgctctaaatttgaagaaccctaatttcgggtaagaaccataagagtcaaatccaaatcaattaagctaagggttcgggttacttaccggacttgaagcccctgagctcaccccagagctttccgggaagcggcaccgccgcaccttcacctcctcgcagtcgtgtcgggttccctgcgcgcgtgctgtcctggagcacccctccaccgtcctttgccgaagacgggaagcgtcggcttggcgtcgtccctaccgccgacgaggtctaggtcactcagcgctcgtccccatttgcacgcccacctagtcggaccgccgacgtcgtggcatggctttgcaccgccctcggatgcaccccctagccggcgaagcaggagccgctcagcggtcgtcgctgcacgcgcgcaccagcttgccggaccatcgtcgttccgctcgctcgtcgccggagagaaatgggatcaagagagagggatttgggagctagggttttgcccctctccccggttggcacttcattcggcgcagggacgattggagccgtccattagattggacggctcagattcgcctagcgtcgggccgtcgtcgccattgattacgctacgccaatgggccgcggaagtgcatcggaccgcccccgcatatgtcggctgcactcagctgcttagcttgcggaccgtcgaattgactcaactcgccgaagatgggccagcccaagtttgggccggcttgggaagacctaggccgaaagcaaatttgatcaaacaatgtagctcatatttttcaaattaaagtccattagataaattcttaagtaggcccgaaaaataaatctaaaactaaatcctaaatcctatgctaattgatcaaattagactcggttctacctatttgttaatatatcaaattagacttgatttttacagatttaaggtttttcaaggtgtcacactatcaaacggtgtttttcccgttgcaacgcgcaggcgctattgctagtttaaactaaaagtgaaaatcaacaaacttgtatcaataaacgttaaaaaatatattccaaggggacctgatacttctgcttccgcaggccacagggtgggggcccaaaaatggtatgggccagagctaagctaagaactaagaagctgctactcaaaaatttgtacagctcggcccagtgaagcaaagtgtcatgtgatcactactttagcttagctatgcaagaccaaaatagttgtaggatggcactggcatctagtgatgtgatgcaactttctagtttgctagtaacacgaatgattttcagttctccacaaaaaaattgtaacagagtgccatggcagtatatagaaaaattgcattcctgcttacaccaccagatctgttgtacaaacatcgtatgctagcaagctttttaggcttcagcctcgtcacaaaaaaaaaatatggcgaaagaaggcggatatggatatatgttgttactggaacatcctgaggaagttgttcgcgtaggccatcggcttgacgtcagggtgtggctgcaagatgaaatcagtcaagaccttggttgtaacgaaatcacatattatgctgtttacaagacaaacacaaaactacagtagacactacatacaaaaacataactagtactcgtgtcaaaattatctgtcgtttccgacagcagaaaataactacgagcaggtcatttctatggtttgaaacgacgagtatttcagatcagagggagtattcagaccagagggggaatcgagtaacaagtgtaacatgcactcgaccagcttcctacaaaaacatactactgccacatacagtcttctatttcttgggatactaatcttgttgcaagaaatagagtaatagtgtaatgtactcaccaccgctgagaaagaggaaatatttggttttagttctggagctgtgaaccgaatgtatgcacccttgttacccatctgtatcaaaatcgcaattcacaagatgtaaaaggcatgattagatatttaagaagaatatcgggagcataaaattgaccaggaaacaacttccatatccttatggtgcaattattagtttgtgcaaccaactatagttctattgtcgcaaacctggtcgcaataattgggagcagagaacaccgttataagctttccatcatgttcaatttcatagccttcatctttcacttcatggggatc

SEQ ID NO: 22583 - DNA, 9485 bp, Oryza sativa
ctttttaacaaattttacttcatacccagattattttcttgtagaaatttcttagtcacatctgcaccaaacgaaagaccaacaccgcgtttgcttggacctctaccaagttgaggctgaggatcactccataatacttcacacattagacctgtcagcagaaacaggagtcatgttggcagataactaacatgggaaaaaaggcatcaaggtaaataatatgccaacacttataatgcaaattaatggttaataacttaatatatgtcactttggaccataactttgaattgaggttcaatcaagtgatactgggccattaatgtattccatctcacaagaaaaataaagatgatagatcagcaaaaatagccaagttcatgtgctagtaagttgaccaagttatagaatcagtaccatgttgttcaacaaaataatcgaacaaaactcaaattacaagatggatcagacataatagctaaatcaaatgggagcgaacttcaatgataaattggaaaagacaaggtggatcatacctagaatctgctgaaaatcaagcacatacaaaatagaaaagaaataaatagctaccttcttcaggaggctcacggaatcgatcgatggctctaatatctgaaagcttaacaccatcaacactaaagagacctccatgaacaacaaagaccttgttgttgatgacatgagcaaggggtaggcaacagaatgcttccgcaaatagttcaataaatgcttctcccaacttcgacctcacttctccctcaaaaccatatatcttattcatgctcttgctctcatggtttcctcttgcaaggtacatacctggatcattcaaggtatgtataaaggaaaccttattacatgaacaactaaaatcgatacatctattataagttagaataatgtaataaaagagctagtaaagtaacagattgcatactaatatctagttcatgaaaagtatcaaaactagcagttacctgtcggatagaggcacttgaaagcaaaaagagtgagtatgacttcaacagaaaaagatcctctgtctacaaagtctccattgaagaggtaaggattctcttccgagggaagcccattgagcttaaatatattgagcaagtcaaaatactgcagtggaaaaaaatattacaattccaatcaggctgtcagtatatcaatatgtaataaactaaatcaaatgacagctaaaattttagcatgtgaaattaccaatatcattttccatttcaaaaaagaaggggacacccagaagcactaggaaaaaaacaaaagcaatgcattcaaaaaatttaaatacctgaccatgcacatcaccacaaaccgtaaaatgacttccatcaggaacgttcacatcaacaagcgaaggtacagaacgcaatagctgcacggtttgtaacacaatctggtaggcgtacctgcattatcaacctaagtagtaaacaaccttggggaaccaatataaccaaagaaaacacttcaggtatgtcccttgtacaaagtgtaccttttgtgtatgcatttctgtttctcaaactcatccaacatagccttgacaaaatctaatgttattgtgtctccatcaactcttggtcctgtatattgtggctctacttctggaacatacaaaaaaaaatattaaccacaatgtcaactaagcaagggatatttaagaaaataacaaaagccatccacccagaaagagatgttcacaggtaacatacgaaagagccatagtacactactctgtaggcattggtactgcaaatttaaatgaaacaatagcatagaagtaacatgagacaattaggtccttatattatagaatgcatccgcttggaagtagcagattcataaaagtgctaaacagaaaactcatcaagaacaacttttctgtaggcatcggtactgcaaatttaaatgaaataatagcatagaagtaacatgagacaattaggtccttatattatagaatgcatacgcttggaagtagcagattcataaaagtgctaaacggaaaactcatcaagaacaacttttcagttatcctgggaatccagggaagtacgaatttcatgagactagcaaacactccctctgatttttttttcctcaaatggcattggttactcgaaaaatgaactaataaaacaaactcgtcaagtttgactaaataacactaatatatccaggccataatcatacccaaggttggctttgtcaaaaagagtacatggacctagcagagtggaaatatgttcagaaagtaaacaccagatacctatgatacggtagtcaatagaatcagctacagagcgcttctcttcatcccctacagaaattgcctcttcaaaacggattttctggacagctttctcacactctttcaatttcctagtagcatctggatcattagggctgattcttttcacctagaaagaaaagtagacttattaatgtaccacatgaaacaaaataatgtggttcctgctatccctagatggtcaccaacattaatataaagcagcaccaagaaaagcaagaaaagtgactagaaatagtcattctcaatcactcaatctgggaagagaccacaaaactaggaaaacaaactgcgcacctgttgaaaatccttcagagcttccttgaacttacccatggcaagatatgccgctccacgtcggtagtaaccctacaaacaaaaaaagggtaaaagataggaacttgcaaacctgtggcaggaagaaatggcaccatcacttacttttgagtatctagcatcaatttcaattgcttttgaagcatcttgcactgcacttccatattcctctaactttgtatgagcaaatgcacggtttgcccagtaaactgcatttgaactgtttagctcaatggcttgactatagagctctatagccagggagaacttgtttgctgcagaaaataaatagaaagattatccaccagggaaatattcctttagaaaactttgggaaatgctgcatacagcatgagagcccgaatcttttattttgtgagggcaatatcaatagcctgctaccactcagatggatataaaatataacacattagagtacataaacagatactccctcccgttacataattcttgatgttttggacaactgacatggtctccaaaacatatctttcactatgattttctattaaaatatatacaaaaaatatgtaaacaattaattttattgaagtactgtttaagaataatctatgcatcatgttctagtgtcttcaaaccaaatatttttcacgttattgatagtcaaagttctaactgtttgacctcaaccttgtccaaaagtcataattatggaaccggagggagtagatataatactaaaagccttattgatcaacaactattacaatttcatgttgattggtattctaaataagtgttattagcatgtaactcacttatgtcaacatttgaaactctgaattacaactcaaaaacacatgcagttctgacataataaaggatgaggacatgaagtggatcaaatcctaacatacctttaaaggcatcatttgctttaagcttgagttcttcagacttttgctcatttaaactggagttggcatccatgatagtttcccttgagctttctccagtaaatgctacttcatacacagaatttcaagtcctgtaccaatagaatacatttgcagcaaaaaataaattaccagatataattaaaaaatgcaggagtattacggctacggacaacattaagtagaaacaatgccccagcatattgggtagaaaaatcatgcatatttcacaccaagaggcatccatgtattagaaacaattagcctggagtgtggatcataaagcacgtgagcaaaaggtagaggggctttttagaaacattggctgcggctgcggctgcagttgtgctgtagccgtctaactcgcccaagcatggctgtctttaaggcagctgatggctggttgctccagcgcagctgcactgcagccagcactgccaaacagctccagagaagggaggctgcatatggtttatttccatttcaagccatacctaaatttggtaacattaacggaattggccatacttcgtgacttgtagcctatatagcctatactttagcagaaaatatgcccaaggtttaacatcgctagattttggtaaggctcgtttggacaacaaaccagacatgccctaaaaactacaaggaatcagaattgccaggaaccaaagttaaaaagtaacagagtaatcattcttatagagatacgaatacaggatgggcagtgatttcctgccaaaccaaggtttggacaaggccctgcagaccatagagctgatccaacaaactctgcatttctgcagatacggatacattttgcatattggagatctcttcccccaataaccaacaaatcacaggctcatataaggctgtgttcttcactcaactttcccaaactcaaccctttcgcttcccaaactgctacacgatttaatttttagaaagtttctataggaaagttgctttaaaaaatcatattaatccattttttaaagaaaaactaatacttaattaatcatgcactaatgagtcgttctgttctaagtgcacgagggattagttcccagttcccacctccaactaccaaacacagcctaagcctatctgaatactcacatctcacctgagcttggtcggagttcattagacataatcaagaacaaagcatgcccatttcacatgatcaccaactgttccattttctaattctcccacattttagatttaaattaatataatgctaaattcagaatccattctaatgtatcttccgttgttttcacaatttatttaatattttggaattaaaaggtatctaattgtatttgtgttggagttttagtttagcatgtttcatggattaataattctaaaatctggaatcgatagatattgagttttactcagtttggagctctataattagttctttttcacagtttaataattccaaaattcagaattattaaggagtagattacatatgatatatggactctctttttaaaatgaggtggactcttattttatctaaatgatttgtataatacaaactcttagtatgacatatggccacgtattacaatccacctaatcaacggccagatctttctagttaatgttgtccctcaaagagccctttagaataggtaaatatataccattatgaagttaccaattttgaaaaatgccattatgaagttgtgccttagaatcatgccattgcaatatgaactcatggttcaagaaggcagctagtcgggcagctaggtggcacctagcgcctaggtcaacccaactagtcaaacccaagaaattagcaagcatattacataaaaactagactatataacactagaatagcgacaaaacatcacccgaggtagttcagccgcctaatgcctaatagagccagctagccggtgccactccacctatcccgtcgaggtcaaggtcggcatccatctccgtctcgcctcctacccagctctagccctgtctggccatgctcagaggacaccgaacagcagaggtccaccccctgcgagctgaggccgccagccacaaccagtgattttccttcaccaatcttgtcactggagcttgtcatatggccattctccgtcaatatgtcggtggtagatgagatggaagcaatggaattaggtgcaggaatgaggaagataagaaaaagggaaacatggtctaaatatctccacattggcatatttcagaagatgggaacttggtgtggtatgtaaggcagagtaaactttacaattgcaagtttcaaaaccttttactcctcaatggcacatatcaaatagtttaccccctaaacataattttgatactatggttgttactgttgattgaatagcatacccaaattaagcacgaaacaagcatttgcaataagaaatcttagcagcagaaacaaaatcgtccatacacatactgacacacccttatcatcaggagcagccatggacacttgacaatctgtgacagttcactcaatactgtgacagtgcagcccagaatttgatttttcttagaaaaccaacaaatccaagagttgaaaactgactcgcgcaaccgctggtcaaacatgcagcaaaaaggagggcagggaaaccgaaacattacgtgcagcctggagggagaagggagccgaggcagcgtcgtggcgcggcccgaaccaacgaagcgcggggtggcccgccggcgatggagggcggggtggcccaccgcgcggcggcggaagcgcagggggcgagggtggcggcgtggaggagacggcggaggagtcggtggaggggagggaatcgtcggctgcaaagggggatacaaccggaacaccaccaatctagggttgccaactgggccggtggatattttgcgtggcctatgggaataagttcacctgacgtcccttgattgtacgtcgagtctgtcggaggtcacctaaccgcaataccagaaatgagtgcccctgaactatgtaaaaacatccaacaccaaaggtaccagatgcctggtttcgctgacgtgacatcgtaggttgtaaaataaaataaaataaatatgtgaggcacacatgtaattgagagaaaatggtgtgggccccacatctcttctttcttttctttttctcttctctgctctcctctcaagcgggcacgcagcggcaattgggggagaggcggcccgccggtggcggggggggggggggcgctagtcgatgagcatgagcaacacagcgcctgggtgtgaccaatccgggggcgtggtctcgttggccacggcgagtagctgccacccaaggacagcgggcagcgggtggtggggtgccacggtgaagatgatccaccaaaaagggaggcgcaacgccaggagcggcgatgattggtcctcatcggagtcaatggcccgcaagcgcgagcctcgcggcggtgcaacccgcgaggtttgtttcaccgacgatgaggcccgggaggtgaccgaaaaaagaaattttcccattttggctcaatcatcttctctctctctcctgctgtctcgttggccacctctctccccctctcctactgtcgctgcccccagatttctggccccatacaggtgaataggctggaatctaggtgccgttgctaatgtactctaatgggaagcccttccaagctgcgacgacgatgatgtccacgcagcgccggcggcacaccaccaccagcacaccaagctacggcgggggcgggctcgaacatggcgacgacgtgtgcatggttggagtagccgccaccgagagttggagcagcgggaggcagggcgctgctacctttttttcttcttgcttacatgtgggccccataacttttaattattttttgctgactatgatgccacgtcaacgaaactactcatatattgccatgggacctaatttgcacggttttgtatagtttagaggtgaagatttctggcattgcagattagggacctcagacagactcgacttaaagttgagggacgtcaggtgaacttattccacggcttgtttgggaaaccctaaggcttttaagagtctgtaaaatttggattctcggcttttggtttctcttttattttctagattctacaacgtagtttcttatttgactcctttcttttcttcaactccaaccttcaactttctcgtttttcattagcacacttttcaaactgttaaatgtttttttaaaaaaaatacataagttgtttttgaaaagcaaataaatccatttttcaagtttttaatagttaatatttaattaaatatgtgctgatgagctttttcgtttcgcgtgtttagaggagcttatgatcctaggagaagctccttaaacaggtcctttagataggcacaacgcttttctatccaactaaggtgataacgggtcttctttgttgatctgaggccctattttataagtttaagattccaaaaaagagatgattggtaaccagtacggcatcctaaactcaaatttaaaaagcaaagttataccaataggagtaccttcacaccatattgtttcttcacttggagggttaccaacgtcaaggtcatttgatcatcgggaagatctcatcttcttgatctttgacatttcgtcttccatttctcaaatgattaatgcggataatccatggcttcaaatgccctcgcacggttcatcatgacacagtcttcactcgcccttcaccaccggtttcggttcgtcggcgccaagccccttgcttgcccttcaccaccgcattgttcatcgcagctgagcgtcgcttgcgcttcaccgtcttgccataggtagtcacttcatacccgcatcttcaatatcttctctttaattatcatccatcgataagtccatttcctagcttcttcatcggactaatcacttgcttatacactcaataagtgcattagacccttaatcgtttgtcatcaataaaccaaaacccactacaggcatagatgctctttcaatctcccctttttggtgattgatgacaacacgattaaagcttacaaaagattgataaaaaatgattttgcatccaaaggttagtttgagctcccctaaatgtgtgcatacaagtttatgaagtgagcacatatgcacatatttttgaaaatgagagagctccccctaactctttgcatccgtggggtgtattgtgtgtgaacgagataccaaaagtaaaacaacatacacaactcaaattcttggcaccaattcaaaatgtatcaaatgaaattctcgatgccaattgcaaaaacttgattctatgccaactgattccggttccgattgagaaagcatgagtaatcaagttcaagtatcaaaagaaaatctcaattgcatgtggcatggagatcaaataataagcattcacgccaattgataaacacttacaaatattctctccgcctttctcatttactcttggacatctttaaagcatgcatttcgatgatttctcacaaatatctcaccctttgatcaatcttttctttatcccctatagaatatttctccccctttgacatcaaacaccaaaaggggcataagtagggaaagaaaagcaaagggatccttgatgagggatcatcgagtacttacctctcaattttatatttcatcacttgtgattaggaaatgaagatcaatttcacataaagatcacaagtaaatcaataagcattgagaaacaaattttgagcatagaaagctcacatgcaaaggatgtaaagcatagaagaaaaaaaaatctcacctaagattttcacaaaacatttcacaaaa

SEQ ID NO: 22584 - DNA, 10717 bp, Oryza sativa
aaggaatgaaacttggcctagatgcacagacaaggcaagtgatccaatcataccaatttaaataacaagctatggatcgtcgagttaccttccatgttgatttttgagatgcccattcaataaaattgatatcttgaacccaatttgaaattggcaccttgatgggtttgatgaaatctcttccttgatttgcttgattccaatcccgagaaagaacttaagctttcccatcacgaacatgtttaactccttgatcacagtctgcgtcctgataatgcttgtgctcttcttgtaaggccatgacccgatccggtttagcatttgcaccatcttccttctagctaatagtccaaagacaacaagagagagtaacattcacaaattttgtaaattgagaatgaatagttactccctttttgtaatgtcattgaggatgttgtagggaagatctcgttgaatgatgtggtgaattcttggatggtacaccgatgggacttgagcttgcatggtgtaacttgctcttgagtgctcttggcatcaatcccatccacttgtaccgaaagtatgttcttcatagtcaattgcggcaggttgaattgagttgattgaggttgatcaagtagtccaccttggtcatcatgggcttcttgtggtctcacctacccaagtgtcttcgaagatgtttttaacctcctatgagactaatcacaaaaatacacttgataacaagttagtctcaaaaacacaaaacatagggtatactccccctaaaagtgtgcatccaagttcttgaattacttgtagaaatgcacttgtttgatgaaaacaaatggggagtatagcctatattttggagaaaggcacataaagtattctcaagaaaacacttgtgccaaaacataacacacatcataaaatgagcatgtagattatcggaagatattgaatcaaagcatgacaatcaaccataaaaaaaactatttgggttacccgtgattcttgcacggaaggataacctttaagtatgcatgttcttgtgagcttggagccttcggcctagatccttcgggtaaccaaggaatcttcctggagtctccgaggtatccacccagagccttcgggctcgatggcatggtgatagatgagcttgattacaaatcgagcggtcttatcaaagcctttgattccacaataaaatctgcaataaaccttgtagataggtcatagaacattgcatatttttcattttgggagttttacccaattctcaaacaaatagaagccacaaaaatcacaaaaatttagaaaactgaaagtttcaggattttcagaatttggaactcaaaaagagcttgaaaagggcatcataacaatattcaaacgactatagaaaaatccaagtaaatttagatgtgaagtccaaccatagaggaacaaaagtcattatatatactcattccagtttgcaacctattttgagatataaaaatcacaaatcagtcaaaaaccatgaattttctaaaaatttcagcaacttgagcaaggtgagaaaaagtcaaattctttccaaattaaatcggaatgatgcgaaaccttgcagaaatgatcttttcacttaatagaaacttttccaaaaagaatttctcaaaaaagatttttctatcaagagaaatgtcaaaaagagttttgtaggccattcaaatgaatatatctcaaccaaagtgtcaaatcacattcaaataagatttttatgaagtttgacatttggaaagccttagatgggttagagatactaattcatgcccatattcacaaagaattttggctcaaatagttcaacccaccatatgcaatttttggccaaaagaggtaaagtcaagatttttgatgaacttcacaaggctgcaacatttgaatggttggtcttttgaaaaagctttgaactaaaaatgtgtttgaaattaccaaccctaaaagttttgtattggcaactttttcaaaaactcaatagattttgatttggggtaaaatctcacttttaacaaaaacaaagatcactaaagatcctgtttagacaaaaaagagttgttttcttttgaaaataagaaattttactccaaaagctttggaaaacatttcaaacacatgttgaaatacttttgaaaagattttcacaaattgtggccttttacatacgatttttgacttttgactaaatatgctcttttgaaaacaatgaatgcaacttttgagatttttcaagttttgagagcaagagatacatgaatgtggtttgcacaatttcactctaaagtatctctcacttgaaatcaaagagttgaacatttaggttaactcataagattgagcaaaaagatacataaaagctcactattcaaaaaccttcatccaaaattcaagaaatagcaaatgagaagattttggattgcaatacatatgtataagcttgacgtacctccatgaaccaatatatatcaagatatatgattctagtggcaaaactcacttgatgatacaataggaccaaatagcattttaaagactatcatagcatcaatttgagccaaacacatttagaggatgcgaatgatgagaggttatagcacttcccctaaatgtgataaccaattactcaaattcaacttaagcatcaaccaagaaatgtttaagaaaagcattatgcacaagcataacctacacaaggttaggacataagtatttaaatgtaaatacttgttaccgagatgacattggttctttatatagaacaactattctcgtatttgagtccaattttgcgtattgtgtgaacttaattttccacaaatgagtcaaacctccaatgcatctccaagtacctatttctcactttagcacattttggtccccaacaacattgggtccataaaggttagtcacaagagacttagacaccgaaatggcctttgtgctagtgtgtggcgaacaaatcaccctagtagcacaaatatcatttttggcattcctaagcaaattatgatcaaatgagagacttggcttaggaatgttacccatgggacaatttttaccaatatgtccctttgcccggcaattttatcaaagtcgacttttgcttctatattgcttttcggtttgtttgttgccggtttgcctctcacttgatgttttgcattgttcatccaatgtgcaaggagaccttgaggcaaagtgtcccgcttcagtgcacttgaagcacttgatgtgaggaatgtccttcttcttgctcaacttatttcctttcttccaagggcaatctctaacatgatgtcccactttcttgcacttgaagcaagtaatggaactcttgatcatcttttgatttcgttccctggtatgatcattgatggacttgatatccctttgatggatcttggtgcacgctacggttgatccctttctcaagcttattcaccaggccctcacggttttcttgagaaggtttgagcaatacacacaagtccatgatccatttgcttctcccttttgcctacacaatccaagtcacatatagtgctcagggacatgtttgcttgggggaaacaagggttagcacaagtgagattaacttgaacatgaggctcataggattttaccgttgcaattatcacctcatgagatacctctagcatagcatgagaatccacaagattcacatgagaacacaaaagttcatcatgtctttcttgtaaatccacatacttgttagtgatctcatcaagttgaaatttgagctcttgattttgcttcttcaaagatgctacacaagcaatagaattagtggcacaagcaaattcattttccaatttttcatacctcatagtcaatgaagaatgaaaatccttaagtttcttgtgttcttcggttagactcatgatttcttcattcttcttgatagtgcatgcttgttgcttttgaatggcttccatgaacttgatcaccattgttacatccttcttgctcaagtgatcaaactcggagtcaccatctacacccataaagcaagcataatcttcggaaatagaagatgagcatcttggtgaggtggattcttcacttgtccattagcgctcatttacttcttcctttaaaaggttagttccacatgtactataggaggtagagcatttatccatatcatcctcacacatatacttggggctaggtgagatgcatgagtcaacaacacaatgcaatatgacaatttcattatcggtgttgttggaatccaatgggagaattggatgatcgtcaaccttactcaccaattcattaccttcaatgtagtcatgtgttgataaggtagacgtgggatgattatcacgatcatcgaaggtagttacttgaggttcttcgcaatttggcgatgaagttgaacacttctcaaatggttcttccaaaaagagtacatcatcacatttggacttgccgtatctctccttgagtgtagtccaaatgagatgagcatcttcaagcggcatgatggttttaaatacatcttcactcaaaacactaaataaaacattagtaacttgagcattgagatgtatgcatttctcttcctcttcaaatgatagcaatttatcattaggaggagaaatgctcacatctacaactcgctctatttgaggacccatggtcctaaatatgtcaagtatgcgagtactccaagaatcataatttgagccatctaaaaggagtaaaggaaccatatccaccaaaccactagtcgatatctttactctctaagcggtaaagccctaaatagagagacttggctctgataccaattgaaaggaccttgatgtcgcctaaagggggggtgaataggcggttttaaaaataaatgcggaagctataacaaaacagggtcagattgtctaatatcaggtcggatagtcctatgtgatcggatagtctgaactgatattagactatctgacctgcacaacaacaatataaacaagagaacaacctaagagctctagattcaatccacaagtaaagaggtgagctcgaccaacaacaatattagcatagcacaaagtaatggaacaagaaggtaaagagagtgaggaattcaccgaggtttacgcgccgatgtatttcccggagttcaaatccttaaggggattctagtctccgttgaggggctcgcaaagagccgggtctttttcaaccctatcctcgtgaggttgcacaaatgcactcctccttccactaagggtatctctttccttgcggagacgagatccggccttcacaaacttctcttagccaaccacacgtagatcggtggcccaagaacgacacctagtcgtctaggagtcctcaacctccaagagtaataaacaccacacaactcttggacaaatcctagtgctcaagattaaaacaaacacacactaggctcccaaactccaaatccatacacaaagatccaagtcacaaagaacaagggggatttgagatagagagggagagagctcaaaaatccaaagcacttagcacaaagctcaacccaaagcaagattggaatgaaatcagtttgggcaaccctagaaaagggttggtggggggtttatgtagatccccccaaaatgtgaccgttggaggggaatctttcagcccacgtcggatagtctgatacaagatcggataatccgatattttaaacctccaaggcaacgagaaacagagaacgaagttccatgaaatttcggactttccgaggcatcggactatctgatgttaaatcggagtatctgatattttagaagcaaaaacttcgtcctcaaacagagactcaagttctatgaaatttcggagtctttgtatcatcggactatctgatccaacatcggatactccgacacttagaaaaactcactcgaaaggatttttcaaacaaagacagagagtgaagttctgtgaaaaatcggatagtccgatacatcggatagtctgatttcaaatcggatagtctgatgttgctcaagtaaaaatgcaataactttttactccgaactctgatttcgaagatcttggactctatggaaagctagtttcgtgagctatcaaacccaacataaaacatggtcaaaacattcaatagatgttgaaacacttgcaaagaaacccggtgtaagtgttgtgacaagtgaaacaactcgggattaaaattttggcataggtttttcaactcacacaaagatgaagcattttgagcactagtattcaaccaattatatgcatgtggtatccctcttaatagtacggcatcctaaactcaaatttaaaaagcaaagttataccaataggagtacgttcacaccatattgtttcttcacttggagggttaccaacgtcaaggtcatttgatcatcgggaagatctcatcttcttgatctttgacattttgtcttccatttctcaaatgattaatgcggataatccatggcttcaaatggcctcgcacggttcatcacggcacagtcttcattcgcccttcaccaccggtttcggttttcgtcagcgccaagccccttgcttgcccttcaccaccgtatggtccatcgcaactaaactaagcgttgcttgcgcttcaccgtcttgccataggtagtcacttcatacccgcatcttcaatatcttctctttaattatcatccatcaataagaccatttcctagcttcttcatcggactaatcacttgcttctacactcaacaagtgcattagtcccttaatcgtttgtcatcaataaaccaaaacccacttcgggcatagatgctctttcaaattgtcaaggatataaaaaacagagagaaaagaatggcgcacgctgtacatgggcagggagggagggaggtttgggatgtttttctaaatgattaatctaacagactaaaataatgtgtcagatgtttatgtcgaaaccgatggtcagatgttttattttcttgtcagaattttattaggattttctttgatttaagagaacaacataatatcttaagagcatttataagatgtgtaatcatcttttaacaccgtatgccgcaaaggagggagggaagaaggtttagggtgttctttttttttaaaaaaaaagatctaatgacctaatataatgtgtcaattaatccattgaaaaaatgtgtccatcgatttatgtcatatctaatggttgggttttttttttccaaaacttctaagatttttctctaatttaagaacgccatatagcagcttagaggcatttataatatatttaatggattttaacaccgcacggggatggggagggaaggagggagataggtttgggtttttttcttattaaaaaactaacaaatcgatagccaaatgttttgttctgtttttaagattttctagcattttatttaatttaatagcaccacgtagtagtttagaggcatttgtagaatatttagagtcacagagcgagagttgctagacctaataggtggaggtatctttgtgatttttttgatgtaaaaataattttgattatgatttctcatgaacatagctcgttggtacgtatgtgacgggaggttcggaatgtgtgcttttttaaaaaaaaaatctaaccttctaatataaaaataatggatcactgatttaaataaaaatcgatggttggattagagtgcacttgacgacctaggagcgtttgtaaagtaccatttggtgaattaaaagtatttataagatgtttaatgaacttttattatataattgtctttttttgaaatttaagattttatttaatttaagtatgtgatatagtagcttagaggtgtttacaaaatgtttaatggattttaacactgcacaggggtggggagggagggagagaggtttgggattttttttattaaaaaatctaacaacctagatccatcaatttaagtagaaatcgatggtccgttgctttgtgttttttaagattttctaatactttctttaatataatagtaccacttagcgatttagaaacagggagagctgctagttctagtagttggtctatttgtgttttttacctgtaaaagtatttttgtttagttctagtagttggtctatttatgtttttttacctgtaaaagtatttttgtttttattttctcattaaatagaaaataacacatgaatgaaaatatggaaagacaaaagggaagtacgtacagtacatacgcacgtacgttcgacattacgaacgttggttccgtatatgatggttctggattttcttttttctttataaaatagatctaactaaatccaaccatccaaaataatgggtccaccaatataagtaaaaatagatggtcagatttttcttatttattatggtgccacttggcgatttgagagtgtttatagggtgtcacttgacggtttgggagcgtttataagaagtttaatggatttttagtatataatagatagatttagtaaacacattattttgtggatttaatcaagatttgattgagaatcggtgccttctaaaaaaagtttagattgatacaaggaagtcatatgccttgaatagtacttctataaacattaattttggataaagtttagaccatgtattttgggttcgattacagtttgcccataatttggaattggaacctcatggttgcactttggaccagggtacctatcatctcccatcatgcttttgctctttctctaacttgatgaaacagacaatcactccaccatacacctagtttggagaataatattatgagcgttacttatagaaaaatgttgcattttatagtgtaagggcattgacaatacgatgacatggtgagtggtgtagtgcttccccgtcagttctgaactaccacatcaattaggagagcagcctgtgcatgtaaatatatatgctaatgaaagaacagccttgtcttacaaattagcttgccgaaggaggtgtcttggggtctgtttgagggagcttccagattctcagaagttggctaccaatcagctgcttataattttaagctccccaaacagacccttgtacaagctcataacaattgctttttttgacccattaaagccaccatgtaatgaaatatattgtactcaacgatgaccttaccctccgtggcatattcgtctctgagactacacaatgagacaacttcgcgttgtacatgtcctaagaaagcccaaaataacgtgttgtcttgaaatatagagataggcatgcatctctcgagctaatattcccatcgaaaaagaatgaatcagccgagttaaaaacatataacattttcttttactagtacaatacaacattaccagcatttttcttttctcacggatccatccatgtttctatctaactactgtagtataaaacttctgtacacatgcaagaatcttttacaagtttctgtgatccaaccaaaattcagagacttctgttctgaacaaagtagagcatcaccatcaatccatcacatggcccctatcctatcctgtccactgcccaccaattagcgaggtgcatctcagtttcggccatcgaaaaagcagaggcctctcttctttctaatcttcttcttcctctttccagacttcaggatcagaatcagatgctgcagagcatagactgtacactgtagttccatcgatctcccccaactgtatttgtcagccaatgctgattgcggctgttttcaacaagtcttctctacaatactgctaatgtgggtcgctaatataagaacccattagacatgaaacccatatgtcaggcactcaaaatcagagagatctgtttccgcctcgatgtcgccggaaatggcaacagatcatcatcgtcaacaaccaaccaaccaaccaccagacgagtagaaagcttctcctacctaacattgtagttggcgccatcgccatgaaaggtggtaccacacacgatcacgtcagcgtctcgagctattagcaatcgcagtcacactcacatggctggtcgtcgtcgtcgtcgtcgtcttcaacctctggacatagctattagctagctagcattattgcctccggcgtttggaggtggtggccgggaagcagctgtcgggggagcagatgtcggggacgaaggcggtggtgtcgggtccgccgccgccgccgccgtgagtggcggctggatggcgttgccagtggaggccggaggccgtcggcggcgaggggagctccggcaccgaccactggatctctggtacctgcccgaagagctcgtcggcgttccggtcatcttccgatgacgaccggtagtacggcgagccgtccgtgctccctcccagcttcccgctgtcagcctggtccatccatcaatgacacgacaaaattttatttcaataggattttaccaagatcaggatatatcactagtttccgtatcttatagtataatattagacgatgtattcataaaggttgaggtgtaattgtgatgttacgtgtacaatggtgtatgcatcttctgagtttaaatagtatatattgcgagaatttcaaaaagaaaattgtatccggccaaaatttggaaatagaaattgtatctagtaattctttattttttttagaaaagaagttgtatatattg

SEQ ID NO: 22585 - DNA, 4945 bp, Oryza sativa
ggagctgcatcaaacatgccctaagaaacttaacgccagctcggagcttcgcttcaaagacaagaccgagcggttcaagttccctgcatgagtgtataggcgcaaaggcaaaaacaccacccatcttgtagagaatgcaacacccagtgtgtgtgtgtgggggggggggtggggggggggcagtaaaggtggcgaccttgtacactctcgccatagtcatggtttagttgacgaacatgagacctgataggtcccccttccacacgttaacgttggtagggactggctctcacgtggtgctctatagtctcctctcactccaaatatagctccatcctcgcatcatgagcactgccctcgttgctccattcaccatcagtgctgatccaacggcggatgtagtattcactcaacaattataaatcctatttttggttcttagtaagttagggtccgtttggttccttggtaaaggctagcctagccttacctagcaaggctagctgtttggaaccggttaaaaaagctagcttttaggagcaatctagccttgcggggcgagaaaaatctcgctggctcgggagagccgatttggctagccttcgacggcaaaactctgctcgcacactaggaagcaaaccaaccaaaaacacagtatgtacagcaaggttagcaagctggcaatgtgatggtttagcttagcggagctaggctagctgggcgaagcaaccaaacagacccttaaagtttggagatattttactttttgcgattacacgacagtcggcagacgcatacgcacacacaccattacatgcaatgccaaacacacatccccatgaatatgtcacctaacatatgctttaagaaatggaaaccagtggcatatccctaatgtcactaaatccctgttgaaagcgtaattgtatgtgcgtaatattcatgcgcactaggatttaaaccctattgggtaaagccatgcaccccacaatttcaccaccacaccactggtacttgaaggttattttatcttgattctctatgcgtttttctcaactcaattttttaatttcttttgttgagttagatcaatattttgaatcttaatttgttttaagtgcaaccattatatggtaaaagttagaaaataagagagtgtacacaaactatgaatgatatgattgtgattttttttacattgatgttgaattttaattgattaagatataactaattttgaatcttacagtaatttagagattattaatcttagagtaatttagaaattagtaatgctgatttttattttgagtaatttagggattattaagcttggagtaatttagacattattaatgttgaactttgattaatttagatattattatttttgaatatttgagtaatgtagagaatgttaatcttggagaaacttagaaattatcaatcttggagtgatttagagtttattaatcatgaatttagaaatttatttttttagatgtgtaccagggctctattaattttagatttatttttcgtattaagtggtatatgtatgtcaatgtttaatttgaattttttttagatcgatggataaagatggatctacgaaatgccgagcggttccttacagtcagctagcggagttaccataaccaacttgtgaccgcggcgacgagtttctgatcattggatgcactggaatatctaccttggtcatgcattgattgtgggagcaagagacagttttatgagaaacaagtccactcatatctcataacaacggttttatgtctaattatacatatcaagataatcatagggttttatatatacatagtgaagacgagaatatggttaaccctcgcaccatttccacaaaattttaactcaacgtatctattcatcatttttaataatacttgatttaaaaaagtacagatatgattatgaaggcaattctagagcttaagcccaagctgccctatctgtcttgcctctgctccagttgtgaaatatatagatgaatatgtgtttgtatttttttaagaaaatcaatatcctattagttaagtcttactcgagctttaggcttacaagatttctagcttcactataatagcaaagcacgaagtatcataaagtaataaagaattaaaacaccagcttgatcacacacacccagaccattcacagtgtgacacggagttttgctgaacctcacatgtctcctaggtcaagaacgttgttagccacatgcttcacaatgcaaagttgctagtagtaggtcccaccactaccatctttctcactttttccctttatcctctcccctccctctctctctctcagcaccgagccgccggacggagacggcgaggtggacgggcaacttcgcagctctccgcccaaccgccgtccacgctcctcttccccaccatcgttggcaccgctctccctcccccctctcagccgcccccttttccctcaacacttgcgcaacctttcgctccatcgccggccacactcccctttcccaccatcgccaatgctgctttccctccctatccgcgcccccctcccctttcctcgtcggggtggcggcggaggaggatccggccactcctcatcccctccttgccagatccggcgggatctggccttgggaggcggtggcaactcaacgacgacggcgggtgctcgacgatgccaacggcaggaaccgcaacggcggtagctcgatgatggcggtggggtaggttcaacgatggcagtggcggctcgacaacagcggcaacagctcaacgacggcggcggaggaggaagtttaggagggcaccagctccgactggggcatgagcatgaccacccaacgcggtttcttttgtcaccgagtgccttccacctgacaatccctgacgaggtttgtgcgttcaatcgacagcttgggttcttcttcactaggtcacgactcacgccgacgtggcatggaatcttcgagctggcgagacgagacgaggccgaatgtcatctcaccgcactgcgaatggcctcgtaataatgctcttcgtttcatcggtcgcatttcgcctgcgcaacacacgtacacaaaaaaggaagctggatgtgatcacacgcatatattcacgtgaagaaaggtacattggaacccattattgagggggggccatgctacctgccttatctgacatgtgatctgcatatatgctgccccagaaagagaccatccatggatgctacatgctccatttgccggagaggccggtatgggtcgatcggaaacgtcgacggcggtgaccgggtccttttctcatcctcggagatcacagatggcgatcgatcaggtccctccatacctgtaccaatgacctaacgcctgttttagttctcaattttttttttcaaaaacatcacatcgaatctcatgtactagatatatgtttaaaaataactaattgcatagttagggggaaatcacaagatgaatcttttgagcctaattagtccatgattagccataagtgctcagtaacctacatgtgctaatgacggattaattaggcttaaaagattcgtcttgcggttttcaggcgagttatgaaattagttttttcattcgtgtccgaaaaccccttctgacatccggtaaaacattcgatctgacatcgaaacattttcttttcgcgaactaaaccagccctacgatcggtcaggctctccctgaaaccggaaaattttgactggaattaattttgtaggattattaattaggcccatttagttgagcttgccttttcagctgccacttatactgcagcttggatcctctgcagtagtagagagcgattaagtatcctataatataacataaggttaattatgcaattacatagctagtattggtttgggattctttgcattgaagaagaagaatgcagaggcgctatagtccttgcgttagctcatgttctgatgcgttggatcttcatcgaacggtacaaaatcagcatgctacagcaaaaatgttcgacggtaaaaccgattacggttagaacacttttgcttcggtgtcgttcagctgtcctaatacatatcactgtagcgcatcactcagatcaccgtgtaaataaagttctctgtagtacatattttagatcatatatatataaggacatcctgaataaaagctacagtactttacgcaatggaaattccagtgctctatataaatattaggatactttgatagaatactatcaaaatttggggcgtggaagaccccaacatcagggcaaaaattgcagaagaagacttgtatgcatgtgctaccataatttggcatcacctcaagacataacaaacaaccttgcatgctgagtacgtagctagacgacaaagataagtttatgctgcagcacgaagacaatcaataaaaagcaaagagtggaatcgaagaaatagcaatattacttaagcctagacaaacatgacttgattgtacaaactactatgcaccgcatatcagacctgcaccatgcagtcttgcttgaatgtggttgcctgttaatctatagactaaataaagcagcaagaagggtcctcataccgcatatttcggtagttctcattgttagcctgcatgaagagcacatggttctcttgccgctttatttagtttgtagatggacatgcaacacatacaagcaagactgcacgacgcagatctgctatgcggtgcaaatagtttgtacaatcaagtcttgtttctccaagcttgagtaatattgtcatttcttttattccactttttgtctttttattgattgtattcatgctgcagcataaacttatctttatcttttagttacatgcccatgcatggttgtttgtcctgtcttgaagtgatgccaaattatggtag

SEQ ID NO: 22586 - DNA, 3449 bp, Oryza sativa
tcctagggggaggatgacaacagtacccttatgatttttcatgtttttgtgatgtatggctgattttttctctagaatttcaacaacgcaatttgcaaaatcatagtaacctgggaaattacatatctctacaaaaaatcacccaatatacatgtaaaatcaccctatttctctctctctctccagatctgaaatctaaaaaaaaggaaaaattgccgagccgtcgcccgcacactgtcggccgaccacacgcctcccgcctgcgccgtcggccgaccgcgccccgcccgcccaccaaatcaccaccggaagcgcccgcacgccaccggccgaccacgcgccgcccgcccacgtgcctgcgctactcctggccgccgccgtgcgtcgccggcccagatgcgccgccgccaaccctagcaacgggatgcgctctgaagcaatgggagaggatgagtacgggatgagaggggtgagcttggttgggtagggtaggtcagtggtattttgctgtaaatacgttaaaaatttaaagggtagtgggtcttttggggtggagtggagctgtggagcagaaaaacccagccccacacccttagttcattttttaggagtaactctactaactccactcctaaaaatggaggatctgaaccgtttggcatagctctagctccagataagttggagttgggagttggagctgtgccaaccaaaggaataagtttactttagaaccctcaatttgtcaccaagtctgaaattcattcctgaaaccaagctaccaggtacctgacttacaataccatgtcaactttggtccatcggcagtatagtgtccggttttggctgaggtggcaagtgagccccacatgccagcggtcaactcttctccctcctctccctatccctcttccatgtggtattgagctccggaggcttagccggatggcatcgcggtggcggaggatgaggccacgaagagggtgtggctggcttcgtacagctcctccaactcgttagagtcggctaaggtagcgcccgagcccaccacagagggaatgcaattgaaggagagacttggctctaacttcattagtggcatgaatcaagggccagacccatgggatgctgatgttggacagctgcacccgagttagggaaaacgactccaacaacgattggaccttgacgagggatggaatggggtcgccggatttcggggagcctgttggtggtgtaggccaaaacaattggggatagtggcggtggaaatgcactgttctgagagggcaaggcgacgaaacaaggagatggccgacgtgcgtgttccatgggacggtgtcggtggtcgggcaccagagggagatggaagacgccatcttctttgtggcgccattcttggccgccgcgaaggaggcggcgatggaagggagcggcgacgtggaagaggatagcaaggaggaggatgacgaggttcttcacggtgtacgacgggcatggcgggtcccacgtgcagaggtgtgccggaagcggatgcacgtggtgctcacggaggaggtgcgacttcggaagctgctgccaggcgacagcgatggcgttgatgtcaagaacaaggaccaggcccggtggaaggaggctatggcgacgtggttcaccagggtggatggcgaggtcgatggcaccgaggaggccgacacaggcgagtagatgatgggcttcacaaccgtggtgaccatcgtgggaccccgccatatcattgtcgccaactgcggagatccccgcgttgtcggcctgcttcgctcgtgcggaaagcgaggtctgtggcgtcgaggaggccaacaccaacacatgcgagcagacagtgggctccactgccatggtggccgttgtggggcccagccgcattgttgtcaccaactatggtgactcccgtgttgtcctctctcgcggcagcctgcttcgccaatgcggcaccaaggaggctgacacaggtgatcagcagccaccatcctctcccgcgatggtgtggtcatgccactctccttcgaccacaagagggagagagatgaggaaggttaagaagaggggatagagagtgatgacgtgagtgccgttgtatttctttttacttttaaccgaacacttagtgacgtgtgggtctcatggttttttctgactttatcaatgccatgtagacactgcctcaccaaaaccatcatccaaattgccttgggacattatttgcattggttttagaagttaagggacatatcatatttaaagacgaattttagactcggcgataaattgggagagaagtgaacttattcctaaaacaacaagtggactagtgcttggtcggccttttcatattttatttctaacttcacaaatttatgaatttagatctgtgattacatcggtaacatttagatatcttaataagattttaaaattttaaatcactataatgtaacatacgagcttcaaatttacgagtatcgtaaatatggagctgtggcatagtacgggacaggtaagggtgtgttcgatccggctgcggctcatgagctcatcatggcatgcaatacgagacaggtcattatatataatcaattaaatattaactattaaagatttgaaaaacatatttgtttgactttaaaaaaagatactttcagctatttcttagctatgtcctaatttattactgtgcatgtttcttaaaatgctaaattgtgtgttttttaaaatattttctatatcaaaatatctttaaaaaaatcaaataattatattttctaagtttataatatttgtttgactttcaaaaatgatactttcagctatgtattagctatgtcctaatttagtactgtgcacgctttcttaaattactaaatggtatgttttttaaaagattttctatatcaaaatttcttttaaaaaatcaaataaatatattttctaagtttattataagattttttttagaaaaacattacaatcatagacgctcataagctaggagtactatactttttttactaggtctctaatttcgccatgtgttcatgcctggcttagtaaaattaattgctagaaaacacataaaagcttagtaaaattaattgctagaaaacacataaaaaaaccagtaaattttaatttgcaagataaagtcatgaaggacgtttcttttaaaaaaagacatataaaaaaaaagctcacaatggatggtacagtttacaatcactatcaggaaatatagacatgaatatgataactatgataaatggctgtttctgtatagttggatcagcttttgaatttgcaattttaagacggatttccccccaaaaaaaaacaatttgtgcggccattaggcgttgagacctcggcgaatggcagccggcgacgtcgtcccacctccaccgcgcccacgaatc

SEQ ID NO: 22587 - DNA, 9162 bp, Oryza sativa
taatccaatctaggatgataaattttttggatcggtcgacgctgactaagtctaaatagtcctccctccgtccctaaatatttaaccttgttaatatttttaaacatatttgaccatttccaaaactttggtgaatattattaaaaacttgagtagtagtactttatttaacaatgaatcaaatgagtagaaaaaaattaataattactttatttttttaataagacgaacggtcaaacatatttaaaaaagtcaacggcgtcaaatatttagggacagagagagtacatatatacgcgcgcactaattacagtttgcctataaatatgaatggtcaaattttgctacatgacactgcttttgtgttgttttagccctaagacactgcccaaactcacttttgggggaaaacactccataaacatggtaatttgccagtggacaccgcaccgattaaaataataatttccggttgaaggggagagaaaaatcacgtgaaatgtcaaaaatacccttgggcccacatgtcagttctgtctcctatctctcttctcctctatattctctcggaggcacatggggcggcgtcagtcaccggggcttgagctcgtcgcggcggaggagatggtgaggactgcgaccggcggagtggagcaaggcgtcggctgcggcggaacaaagctggcggccgaagcaggcggaacggtagcgtcggccgagcgcgtggcaagcaaaatggagcgccggcggcggcgggcattcgcacggtggctggcgaagcggcaaggggaggagctgtgcacgagcggcggaggaggagctgtgcgcgttctcctcctcctcgagctcgtcaccatcgtcgtcgtcgcccgccaccaccccgctctgcgccgctggatctgcaagccaccatcccgcaacggcgtcgtgattcggcgattgggatgagagaagggcggtggcggttgcggcggtggcgatgagtggctcggcgtcgacgctggggatgcggtgcgggagctacggctcgctcgcgtcggccggcggtgggaggaagggcgggggtagggggtgggggtggcgaggcggcggggagaaggagcggctgcagctgctccaccgcgcgctgcggttggtgggccgccggagatcggggtgctgttgctgctcgccgctgcctccaccgccgtctacgcgggcacagccggcggccggcggggagtgacatgtgggcaggaagagaagagagataggagatggagctgacatgtggaccgaaggacatttttgatatttcacgtgatttctctctcctcttcaaccggaaataattattttaatcgacgtggtgtccacttgtaaattaccacgtttatagagtgttttcccctaaaaatgagttcgggtagtgtcctaggattaaaatctaaaatcagacataagtagtgtactgtagcaaaatttaccatatgaatgttaaacaaacccttaattaattataactacgcatattattaattgcatgggcatgacgtagcgtacgtgtatatatgtgcgtgttgcgtgtcgtgggttgcgatgatacatggagctgtgtgtgtatatatgtacgacgttgttgctgtcacaggaaggatctgggccgggaggcggtggtacgagtggccaggcccgtgaaatcgtggccgcctgcattcccaccacccaactaatcaaacacgctcgatcgatcgcaatcgtcgctgctgcttgacggacgcccagcaagctagctaccaacccggcccgaagtaaactacggccccccgcggacagctacatcatgcagctgctcaattattagtatttggcgttttacttagtacagtttgggtgtgttcagtttacactaaaattaaaagttttattaaaattaaaatgatattataaaaaagttaaagtttatatgtgtaggaaagttctgatgtgatggaaaagttcgaagtttagaactaaactcggtctttatctctattagcatatctattctaaacatctcgtatagttagtttgactctttaagattgataaagttattacatgcacaagtgtgtcgttatcgataggtacaagtaagttgtatatcactgaaaacaaacaaataataccaagtctaggatttgaattcgacttgaataattttcgtaacaaatttaactagtttagctgtatgttaactaaactgtgtcttatttcgaaaacagatgtagtatatcaggatagtataaaaaagtcgaataaatacccaagttgaaattaaagcactgacatgtactacctacgtttccaattcgaggatgaccacgctataatcattcttttcgcggaatactttacgtgctgatgtcactactacagattccatttttacaaatggggcaaatcgattttttcatgcggacggatggcccgcatacgctcaaaagtctgtgaaaatagttttttttcatgcagccagggcaaccgcatgtgaaaaataggtttttttcgcatgcgggcgcttaagccaatctcatgcgaaaagaaaaaaaccgtgaaaaaaaataaaaattccaaaaatccaaaaatacacataaaccctaaccctataatgctcttgccaccgtcgttctcatcctccagccaccgccaatgccagcgtcatcctctcatcaccgacgccggatcggggcaggggagggcggccgccgatggatcggggcgggggagggcttccaccgctcaatccaggtgggggaggtccgccgctgtttcccatgcccaccgccgctagagtccgcgctcaccacccttgccctcaatcgccgttaccggagccagccgtcggagtgagagaggagaggggagaggagtggggaaaataatagaggagtggagggagagtgagggcagccggatccacacgggtggcaccgcccgctcccagacacctcctcgtcggtagtggcgcccgccgccgcccgctccctctcggtgaggagagcaagagagagaggagaggagaggagataaagggagaggaaggagaggaagagagaaaggtggaacaatttgaagtgttgagtgggaaaagagagaggaggggagaaaatatagatggagtagatgagggtaatttcgcatgcggactacttaataggctagcatatgaaattctatttttcatatggccccttaagaggaccgcataagaaaataagctcatttttacatgcggctccttaagtggcccacatgagaaaatagattttttgcatgcttgtctcttgagcagtcgcatgcgaaaatgaagattgattttctagacacgatcagttccgatctacttgcagcctatatggttctcgtacggaaaaattgttttttagtgtgcgtacatatggtaccaaatatgataagtagttaccagtgtatgacattaggtatcatgtttatgtgtaacatcctcaaatttttaaactaaaatttgactgcatcatgctggcttttgattaaattagtgtgttttaaaaaaaatctatttgattcttaaattggttcaagtattacttccttagagccctactaatttactctaattattccctttatttcaaaccttagtgaatttgagcaaattctctcaaatttcaaactatagattatttacctagcttaccctaatattagtgaggatttgctttactccaaaccctagtaaaaccctttcaaattcatagattaaattcaatcttttctaggaaaatatacaaaattcttgaattttactgttcatcgcacacaaggtgctcgatgaaatacccagcccagctagagcagcccaacaccatccaatcttgcacaaagtttaggtttgatcctaggggaccacatcccactcaaaaactgtggtttagttggccttctcctccccttcacgcgcgctctctggcgttcgactttgccgcgcgccgagccaccgcgcgtcggtctctggatcgatcgcacgtgcccgaccgccttggcacgccgtcacccgtccgacgccctcagaccgtcgtcaccgcaccaatcttcatgacgacaaagccaggatgacgaccgccgccagaaatcgtcgctcgacgccgtgcgctcccgtccaagccgccgccgagtgcgatttcgcttctacccggggtgaatcgcgccaattcttgccgcacggttggattgaagatagacggtggtattccctctcacaattcaaaccattcacccccgagtcggccgtttccaccctcgccgccgccacgagtcgctcccggattggcgccaacacgtcgccagcagatttcacacgtagtcaagccaatccttcgccggtaagtattcaaacgtggcctcccgccactcaaattgatcttggccgccctctcacagcctctgccaccccagccatatccaaagctcgagctcatccatggcgatgacggtgcccgagctcatccattcctcccagccctataaataggaccccaataccttccttgtccatcatcaatcatcaacaaccatagccccacaacctcgaagctctgctttcccaatccattccatcaaccaccatcgctcgtcgatcgaacaccttgtgcgcaatcgactccacacctctccatccatcctccgccctaaatatcccttagaacaccttatatcaaccatgttctagcatagtagaccctaaccgaagccctgcgtcgagttttacctcgccgcaccaagccgagcaccgccgcccccgcgctgctctgttcttcgccgccgaggagtttttccgaccgcaatccttcatctcggcatatctcggtgagttcttccgttttaaccatctacatactccctagattccattttagcaatcaccttgcactatcatgttgccctctgggctgccgacgtgagcacggccgccgcctatggaggcgctcgtcggcaactaccctccgcgccttgccaaaggttggcaagcagccggaattcatctaggtacctcgtagatgctctagaacccctcccctagccatgtctaactcatatcatcttgaccaccatcacggcctaaccgtgccaccgccgccctagccgctaggccatccacatatcaaattaatccctccgctgccgctcgccgtcgccggagaaccctagctccctcccctcctcggccgcaaccactttccccctccatcgctgccgtaatcgccaaccctagcaccgccgaccgcttttggggattggccggaggtagaagaagagaagagagagagagactgacaggtgggacccacacacagtgctatttcacatttatttgattttcaaactttagaagcccatatcttttaaaatatagatccaattccagtgagacttggaccaatattcttctaaaatcattctctatcttttaagcccatttttgctatttttgcattttattttattttctctatttttcatatttttggattttatttgaattctttttgaatttgaattttatatatgtctaaccttaggtcttgaggattcttctgactcaatagataatatcaatcaatctcaggacatcgagcaaggcaagttaccatataccttttgatcatttaagcctatattttataaattatttatttatagccttatattcaatattctattttccatgcataaattaatcatagaaacccagataatttagtattgcttactttgcttacaatctggttaaaataccttatacttagattgggacagtacgtaagatttggttgatttccgggtggctagtactgtctcgatcgatataagttttaccaggtacttatgtcgaacgaacaggtacgaccgcagtttctagaatagggacagacctagttattatgttaattagcaatatggcatctctgtatagtggttcttatttttaagtcctcgcgcaggaggcaactatagccgcgaagggcaactttaaccattaccatgtacaggtaaatggtttgtgatactcgagtataaattatatggtatatttctaaaccctgatcgagatgacgtggtgtcatacgatcagttccccttaaatacctcgggaacgccagaactcctcttgctactgttaacaatacgttcagagcatatgaggatataagttcatggaacatgtgccataattgttaatgacttaatactgggccatgactaaagccgatgattatcagcaagtcgtggactgcgggtaaagcgtacatctgctgcagtagaatatctttaaaactattcgaatagccgtactcatggagttgagtaccgggactcatatggtaccctagttagaaatctaaagtctatatgttttataaactcttgctataactctttcagattgtctagtactgcttttgtcaaagaaccctactatatgtcaatgcataacatatttccatgataacttgttgagtattgtgaatactcacccttgctcttataacccctttttcagatttgggtcaagaggaggacccttatgactattactacgatgaccccgataacttagagaatccttaaatattataccttcctagtcagaatgtatagaaacttccgctgtgtattaattagttaggtgagtacctattattgtaaaacccttagtattgtaaaactttaacatatgcaatgaagaaccagttatattgtatgtatcaatatttactgatccagggactgatacattatcttagtcggatccaagttgttagttctgggctccgacattatgcatatattaatacagattgtaccgtctaacactatagtgttacgtagtttttatgtttcaattaatgtaatactccctccgttttaggttataagacgttttgactttggttaaagtcaaactgctttatttttgcctaagtttgtagaaaaaagtagtaacattttcaacccagcaaaaatttattatgaaaataaattcaattattgatttaatgaaactaatttagtattataaatattactatatttgtctataaacttattcaaacttaaaataatttgactttgaccaaagtcaaaatgtcttataacctgtaacggagggagtatatcggactgttattccgttaaatacttgtgaagtcacactagaggaaattgttgccaataattttacatgcagtttatctaataagctctagataaaaaaattatacacataaaaaaatcacaaatcaactcttttcactatcatgggtcacaaatcaaagcatgttggaggccaaaattggatcaaaattcaatttaattggattgttcgaatgtacctattgaagcaaaattcggtttgttcagtgtattcggttaactgaaagtactaccgacttgaccgaataaaactcggtcgtctaatacatgacactgaactaatgatcaaatttctcgatccgggtcttttcggtttggtcttttcatgcccatcaagcccctagatatttggtagagcagagacgggtcggtgtgttaagaagataagcaagcatacaggctggtccatatatatatgttgggctgaaactgaaatgggctttaggcgagatttccaaactgtactcttcgtggggaaacaggctgtggctcttgcatatgcatgggccgcgcagactgctctagttttttttttagaaaaaagtatactttgacaccttcaactataggtcgaatctaaaccataccccttaaccacagaaccgggtaaaacgactcctccaataattaaatcagtgctcactgacgtggtgccaatgtggcacggttgacttggtcttaatctgacgtggtgcttacgtggcattacaatgaaaaaaaaacaaaaaaaatatgtgagacccacatatcatttacatgaaaatttattgtggaacccactgaccatttggggcccacatgtcattctgtccctcctgcctttcttcttccttccactccagccaccccaccaccaacgcgccgagctcattctgcacaaagatggtcattgagtactccttccacggccgcgccatgtacgtcagattcaccttctccagatccgggtgcggcgccacagtgcggttgtgcagccccgtccctcccgcgacctgcgccgttaattatgatgttcacctggttccccatcggcttctgtagctggatcaagcagttctggagcaccacctgcatgcatttcatttgcttttttctaaatatttgcttattcttcgtcgtcgtcgtcgtggtggtggtggtggtgttaattgttggatcaaaagaaacagaagaagaagagtttaattatatacttgcctgcgagttgcagtatatgaagtcgatggtgccagacacggagcagtcgcggaagaactgccgctgcgcatgagtcttcaccttgtccgtgaacttctccaggtccgggtgcggcgccaccgtcacgttcggctcgaattcctcggcgatccacgtcggcatgccgtcctcggcgatcgagcagccgccgcccgatgctgaggctgccgagcatcgacgagaactggtcgaccacggtgaggatgtccttcatgagctcctatcctacgagctgttgagcgccgttgcgcatcttggcggcggcatcgcggtggtggtgttgaggaagccgtcgaggcaggtgccctggtaggtgagcgtggcgctgagccacgtgcggaggtcgtcgacggccttgttgaaattggtcatatcgaagccaccgagcttgtggaaggacgtgttgaggttgtctatggcgcacccgagcagctccttgcaattctgcagcgctcccactattaaaaccgctggtgcccatcccggatcctgctctacctcgttgtcgccgccctctctactggagaggggaggaagaggaaggagaagggaaccagagggagagagagaagagggaggaggaagaagaagataaggggacaggatgacatgtgggtccacatgtcagtgggtcccacatttttttttacaaatgggttcctcattttttttattttaattccacatatgcgccatgtcaatgccacgtgg

SEQ ID NO: 22588 - DNA, 5213 bp, Oryza sativa
agtattaataattataaacttgaaaaatatatttatttaaaatttttaaataatttttatacaaaaaattttcataaaatgtatatcgttcaaaaacgtagtaaaaaaaacaaagaagttggaatttagagtcgaagaaaactggagagagtagtctctctactgtgagtggcaagtgcattataacaagtttaatatatagtatagccaactattaaactattagctctaaattatctataattaatttaaaagctaatatatataatagttacctataaacatatatataatatactacattgttgataactgatgtgacctgtcatatatatatatatgacttcatggtgtccgggctccaaggtataaaacacacaaattctcttaaatttttaaaaatttttaaattgtgagtatatacctaggtatatgaatttgattcatataaatacctaacaacaaaacaacttaaactcaattttatttcacaattcattattacatacctaacgaattatatgtttggatgctatatacttagaaccaaaatctaaccaaaataaaagttcaaacttagttcaaacttgtttgaacatgttagtaaagaagttaatgtttatatcttaatttacccccgctctctctctctatatatataggccgctactcttctatctaattttttatttttttgatgtgtgtttataattgttttatagctgtacctgctatggttatttataggctatctataagagatccatgtcagcatattttcctacatggaagagattaaataaagagagagagcaaagctatctactaacctggagatagtctatagagaaaaacgaagcaatggattagagagctatagatacccatatagacatactattaaggtggtttactattaatctagtcaattgctaagatgtacatattttatattttatagagagcatcttactttatcatcgtggatgtcgttaaaaccacaatgtgcgtggtagtactacatggcagagggtagccagctactctatggcgcctactctgtgccagtcgcctgcctacagcctactgttccgaatgccgatggccgtcgacccgaggtgagacgccatggagccatggagaccctactactcctagtagctgcgactttgacaggcactctggcagactacaccaccagttgatgtgatggaaagatcgagtgccattgcagtgcacaggaatcatatcatcgattcgattctccaataatctgctccacctccactgccatcggcatcctctctagcgtaggagtacagtagtaggagtatgtacctctacctattagatgccaaatgtaatcattttcgtgtaaaacattccaaggtatccaacgtttcaataaatatcttagcctaaatgttaaatttgtacgtgcagtttatattaccatctcccctaaacgaaagaatagaaaataaaaagaaagaatacagaacaggatcacgttagaacggaatattttaagtgatactaccttcctacttccacgtgcgctctctctttgatacctggtacatgtggtaccgattgagtaccggctagtacccgatacctggtaccttgggtgccagttggtacctggtacctagtatatttgctactgactgagtactggctggtacccggtacctggtaccttgggtacataccgcatggtacctaggtatcagaccttggtacctgggtaccaggcatgatacttgtgggtatcagccatgattcctcaagatacccccaaggtagtgaggtccggctaaaagccggccgcgaccatctccaggaacacgcgctgcagcaacttcatcttgaagttggcggcgaaggagacgaggtaataatcctaatcgcatatctaaaccaaagaagatgatatttatttggtaaagcgcattctattatcgtattgcgacactgctcctatccctaacgctagctctgttgacttcattccttgtcggtgttgcgagcccctctactttacgaaacgaaggaaaatagcaatggaatgagaggtcccagagtaggttgccgccggtgttgcgacaaccaaggcaccgggaccgctggcttcttctccttctgctacggcagcagatgagccattggggcgggcctaatggggggggcatggagcctcagctgaacaactcctccaaattccgttcgaagcaagctactattaaacccaaaagagaagctttcagatctaccagagaagttgagtttgaggcaaagaaaaaaatgggaacgatgagaaagaggatggtcatacctacactcaccgacaaggaggcagcgggagcagcgggcaaggacggccgcgctggtggctcgtgggaagcgggcgacggagacatcggcgttgctcgacgcaggcagagaggaggaactcgcgggtagacgagacaaagtcgaggcggaggggaaggcggacagaaaggttgcccatgacggaggaaagagggagacaaggggagtgagtatgggagtggggattaatttatctcgcggcaacggaatcctttgggttagtttttctcaaaaaaaaaagattttgactgaaatccaagtgcaaaacaaataatcgtaaaacataggaataatcatttgcttggaccacagaaaaaacacgctaatcaaataagagaggtagtctcgaaggaaatttttcaagaggttagaactcaggaaatttttcaagaggttagaactattactatgttttctccaaaatctctatagtactgtttatttcatatgaattttaaaggatatgatcgaattaaatcatttatttcaaatatcttcatatggaatttcttataggattgaaatcctccaaaattcctatatttgtttacaaatcaaacggacccatggacagggcccatagtgtccagttatatttgtggatacttaaattatgtttactcccctaaactttttctttggatcccttaccctcagcaaattatttggctcattttacactaacctattaaacatagttcagttaataatatttatcttgttttccactttatacaagttatattttaagctgaaattattttatcgctatagttgacaccatcatggatgttcaaaaatattcttaattttttattaatgtttgctttctttaaaatctagatggtttcaatcaatcttaggtgcttcgaagcaatgtaaacaacttcaaaaattaagaaaatttcgagatgtaagttgcaatgcctctatcatcttaccaaaattctattgcaaaatatgacatatatagagagaggaaaaggagaaataccgtcagagattaaagttagtcatttttaatagtttaaggtgtaaaatgacaaaaaaataatttagatgattaaatgctcggggtgaaataaatggactttttttccatacaaatcgatccacttaataaactttaataagttttatatttaattataattagtagtaccgagtttcgatagaaccagagcaagaaatagcatccggacatccaaaacatgagatattttgcacagtaatattgcccagaggtggtgggccgggtggctaataattggtgtctgcaggtggagtcatcgttggtcgtatggactcttaatatttcccaatatttttaggagctctttttagaacaacttaggaatgatgtagtatatataatacaatgtcatgaagaaaaataaaatttggatagaaatgcatgtgcatgtgcaaaacagaaggttataaaacgttgcaaaattctaggaatgattaatttgcatatttgcgttgtttggatagatcatgtaaaaatacggaaattgtggagagagggatagagagagagagaaaaggacgggcagctctagaaaatagtatcattatgcactattcaaatactagttgacgcaatagttagtagtttcaatgcatgttcgagctcaatatgtgagggggccagtagtactaattgacgcaataattagtaacaaaatatttcccatgtttttctacgaaatatatatatggatgaatatatgttatatattatataaatgatggataggcatatgctaaaaacattgtgtaaatgatgtgctcttaattcaatacaattacgtacggtaacaattattaggaggccaaacccacctcagtcgaaagaaggtctggtgctatcatcaaagagattaacaagaaattcgatgttcttgtaacaaaggtttcttttgaagttttcgagaaattcaatcttatgagaaaaatttctaagtggtcctttgaatcgaaggaatagctagcaacaaaactcctatgaaatttcacgggttgctcaacacatggggatatttgaggaattttaacctgaagttaaagttctaggggaaaaaaattcttgagtctatctctctcttgatctctggtttttttttctacgatagatctatccaaacagttattcatgctttttttgtgtgtttttccaatttatagattaggtgctaaaacacacaatcctatatttttccaattcatgtgtgtttaagaaccttatgtttcaaaagtttatgagattggaacattttaaatgaattgcttataattcttaagtctatatttttcgtttcagtgaccagatacaaaagtattccataggattcaaatctaacagaacatgaactttttgacaaaattttgaagaaagtgaactaattcttataaaaaatcttgaaaaaatcattgtaagaaagtactcatttatattataagactttaacttcttttcttagtcaagctctcataagttcaaattaattttattaaatctaacattgaatatatcttggtcaaacttatagaagttaggctaagaaaaaattgaaacgtcttatactataaaatagaggaagtacacaatatatattttgctaatcccttttccatacttaatagtataatactttatccattttaaaatataaagcacaactataactaacaaaaagaccaaaaaaattattaccttctggtttaaatcatcatttcaataaataccatgcatacatttaacagacttagatatcttcaaagtaaagattaaaagccaaaattagagaactagttacattatatagttgcgc

SEQ ID NO: 22589 - DNA, 4716 bp, Oryza sativa
ttgaccgccaatattactaaaatatataatggagaactagctatgcttataatgcatatttgttttcaaataatatagttccacttatacttggagaataacatgttgcaggaatttatcaaataaaataaagagaaagtgaagagacctcattcctaagcaagcaaatggattaagataggctcacaagtcaggtgtaaccgtcggaaaccgactttcactgtcacaaccgcctaaggaaccaacctatcagtgcctgaccgaagctggaggcctactagacaggcccaggtttgtgttcggccgaaccctagtggcgacggctcagctcggccctccatgtgtacgctccagatactcttccaatgacggttacaggggcaaaaccgacatttcgcgttgctacaaccgtcataccggccctataaaaggaggagctcattcactctcttaacacactcaagcaagctaaattcctctccatacattagtattaatagtatggtgctaagaggaatagtatagaatagtgttcgaaaggcctcagagtcttcggaagagttttcaatatggctctagcagctcttgtaatctcttttgtaatactttccgaattaatgaatattcttctttatatatcttcggcactttgcttagtctgagtactggtcttactttatttttgcattatattaattgtgtgggtagtctaccagagaggtgttatggtgcgggtttaatgtctgatttatcagttgctctatgtcgactgcacgggtatagagtagtatttgataatataagcatggtgcttagattattaaatatcattagttgggcatatatgctgcgggacagtagaggtgggccgctgatggtgacagctcagtacggatattcctccatgttagtatatattcctaagataaattcctggggagggtactcctccgtatttaacctcggttggacggtcatgacatgttatcgtacggaactcggcaacccggggtggtctttcgaagtaccaggaggacactgttagggggtattagccacatgattgtacatttgcatatgcaaactaggatttgagtgtatactagaagtataggaattgaatgctttctatttcttcttccacttacttagaattatttcattacgaggattgaatagctttgcttcatgtcactctacccttatattacatttaacccctatttaggctttgacaattataagtaatatacgtataaagtgcattagcaatgctcactcttattatcttcccttgacattaaaaatacgataccttgaagtacttccgggtgaaatgctataatgatatatccgtgcgcttgcggataaccataaatataccaggactatttctggcgcaattgctaggaatgaatatttctagtaatatcgttaagaaataccaacactggctactgtagagggatggtggcaacaacggcgaccactagctccaccgaatcctaaaggagatgaccggatctagtggcagcaggcaaggaagactagctccaatgatgataggtaaggggatgacgttcatcggtgcggccatgaggagcttttcggacattcgatcaagcagtggcgagtgaggggacactaacttggtagtactccctccctccatctaaaagtgttagacgtaggatgttactcacaattaatcttttcattagtgtagaatagatatggcaatggtgaattcaccatcgggggttacacccgcgtccccgtcaccgcggtgaaaaaatttcatcgtccctgtccccatcaaccacgacggggctacaatttctctggccccgatcaccacgtagtgaatttttcccgtggtgaacccgtccccggttaaacaacatattgacagtcacattatatcaatatatatccaaaatactccactcaacaaatcaacaaattatagatcacaatcacatgaagacgaataactcgatggagaagaactagaggtagacgtctatcgagtacagagaagggattagggattgtagcatgctcaccttgcatcgtcgctgtcgtaggctcgtagcttagggggggggaggccgaagccatggtcggcggatggcgtgctgacggtggacgacgtgcggggctatgggcgagtgaagacggagggcgctggcggaagtcgatggtggctcccggtggcgcggcgacgtcagctcccgccggctcccggtgaagacggctgcaagcgccgcgcccggcgccgtgtcgacggaggctgtcggtggctcccagtgaagacggctgtaggcgcagcgcccggcggcgtttcaacggaggctgctggcaggtcctggcgatggcgtctgccagcgacggcggattcagtccatgcgtctcccggcggctcccgacggacgcccgtgccgtgcgagagaaggcagcgagcggcggtgcgcctggtggctggcggattggaggtgcatggcggcgtgcctggctcctgacggactggcggatggcggtggtggctagcacgggctgacgggcgtgctgccgtgtggatctagagggaggattggggattttggatggaggatttggagtttgacatgttgatttagggttagcttttatatatgcctagtaaatgggcttcaatattatgggccaaaacgtctaaaaagtctaaatttagtcctctgtacagtaaaatcgagtcaccgcggggtccccgcccccgtcatccctgatggtgaaaggtttttaaccattttattccccatggtgaatacatattaaccatccccgtcacctaacaggtgaattcaccgtggagaaacggtgaacggagcctattgctatctctagtgcagaagcatttttagtttggtcatatgcatgcagcatatacttgtataggtcttgcatcgtggcatctgagaaagtgcatggttgtacgtgtgatatgtgcgtgttgagagctgtgtggatgcggctgcacaagaggtgtcaaatatctgcggggtggcaaggcttatacttgtactcctttcgtccaaaaaaaatgaatctagaactggatgtgacataatctagtacaatgaatctgggcagatgtatgtctagatttgttatgctaggatatgtcatgttcagtactatgttgattttttatatgacggagggagtatgtatctacgtgatttagttcgtggctagagaataggtcctggatcgtggctgtgttgcgtcagtctcgccgaagttgattggctggtttgttattgctttggggtgtgtttagtttacgccaaaattagaagtttagttgaaattggaacgatgtgacggaaaagttagaagtttatatggctgtgtttacttcacaccaaaattggaagtttggttgaaattggaacgatgtgatgggaaagttagaagtttgtatgtgtaggaaaattttgatgtgatggaaaagttgaaagtttgaaaaaaaaactttagaactaaacacggcatatgtgtaggaaagttttgatgtgatggaaaaattgaaagtttgaaaaaaaagtttgcaactaaactcggccttgctcgtatgaatctatataatgagaaaatgatgagggttgttgtgtggccatatcaaccaaaagcatgtgtgatttgttcagctgttctgttcgtgtccaccgactaaacaaagctacggctgtgtttgtgtttagttcacactgaagtttggaagtttagttgaaattggtacgatgtgacagaaaagtaaggagtaattcccaacataggagtattaatatttttatcattaagatcaagaaaaaattaactcatccagtataaaataaatagtaaatagtgtatacatacatataatcaatgagtattaaaatgagtactcgtattttggtcaactatttaatttatctctcattacattttgaatatatgcagactgcaaatataattatcttatttgatggagggggtactactggtcctctttgtctgaaatcgacgggtagcaatgcacgctgcacgcccagtgaagacgacgacgacgcgggtccacggccgaccaacagctgaaaagaaaagttaaacaaagagcgggaaaacattaaaaaagcgagcctaaatttcttatcctttaagaaatttgttgtaccttatatacttcctgtctcctcccctcctcctcgccaaccacaccacatctcaaactctctacacacgtttccatgtagagatcgatcgatcgatttctttgggattcttgagctcatccatccatggcgccctccttctccatccggtatgtagtttgatgctttgtgttttcttgttttgtttttttaatttttggtttcttgatattcttgtttcttggtttggtgttgactgacacgaaaaagggagtacgcggcgagcatgaggggcacggcggggttccggcacccggccctctccgccgccggggacttcccgccgatgccaatccggaggttccggtggtgggtcgacgagctacacgccgcggtgagtcgtcgtcgtcgtcgtcgtagctcgccggcggcggcggcgccggtggccaggaagacagcaagcggtcggtctcggacctgttcgccgccaccggtgaagcgccgaccatggatagccggcggcggaagaatccgaggt

SEQ ID NO: 22590 - DNA, 17236 bp, Oryza sativa
  unsure (1)..(17236): unsure at all n locations
aagaagccgaggtcccaagaagacgacgatggtgtcgagaagatgaagaagaaggggatcttcatctcctccacaccaaatgctccaaaggtaactactagcacggtgtgcgtggggtccatgatgtcatcgtcctgtagctcggcctagctttatgaaacagtgcatttaaagctcctagacttttcttttcatggaaaatttcatttctgatcctagtagtagaatatatctagattagctttctgctcttgttagactcctaagcaagataaagttaattttagtatagatatagcttggattagtgatgggcgtgaagctagctagcagtagtagtagtgaactagtgattgattgctgctgttttcatgtttgggttactggggtgcagtgtgttccacttccaccaacacactagtggcctgaaacttgtgcaatctgaggctaattggcttgattgtttgcgtggtttgattaattagtacacatgtgtaggtgcagacatgactttgtctgtaatcttatcttagggagagcgttatatttcatgtaacacgtgctactccctccattccacttaatcaccctatagtttttttagttattctcaaataatcatcatattaatattattttccaagtctattcattatatgtacataggagtaaaaggatattgatatatccatgcacataaccctttataaaccaaaatacaatgttttgatttgtggtttgctagaaaatagtatggatgcatgtatacatcaagtttgttactgaagttaaatgtagtatgaaaagttattatcttttcttggactcggccaagaaaactcctctacccaaaaattagttttttttttgttggaacagactaattaacttggagctgctaaatacgcacctctacgtacggattatgcagtgaataacgtgttaagttcttggatcgtacaggagcataaatacttaattgctgccattattattccatgcttaatagtagtactcctgtatttagtttgcaggagatcgatactcctagatagtactcctcgaattaattataattactccttgttcacagtagaggagaggaatcgatcgaattaagttcacagtggcactctgcagagtcgtactaacgtggcgctagctgcgtgtaatactgatggatgataggacagaaggcagtagctgtacatgacaagtagcagtcctagtcttcattggtactagtgtgcatgcgtacctttgctgtaatgcatcttgatcgaagagttactgctccctaaatttccgtgtccaatgtttgactatccgttttatatgaatttttttttataattagtattttcattgttgttagatgataaaacatgattaatactttatgtgtaacttgtctttttaatttttttcatattttttttaaataatacggacggttaaacgttggatacggaaattcagagtttgtcttttttttttttggacggagggagtacacttgtgagtagcattaattgttttatttttcttgttttatttcatctttaaatctttttagtggagagtcccttgatcatagaatgcttctagctaagtacccatttggccatttccatagggattctctccctatttttacatacagaggattagaggaaggcatataaatagagaggtatggagtacaaaatatagacacatgactgaagtagaaaataataattttggggtcagatttttacacttggtactcttaacaatttaagttaaaggcgacgctgaaaaatagaaagcgatgaaaaagaattctaaatttggcaatttagatcctctacagtactgctcagtgacatatgggcctgaggatctatggacccgcatatcagtgagaccttcactccaaatttggtggtgtcttataagcaaatgagttggtaagtacccaccattcattctttttttggtattgttttataatgctgcaatgtaacacttgaaatctttaacacactaatatattaaattgttaaaatttgatatgtaaaaatggcataatagatttgtcataaaaaaaacttccatgcaattaataatattataaaatataattattaaaagtaatggtacatatatgtattatattggagagattgtcaatgtaataaacgatgagtaactacaaaatggaggggatatgtggacactccatgcattaaattttcaagttattggcttaaatgagaaatctcttgcagttggctaaataaaacagtattgtcgctttttagatactaaaagcgagtctagaggaaagtgagctgggcatatctataaacaatatatgcaacaattccaataagtgggttagtgtgtgaagcactagtccttccatgcagtcaacctttcaaaattttttattactcatatttatttatagaaatacctgaatttatccatgtggatgaacagcatatatataataatctgtaaaagcgttcccatgtcattgtgtgttcaacaactttttttaacatataatataactagaaaacatttgtggccaacggtgtgtattagactgtgccaacgtcactactatagaaatggtcttcggaatcggtggcaggtaatggagttgatgggccatttgttgtactggctgaaggagctctagagcggtgatgggccagttgtggcttatatataggtgcagctgtgctttaggcccaaatgctagtggctagcgcatgtaaatgggcgaagtctaaagaccgaagaggtcatcatgagtcttcacccattttatctgaacagctccattgggggtatttcccggtgggtaaatttcttgattttctcattcattggacttttggatctgagatgtatgtggatatccaggtatacatacatctcagattgaacagtgcctacatgatacatctccctgtattatctagcggttatagcatcattaatccagatttagcaaatgagtagtataacttatgttattgacaagattgacaactttgtagttgtcactgtttttatttgagagcatttctgcacccggaaaaacatgtattggactggacttcatttttggagctctctggattcatgcaaacttgattcttcattgtttctctttgggagtcctagaatgcatccatcccacgtgaaggaagtataagaagcaattaaacaagattctattaataaattgtgcaatgtaagtgtcctaggaaatagatattgatcagtttcagtttttttctctcaatgaaacaatgggaccggctgatctgactacttaggtacattacaatagaagttgcagaaaatttacaggaggaactttgtatgaatccacttcctagtccattctgaaaattgactcaaattgagctcacttagtttgcatgacaagcagaactaagcttctaactctattgctgaaaatggcataaaaaaaacctggttataaataggcaaaatttgctacaggacactgaaagattgcggtctttgctgtgagacacccaaagatcgtgaatctttttgtggacactgtaaaaaagtggtaattagctgctggacacttctcccattattttattatttccggtcaaaatggagagggaaagagttgtgtaagtaccaaaatacccctgctctcttttctttcttttccccttcttcttcctcgctgagccgagcagaggcgcgacacgcgcggccggcctgagccgagatagctcggccacggcggggcggcggcgcatcgccggggttcaccaccgacaacgaggatgcacggcggcatcccggcgcatggcgcggcgatgcacggtggcaccgagctctcggggagctcggcggcggcgcaatggcgaccgggccggcagggatacggcaggagctcattgatagcgattagggtgttgttgatgtagcagaagccactggccttgcacgcggacgcgtggtgcatgccgccggaccagttgatggtgatttcgaaggcgccgtcgacgagcgcgcgcgccgcggcgagcgacacgccggcgtagccacaacaatacttccatacttccagaggcggtcgaaggtgggcaaatcatcgtcgccgccgagtaaaccaatgccgtggtcatcctccgccttctgccgaagcgcggtgtcgttgacgtagctctccggggtgaggtcgtggaggaggtccgatgtcgccgccgcgtccgacgctgccgtgaccgccgcgtaggccgtcgtcaggagccctgtgatgagcgtgccagagtcgatgaccatgccgctcgagaacgccgacggcgggatggcgagcggtgccccgccgacgctgatgccggtgagcgtcatgacgtagaacgtcggcaccgaggggatgcagcgcatcggcgtgaacgagaagccggctgctgtgttgctaccgttgggcgcgccgagggcgaggaacccagtgccgccgctcgtcggcgagaggcagtacgagaagggcccgccgaattgggaggacgtctcctgtctccgacacgagcaactccggcgtgccaccgagaccgaggaggctgtcgaaggtgaacatcggcgccgcgttcttgaacctggccacacacagcacgtcgcccacgcagtagcggtacaggccggagtaggtggtgacgacgagctcgtactcgtgtccgagcttgacgtcgacgaggtcacagtggtcgggctccggggtggcgacgtcgttgccggagttgatgaggaggaactcgaagtagaacactgttgggatgagggtgtaggcgacctcgctgggcttgcacagggggttgaggttgagaacgtgctggtggtcgacgcagcactccagcgttccgctcggcaaaagcgtcgcgttgctgtcgaagaagaacagagaaagagaggaagaagaacggagaaaaagagattgacaagtgggtccatgggtaaacttgtcttaaaccaaaatttctctctccgttttcatcgaaaataataaaataatgcgactggtgtccaccagctaattaccacttttttagggtgtccatgagtaaatacacgatctttgggtgtcttacagcaaagaccgcaatctttcgatgttctgtagaaaattttgccttataaatatagtgctacattttaaagtttcaagtgaataggcaattctgacaatccgacaagattgaaaagggacttccaagtgattgcatcattgtaatatttcctgacctaattatagtgaccaaaacaaccaagtctgtccgtccatgcagtttttaagtttatgctgtgtaatgatgcagtgatagataccatatataaagatatagtgactatgttgcaattatttaatctgcatatatgacttaaccctcatggtcgtgcaactttccaggtttcagtaaacaagttacatcctccttctccccagacatttcaggtacatgaaagacaaaaacacatcaacatcgagaatatgaagatgtatgattttgaaatatggaagccagagaactctgctaaggtcccgaagaacagcattctgagaaagcatacaaagcgctcctctttcactgtcagcatcaacaaggagaaatgcagcaatctgaaagggtcagaagccatagagctaagccacaagttggggaagcatgttacattctcaggggtggatgacatacatattagaaacaagctaagttccacgttaccccaactgcaaaaccactgcaatgtgtactcagacaagtctaatgaagctgacagattagtatctgcaaaaattagttctcatgagaacaaggaagcctcaggtagggatatatacgacagatggacttctgaatcaagtggtgcaaaggacccaattaacttgattgatctgaatcgcacgctcccatgtattcccgattttaatggcgcattcatttctggttcagaggtgcctgatcttgagcatacggagaatgcaacttctgatctccaaatacctggtgatgtaagagaagaagctgttcttaagcacaatcaagacctccattccaaatcaccgcgatcgcagtgtgaacttaacagttgtgatcttgggagaatcattaacttaagatcaatagcctcactgttgcctgatgaagcaattaacatttctgacagaggaatgattggtcatccattgaactcaacagaagttaataagttttatgctgattatgagagaagttcagtaagagatgatactatggaaggaaaggctccttacatattgcctcagcatacagttcagtacacaagtcagtttacggagaattggtacaccaatatgaatttgggcaactttcatcatgctggaagagaattttcttcttgtccatgtgaaaaccagctgaattctgagaaacccatgttacattctgaaatcaatgtgcaacatgagcatgcagttatgtcacaacgtaccatgcgtctgatgggaaaagatcttacagtttccacaacaggtggcaaatgcattggtgagacagcaaaggtgcatgtgaactcctctgtcagctgccatcatactactaatattttcttagagttgccacgacaaggtcacccgtttctgtcactgcaatcccgaagtttttccaatatacaggtagatgccccaagcacaagccatgattatgttggatacaaaatgcataatttaaagcgtcgttttccggaagctgatgttttctctgggaatggaatcgaatgcgaagataggttgagggacttttcatatttgcactgtggccaaaatgcgcttgctggattttcacctcaaggaggaaaatacaacacaagatctgatcaaaactcactgtctgctacaacattcttgcctaccttgataccacatgccaagcagtcagcagtttaccgtgccaattcaacttggaaacataatccctatcctgcaaacttactagttcatcctcctgatggtacaaattttagaaaggatcaaaaccagataatcagaggagttgcagagatcccaagttctgtaaacccatgtcaagagatactgtttggaagacgagaaaaatagacgtcgacaattctaacatttcttctggtgtcaggtatatttcaaggtctggtccggtgaagctccgccccggggcgaagcatgttttggagccgagacaagacacagatgatggcaattatccacctatgtattcatgtgtaccgtttttcgttataagaaggggtggaaatattttgtctggtcagactaaaagtcatagaaaggtctaatttgtagcccatcagatgaatcattcggattatattttgtcccaatcaatggttatggctcaaacttttctcaagttgatgaacagtgtgcagctagttctggtcttctttgacccatagtttgctgtactagagccctgtgaaaagaggactcaattgatttgggaggttcttacttttgcgtcgacgcatcaagcattacatccatcaagtttacttcaacagaatcctggtggcaagttaccatttccatgtaagtaattactaatgagattgcaaactttttcttgctctgctggtactaacttggttacagaattttgcagcttgcctgatgccctgatgaccctgcacctgctatcctctgtgcctctctggctatatcctcctctgaactggaggtttttgtgttgaattatttaggttcagagatttagaaacatttatggattgggatagctttggcataatacaatttttgtgtagtcatttcatggactgattgatgagtgcattgtcatctactctctccgtttcacaatataagtcattctaatatttttcacattcatattgatattaataaatctagacatatctatctatctagattcattaacatcaatacgaatgtgggaaatactagaatgacttatattgtgaaacggagaaagtactatgttccttctcaccattttccaaaagttgaggaaatatactgtggtggtagttcactatctgtcggcctatttctgtcattctctacccatagctatgactccattgcatactcctttcctttgccaaggtgtgatctagccacatgcctggctaacctgcatcacttccaacttattttccctggaatagttttgtacaggtaaatttgtggttgatcatgtctgaaatagtggtaagctggtcggaaaagatcagattcgaaaagctatttgagctcgctccaatgctctttgagatcaaacagcttgttatacaagaactctctccgattataaatattagatgtttgggacaatatttgaaactttaactatcaataatttgtcaaatatttagtttttttaaaagaaaatggtatatgtagatttgcgttaaaaagtactccctccgttttacaatgtaagtcattctagtattttccacattgtctagattcattagtatcaatatgaatgtggaaaatgatagaatgaataatgtcataaacttgttaaattttataaacttattctaatatagaacaagtgatgaaagtttcaaactgtacctaaatcttgtcctatacgttcgatatttaggtaatttttccatcctggagtctcaagtatcagggagtaccatattttctagtgcaaaatttggtacatccaaataataagtatcttgaggtataaacaattttaatgtaaaaatttagatactcgagattctctctctaggatcatcaaatttcttgaaatatttatgatgagacggactacatcacagcttgcgtaagcaatagtacatcacatggtttggtttctgccttctttcctgcatgaacgctgcaaagaaatcaagttaaggtgcattgagccaatggagctcccttggggtgtgaaagctgaaaggaagaggaaacaaatttgtatttgtgaattggcagggaccagcaggtccactgctgccattgatgtgtatgtgctacatcagtggcatatttcaccggattttatcaagaacagcactgaccaaatccatgtcctttcgccgtcgacccggctgtcatcgacttccgtgccaccaccgttgattggcggtggacggccgggaagacgggcggggtggccgtggcagaatagatctttgaacggtgactttgagttgaagtcacgaatttctgatttcagactatgcgcagttgatccttaccaggagtacaatagagtcgaagccggcacggagatgctcagataagcaagccctagaagaaacccaccagtcctggagccagttgccacgaggaggagagagggcagcccaatcagaaggcgacagtatacggagccagacctgcggagcgaatgcgtgttccacatgttgctggtatacgcaagagaatggtagtcaatgtgtggggtatctgattattctcgtcaatgcgcgacattctccataacttaactaatgattcactattaacctttaaattatcgtaaatctatagatttaaaatgatgtatcaaactatagatttatcaataaatttatcataaaactatatgtttaagactaagtatcacaaacttacagattatgtagattaagatttggtccggttcttttctccaacaagagttggatgaagattaagatttttgtagtacgcttttcaaactgttaaacggtatgtttcgtgtgaaaactttctatatgaaagttgctctaaaatatcatattgatctatttttgaagtttgtaataattaaaactcaatcaatcatacgttaatacaacatcgttttacgtaaaaaacttaatcttcatcttcatcttcaagagaaaagaacattagtataataaaattatcacaaaactacatattctggggtctaaatcctcagcattaatgaatatgttgttttgtggtaactttgttactaaatctgtagttttatgatattccacattaaatctatagttttatgataaatttaatgctaaagattaccgccttgtttggtagagctccaaacttcaactcctaactctaaactccaacttcaatgggagctggcttctatagtagctaaggtgggtacaaaaagtgtttggctagatttatcagctccatgccaccacgtgccttgtagccatttcgttgaacacctggagagcgtcaccttgccgccacggtagcaaccaccgccgttgccggtcagcctgcgagctgccacaacatgtgtgtttccctgccgttaacgccaccgcccgggtcatgcctatcgacatagctgcccgcgcatcgcctgccgacgccgtgcgccgcctatggacgccatcgtcctactgccttagccaccgcccaccgcccaccgccgctgctgccgccgcctcccgggccgccacctgtcgagaccgccgcccgctgtcgtcgggaggaggatggggaggaagatgaggaggagagagaacacgaggagaggggataggaaggtgtagttcaatggcatatcacgtaattacatgaaaaatttaaagggtagtgggtattttgggatagagtgcagctgtgaagcagcaacaatctagctccacctccgtagtacaaatttgtggagcagctctactagctctgctctaaaaaaatggagaatctgtattgtttggcacagctccagctctatgtaagttgaacttaggagctagacctgtgctaaacggggccgtagttttatgatacatcatattaaatatataatttggtgataatttagctaaagcacttgtaatttgatgaaattttctcttaactaaaatattttgactattcaatttttaggtagtgtccggtactactagttctgtaatagttgccacatattttgcctttttttttcccatcttcccagggccacatacggaacaaaaacttgggattgggcctagaaacttaggtccttttacacataaccagattgccacatgaagaataagttcactttaagtcccttatcttgacttgattttgaattgcattcttaaaaccgcaatacatgatataatttgtttctcaacttctaaaactagtgtaaatgaggtcatagtttgaatgatagttttgactgatgtgatgtctacgtggtttgtttgacttgatccttattctatatggcactagaaacaatattacagaattaaacaaaatatatggtgcccatatatcgatcaaataaaaagataaaaaataatggaaactgcatgtgaatcggtcccacttcctccaactaaccatgtctcctctctatctcctgttggcgtgccaccattcccttcttctgtctccctacctagatgccggcaatgggtggtgggagaggagctgggcggtgaccgcgcaggagatggctacgggcggtgcctctctttcttccatctcttctgcaggcatgggtcggcagcgatgctccagtcctatttgtgtgagctctttcggcctcctccgctctctcctcggctccacctagcctcttccgctcctgctgctcctcctccacccaacctcattcccttctcctgacaccaccactactagagaaaccatctttggttggtcgaccaaattccccaatagtctcggttgcaataaaaaccgttcaaaaggttagaactattttttatctttagttccgattgggaacactaaccgggagtaaagatcatttttagtccctattcaaagaacagcaggcggtgtcagacccctctattatctttagtcccgattggtgttaccaaccgggaaaaaaagatcagtatgcgcggcggagaggccgaggcgtgcgcgagatcgaggaagaggtgggatcagttaataagttctatctcctcctccctcacctttatctcttcctcctcttcacccccatttcttcctcttcctcctcctctcctcactcttcctcccctctcctccctattctcaggcgcggccgggcggcggcggcggcggccgggccgcggcgaaggtggcctcgtgccgcggcggcggcctcgcgcggagggctgcgcccggcggctgcgtggattttttttctttgtttttcttttttccttaatgtgtgattcgatttgtgttgaatgtgtgattcgatctgtgttgaatgtgtgattcgatctgtgttgttgttgtaaatgattttgagaatgaactatattgttgtgaatgatttggggatgactattgctgtgaatgatttgggataaactacattgctgtgaatgatttgatctgagatgatttagggaaatagcaaaataacattgaaaaataaagagaaaatgaaaaaaaaaagaaaaaccctccaaccaggactaaagatcgggtatttgaaccgagactaaagatagcgatctctaatcccggattcttactcctagttggaaaaccgagacgacttagggggttaccaatcgggagtaaaaagggtttctccaccagtgctcgttgctctgtccaaagtcgtgctggggagccctgaaccgcccccaccttccgagctccactccttgccggcgtgctcgatgcatcgagctccagaggaataaggggaagagatggagagagaaaagagagagaagagagaaggagagtgaggatgatatatagggtacatttcacataaacgcctagtcagcatgaatggattggattaacttaccatgttagtgaaactagccatctatactatgagaggacctaatttaaacttgttttacaaaacgaatggattaagattttaagatgagagatattattctccacatgaatgaacaagtctagtttgcaaacttgcgaagcataaacgtggatcacacaagaagttcatgtgatagaaagaagagcagtttgatttggtagccattattgccctacaccatgtcatcgaccatcaatctaccgtccatccatcgtcgtgtcaatcacactccagcccagtcccaagtacgtaccggagtactataatcgagagtggtgtgacacgcgtcggtcgcaacatcagctgaccatcgcacttgagcttatatatttcagtacacaagattcgtactactcagggcaaaaatataaggtattttaggtataaatttatttataaatattaagaattttagagtattacttgtcccatgcaaccgcactcatcattaattttcttttctctattccttaatctctttgtattgtctggtttataaattattgacctatgaactttctgaagcagcatgacaacggacagcaccatggcaatatcatcttgattgaaaagacgagcaaatgttctgctgatagaggtggccgtaactgaatatccagacatcctacgttttatatatcttcataaggactggaaataagcactggtaaatttttcatgaaaagaaaacatcgatttgggacatatgtttgggttggatagaatttgtagctagccaaataatcccaaagaaagagaaaatgaaaagagacggtttctgaagattaggtcaacaatataagcacaaacgtgtagtcgcgcgcgtacaccctctgttcaaaaataaacccatttctgaatatgaatgtagacatacactgtatccatattctttatatctagaagtacttaatttttactccctctgccctaaaatataagtatttttggagtctaacatggtctttgagatgctattttgaccaataatatctataaaagtaagatgttttaaataaaaggagttacatataatgatgatagtttgtctaatgatgaatgtagtaacatcaattttacatgattgatttttttattattaatagtcaaagttaaaatattttcacttgtcactatgttaaaaatgcttacattttagaacggatggagttttttttttaacggaaagagtataccatatctcatcacctcatacttgacggtattaattcgacaggacacgtaccaagataggcttcgatcttgccagttgtcacaacatggacaaggaacaatcaaccggttataaatctctgggcgtttggtgtgcatcgatcggatcatggatgtagtataccttacctactgtccaatgtggataacactgctctgcataaaaagattgcattttatgacttcactcatgcatcatgatccattcatgctgataattagtactagtactgctctctctttttaatacatgaaggcattaattttttgaaatatgtctgaacatttattttattttcaaaaaaatattattataatttgttttgttgggacttaattaatttatcattaaatggtatttcttaattttttatgtttgtagaaaaaaatcaataagacgaatggtcgttaaacgttgattaacaagttaatagtgtcatgtattaaaaaacgaaggtagcacaatgaaccgtcgccacataaaatgctatgattatcgtcccagaagactttgttttttctaggagtttggatagactttttttggacgaagggaggaatcttttatatttctataattcattgggctcatgacttgtataagtactactccactggcctggttacatgcatttaatttcacagtgaattttatcttgaatagggccatctgacatgcatgcccacctgccatgctcacattgncatgtaggggtggcagtatgttgcactatgaatggcacttgtgctgaatgtgttcagacattccatttgctatagtcagaaaattgctgggagaccgagactattaatttagcttaagctattagtaggttttaagaaagatatgaaagtggtagagatgaattaattaaatgtactgctaaacatagatatacaaagcagtcgcagacatgcacaaaaaaaaagttgttacgcgcacaaaattcaaatttgaacacaatcgtgtgctttctttgccaatttgatctttctacctgagttattcccatatagacatgaaaatgtactcctaccatacccatttcaactctcctgcatctgctgcaaaaaggagatgatttttcttaccagaatgtgatatccaacctccgcatgcatataccatgcaagtaaaagttaatttgcaccaagaaatccgcattatattcattcttgatctatacttccacatgtgaaaaacagaagtactcacagatgcagtaactggaggagagcttgcattgctagttagttgtaacatatacacatattcaagccttgatggcttccttgtaccaaccaatcttgatcaggagctatcacctgatgccaaagcttcatagcctccaacaatccggccagctacactgaaatttcatcaatgcacagttagctggccattgatgctactcatcaaggtatatagccagctagcacgcacgccaagaccgatttttcgacatgtcacgaccggttgttgatcagtgtaaaagggtgcatatatatacatctatttatgtgtatgtatatgtaatttccctatctatgtgtaaatgcatgtgtatatatattgtcgataatcggtcatcggtgatgactggcatgaattgctgattggctggttgggcccaatatgccgggaggagaagggactaacgaaggggagagttcagagttcagaattgtgaagagttgtactactccttatccttagcatccattggcatgcatgtgtgggtgtgtgtccagcaaaaatgggaaagggtttgtgcaggcctcacatgggcaggccatacagtcatacagagatgtgtgagcctttcagcacttgtattttgctgggagatgaaactaaaacacagtaatgtaaaatgtaaatttcaacaatgtgctccaagttgtacttggctagattcgttctgaaaatagaattggctagttagcttgcagcttccatactttcactttaattctggtgatttggagtgatgtgtatatgtagagttgtgactgatgacaagagcatcttcagactaacagcatggttggatgtgtctaaatgtaattcctattaggattacgtacagtcctgagtattattgcacacaagaaatttattactccatccgtttcataatataaggcacaactacttttttcaaatgttccataatataaggcgtgcatgcatacatgcaattaattagtacatcttctctattaaaatatgattttttttaaatcctccaccctcaagatctctaattctattgggtgcatgcattttatttattagagtgatacaaattagaaggtgataataattgtttcttcgtctttggagtaagggtggttgtgcctaattatattttggaacggagggagtatgtgttttaacatgtttggcaatttatttctaatgtatttttaatttacattcttgtttcttgataatgtactgtttaatgaaggacaataatatatagtatgccataatggtgcattggtgcatacccaattttattttattattctatatttttgcaatgggactttttcatatttgtaagcatgcactaagtctactcaactgaatcacatttaattactaccgtttgtgcttttctagattttccgattgaccatactagtataagattaatcaagggacctatgcattaagtgccgatgcacagtacgtaaaccgaaattatcattttttttggggaaaagagaatatattactcctcacaaactatatgtgagatgaaattacaactgttctcgggccaaaattcagacatagactcatatcgtgccttcttctttttagagtattaaataataataatgtcggttgacatcgtaaccaaaattgtgtaaaccgatattatcatttaatactctaaaaaacgtaaaggatatctacgtgcggaaaacctccttgaaggtggactggaattgtggctatcaatgtaagtttcctatggtgcttccatttatccttttggaggatgcatgttatggagtatattgtttttgctcacaagatctttaactaacatctgcgtgttcgagaaaaaaaaatctttgactgatatttataaactacaaattactccccccgtcccataaaaaccaacctagaaccggatgtgaca

SEQ ID NO: 22591 - DNA, 5529 bp, Oryza sativa
aatatgtcacatccggtcctagattcgttttttatgggacggagggagtacagcacaagatagttgaaggacattagtattatatattaaaggagcacactcatgatcctaggcagaatttaaatatatattttttgtgaggattaacagaaaatatatacccacaagttcaattagctagtatttcaatgttacaagctaagttcagcaatcaagtatctttccagtttctacctactttcccaaagcaagaactgcagagaacagagaccaagaaataggcctgaaataatttccctagcagtttgcaggtcgaagcccacaagcttttgtgaaaacttgccccaaattacaagctaatggtgcaatgccatgaggtaaattaacctgtgcagtgatgtcacacaaaggtaggtaaaataaggcaaaagaattgattaaaccccatgcaattaatggttacaatgtgcaggtaggccagccaagaggggaaaggaggaaagttcaggaggaagaaaaacaccaggggcaatatatagatggactctctccacagctaccaccactccatctcatctcatccttccccaaccattctcttctccttgaacacacccctctcttcctcattataatctcttctttgattagagaggaattagcaaacatgcacatatacaaagagcaggaggctgaaccatccactggcctgatggtaattgtttttcttggcttggaaactcctaaatttcctcttctctttcagtgtcattttgcaagagggtttggatttcttttttaattgtatgcatatgggagctttgggaaagtagaaaagtagaatcatggctgctagctgatgtgtgagaatagctagatggccatgaagagggagagatatagctagagatctttagtctttaagcaaaacaagaaaaagaagaaaaaaaggtgaaagaaaggcacaagatcaaggagattgatcaccacaggaccaaagatctctccttttttttcccctcaaaaaaagatctctcctttttccttcgatctacaagaattatacaactcacaaaagggggctgtagttacatatattgatttttaagagagatgatggccatgatgtctccagcacttcttgattttcttgccaaagatccatcttccggtcttgcaatttcttgattatgttggctcatgctgtgctgctaagttcttacatagaggactgagtcatatctctggaattattttgtgactcaaatttagatgccagagccagcacctgttgcttcccccggctccggtggctcaggtggctcaggctcggtgggagctgagaagattgggagcaggggaaagattgagatcaagcgcatcgagaacacgacgaaccgtcaagtgaccttctgcaagcgccgcagcgggctactcaagaaggcgtatgagctctccgtgctctgcgatgccgaggtcgccctcgtcgtcttctccagccgtggccgcctctacgagtactccaacaacaggtactgcattcctcttcctctcttcagctctagaaacctaaattaatccatgtgatatatgttatcttgtcctaattggagcaagttagttgctaccttttcttgtgacaaggaggaggcatatatatggtgatgtgcgtccatctcaccttcttttctgttactacatatatgtgcttcagttaattaactgtcttgttgttacttctgtgctttcttgggggtagtagcaactagcaagtgagaaagaaattgcaggagtttctttgtgtgtgtgtgatgatctgtgtgcttgctgatgtggtgtgcacatttctggtttcttttgtgtttcctgtgaggtgagctagatgtgtagatagattcagcacaatgcatactttgtgaagcaagcatgagcatgtacatgcattcttgtgagcttttctatgtgtgtgatgggtgtctgtgactgtgtgtctgtgtgtgttgctttggcttggtggtcctgttcttttattgctccatttatggttctttcctttctctacctctgtctggttgtgatgaggcttgctttagatccttaatacctcactgcatatagcggtcatatattatattttctctattggctatgcatgtgtgcagtaacttgtaactactagtaactagtatgcaagattgtgggcatgtgaggtttgatgttttttttttcagaggtaaaaagtggtgtacacgagtgatgcacacattgatcattcatgattcttttgcatcatcttcttcaattggaggttagttagggttagggtttcatcacatcctccatctctctctctctctctctgcagagtgctgtagatgttactgttttcactagtcatttctctgttcatttacagccatgtgtggtttcctgtattaacaggatgccccatcacgagtgctctgggcccctagctacctatcctctctgacaccggcactgtacttctcatgaggtaccgaacacagtgaagtcagcagtaaataggaaaaacagtgcatgaattacccttttttttctccatctataaggtttggactttcatatgtatttttgttactacctaaggtttacagattagtaatttgtgcaatatttttagtagagaatcttaaggatttgttgtgcttctttttccttgtgcgattacagaagaaatacacgcacacatgacaccacacacgcagaccacactcacacaagtgtgtgcttagttatgcctatagttgttcagccaagaaaggataaagagtaatttatactatataatcaggatgtatgccatgataatacccttatgttctaaatcctaatcccatgtgaaaaaaaattatgaaatgtgtgatcccctgtgagtctgtgactacacatgaatgaactactagtagtagagatgagtaactagtactagtagcaaaaagatctagaaaaaaactctaaactagatcatgtatgatttgtccttcatttttaaaattacgttttaataacccgtcttggttaagaaaaaatatctttacttaaacaattaaacttcatactccaaatgttaataccctgcacaacactatctagcttagactctagtatcatatatatatatatatatatatatatatatatatatatatagtaaatttgttatatatatactcctgtattatcttgttggattacgacggactggtcaatacgtacgatagagatattttttgtgcatttcttaaaagtgatttataggactcccattaatttaacagtgaattttccttgttttgatctattgagtaataaaaaaattggtttaacaattgacgacttgtttggacaagaagcaaattctttgcacagcagcagcagacaaacacactctctcagtacgtgtgcgtgaggctgcaagtgtaaaactgtacactgtactgtgcagaagcaaaaattaaccaatggcacggtcagtagaatacgtacaaatggcagcgtttgcatcgggagactacaaagagaaaaaggctggtttacccggtcagaatggttaaggtccctgtctgcctggctggctggctaggttggaccgtagctgcttctctctcttgcattggctctctctttctctctctataagccattggtcacttgggtactcatatgattcactgtttgcagccagccaatcatgatcatgctggctatgtttagatccaaactttagatttaaatttctaactttttccatcatatcgacctgtcatacacacataacttttcagtcacatcgtaccaattttaatccaaactttcaactttggaaggaactaaacacagccgctgttgtcaataggatgctcgaagatattaaggttttgtaattcgttggtaaacattactacaagacaatgctaataaaatattcatttaggaagaattttagagaagtgttgctacttgttcacacatgctccatgttaatttgttccaatgagcttgcatctttgtatttttctttaaaaaataaattgttaagaaaatcattgttggtcaaatttgcttggaccatgatttcttcacatgttttttcttgtttaaaaatgtatccaataataccgttcctatgtgtgtgagagatagacagaagctgacttgcattgcttttatattggctcttgggaatagttacttggcactattatacgtatgtgacgtgacatttgctctgatcttgcctttgagaattcatgtttggtcttgacgaggaaagggaaatgatatgatagttttcttggttagatttttgtatggccctttattgcttatgggcatgcctgagattgacaaagtgacaaagtgttggagtacgaaatgtggccaaatgatcttgtctgtcaattttcagcaggagtacgtctttctataggaactttgtgatatcctctttggtttgtactctgtagtagtctcgatcagataggggtgtaaatgattaacccgtgacctcactcataagtaaatatataaaataagttacttatatgtcaaaataagctgtttattttattgacttataagtaggtttgtggttagccactaagtacacccttaatctaggacaatatcaaaggaaaattagttacacatattttgtactatttcaattagatgatgaacgtatatatactttgcgtatagtagtagtttttcttgtatcaagagaggaaaggacgttactctgagtcctttcttgaaacgtgtacaagatctatgatcaaggcatatatgcatagtttttatgttgttagtagaaaaaaatggctaagtaattttgcaaaattttttttggctaaaataatgaagacaactagaaaggtagcccgcgcacatgcgcgggcatcttctcgtataatgtgaatgaaattttattatgaatatttatatgcaggtggctttttattaaaatttcttgtattatattctaaactaaaattaaacttattttgtgtgctttgaaagctttttctatttttataattacccttgcaacatataaattctaaaataaaattacttgagatcatgtggttttgaattgatgagaaactattgtgtcgaaacaatggaggtggttcctatgataaaatttagggtattttaaatcgccaaaaggatagcttacaacctcaaaacaaattcaataatatcattttttttgtttgattgtattttaatatatatatatatatatatatatatatatataatatattcattctaaccgtccttgtaaaatgtttgaatttttctatcaagtattggttttaaatccaacaaaatttgttcaattttcaatttatttcatgcccatttttattttttttcttttggatagttttattctatgaatcatccttgaaatgatttgatctttgcaatttgggacaaaaatatcagaacacataacctagtatggggtaaagg

SEQ ID NO: 22592 - DNA, 12166 bp, Oryza sativa
tatgaagtattaaatataggctaaaaaataactaattgcacagattacgactaatttgcgagacgaatcttttaagcttaatttctacatgatttgacaatatggtgctacagtaaatatttgctaatgatggattaatttggcttaataaattcgtctcgcagtttataggcggattctataatttattttgttattagactacgtttaatacttcaaatgtgtgtccgtatatccgatgtgacacgtcaaaactttacacccctgaatctaaacacccccgaacagaacatatttatttctcatataatttgaaaaaaatcataaatcacatctgagcatgcaatacatgtatggctactgggcctctatggctctatagagttgagaaaagatgtcctcggtaaagcgcaacaactgtagcaggtagaatgacttgtgatgtaaaatttgtactagactcctgttcagactttttcaacctctccccggaccggtggatttggcattgttcttggagacaaacagatgaacacaacaatggtatatacagtacagtgtttgtacagtactatgacactcaatcttactggcttcctgatctttttgcaaattttattagcaatgactatatgaaagttagggggtgtttggatccagggactaaactttagtccctatcacatcggttatttgacactaatttgaagcattaaacataaactacttacgaaactaattatataaatgagagctaattcgcgagacaatttttttaagcctaattaatccataattagcacatatttactgtactatcacataggctaatcatggattaattaggctcaatagattcgtctcgtgaattagtccagggctatgaaaggagttttgtcatttgtctacgtacgtttaatacttttaattagtgtccatacatccaatgagatatatatggactaaaaatttttagctccatccaaacagcccctcagagtgacatttttttacaaccaaacaatgctttagattaaacattaaataagatcatgccacagttgttttattgtttagaaaatgaaaggtggcccaaactgccactaactccccttttttttttgttgatatccttcaggaaaaaccccatgttagtttgaagatttgaacttagacatatgtataattggtgaaaaaaaaaaattctagaagaaacttctataccgtggccaaaacttcgtagttattcttacttccatggacgtatgtgtgcaagtaaactaactatttatgtgtgctactatgcacaaatgcagcgtgaaggaaactattgagaggtacaagaaagccaacagtgacacctccaacgccagtacagttgcagagatcaatgcccaggtaacatcatctgaattctcaaacaaaaaaaaatcatctgtcagtacaaatgcagcatgcagtagttttctctggagcttttatcattcagcaacaatgcaacattccttgtaattaaccaatggtttctatgctgtaaaaaatgagttctctgaccaaaatcttcagattggacatcctgaatagaagctacagtgctttacacaatggaaattccagtgatgctatatatatagtagtagtatatagttttgaccaacagacatactcctatctgtgtttgtccactggacaaagttcttcatgattccatgcttgaaaattgaaatggctcactgcatgtttttggcacttttgtcattcattcatgcatatgcatgcatgcaggttgattacacagtttaatatggtatgatttgatgatgcacatttgaacaaaataaacatgaagagtcaaacattccagttagcaaactgacacaacttgtcatgattttaactaccagtactaaaaaaaaaatcaaattacaaacttgcagcactaccagcaggaagctgctaagctgaagcaacagatcaccaacctgcagaactccaacaggttcattatttcactcagctgcttagaatttttttcaacttgacaaagtagttcatctggttataactaaattctccattaattaatgaattaggaccctagtaggtgataatatcaccaccatgaaccacagagaacttaagcagctggaaggcagactggacaaaggcctaggaaagattagagcacggaaggtatattaattgtgtgctacatttacatagaattccaagttgaaaagggcatattgttaattaattcatctaatttgataagcattccatatcctgcagaacgaattgctgtgtgctgaaattgagtatatgcagagaagggtaaatactatcagcaaaataccactgttttctttctggcaaaattatttggtctagttaattgacatcataagataacagcacgagtataatcttttcaggaaacggagctgcagaatgacaacatgtacttaaagagcaaagtaagtattctgttctacattgcaaaaaaaaaagaatgagattcgctttcaaaaagagattagcctagctacatggtaaatctgaattgaagttactgaaataacctacatatatagcaaatcatacctaattgactgaaattctacgtcatcatactaattaattataattattattgtgaaggttgctgagagtgaaagaggactgcaaacagtgaacatgatgggttcagcatctacgagcgagtacgtgcaaaatatgatccattatgatccaagaaacttcctgcaattcaacatcatgcatcagcctcagtattatcctgaacaggaggaccgaaaggcctttatgtcaggtaaaaaatattctcagtgtaacatagtcagagttcatagttcaacaaatgaaatttgaatgttcattaccttctcattgtaagcatctgagtcgtagttagagacatcaagtttttcaaaataaaaaaataaaaaataatgaagagttttcttgggaggattatattgcagggtcagaaatgtgtagggcttatctcacattctaggtattgtttggatttgcttgcaaccataagaattataactcaaatttcccttgcatcaaattatagaaggaattcggaggcataagttatagacaaataatgtggtcgagacaagtttgtgcaagtacgttcagatgcaacgcgtaactaattttgttttactgtttacattccttgcacttgcagatgaaagataaatatggatccgtatcatgcaactatctcaatcatgcatgtgccttcttcaaggagactgatcagttagatattacactgtgtcagtagaacttttatgtgtgaactcttgtatgcatgaataattaactttatcccataattcaggcttggcactatcaaggtgatgtacctaagtattggttcaacctgtgaaattaaaatacttcatacccttcctatgtttatatatgaaatattggtgataatatcttgtgtatacatataagtgctgtttcgttagctgcggttttttcaggaatcacttcgaactctgaactcacgctctctgaatttgctcgttctgactcttttcttttcagacgtaaacagtaaactgaagaaattaaccgaaaacagaaagaacagggcaaggcatggtgttgtgttgagctcgttttcagtattttcttctctttttaattcaaacccaaaacttggctcttacatgaaattatattggtggcctacaaaagcaccagttcatcaacttcatgccatcccatgatcgggcaaagacgcgaagaagcaaagacgaagaataatcactgcctcgatcattgtttctggcgttaggggtgggcagaataagaccgaaccgaaaaaaccgagaccgaaaaattcggtctgtaattcggtctcaactactaaaagaccgaaatatgttcggtttattcggtcatgggcctcaattaaccgatttgaccgaaataaccgaattaggcccaatagatctagttggcccaataagcccactaataaaaaccctaggggcaggtgcgtcacaggcatcgacgcatcatttcatccccatccatcctggagcggcgccgtcccgactcccgtctccatcccatccgcgtcctccttcgctccatcgccgggcgccgcttccgcctccagtcggtgcgccgcctccaccgccgggcgccgtctccagccggcacaccgccacctccaccgccgggtgccgcctctagccggcactccttcgcctccaccgcctggtgccacccccagccggccctacgccggctccaccgccgggcgccgcctccactaattgttgatttgctttgcttttgctgtttttacatatagttttgttgatttgctttgtttttgctgttagttcggtctatgaccgagaccgaaccgaactaaccgaagaccgatttgctcagtcctaagatttgttggagaccgatcggtcttgagattacaaagaccgaattttcaaaaagaccgagaaaccgaaccgaatttttcggttagaccgaatgtccacccctatgtggcgtgcgtgcatgtgttgtgaagaggcagaccaacactagctacgttgatgcttgatgcgggatgatatgttggattttcacaacttgctatacctaattttgatggcccatcactactatgaggaggacgaggaggagagaggctgggggggggggtgtcccaccctacccaatggatagatccgcctctcgttttaattgcacaatggaaaactaaattatgcaaataataaaatggaatactgaagtgtgtgcaagatcacaattttcactgttacgattaaacttgaattaagcttaggatagcttattagatagacatatgttgaaaatgtaagacgctacctcgccacggtccacgacggcagggtgcaagatgtccccaatgaatcagcttcgatggccgtggtgctagcaagatctatgtgaacggttgatttataactcagttaccgtccgacgttatctgccgctttagttcggcactagtcattaatggtgacgaacgcgaaatttgatcggcacaatgatcagctgctgatttgagaaatacaaggactactatgcacaactcgctagccactgtgcagatttttgccaaccatagatatatagaaatttagcaataggtgttatctttgtctttaggctggtatttaagtagttttattgtttttaattaagttatgattttgtaattcacagtcgttcaacctgtaaactctataataactggttatagctaggttcttacaagcgaagatggataagtctgttattaagaaaaggaccacgtaacacatatatgaatttaggaaagaaactgcgatcttcatttcaacatatagtaatttaggatgggtctaacaacatcctaagttgctacattttgaaacggagggataccaaaagaaaagatatatagctcatatatatttttttatataaacttctttaaaaaaatgtagtgcttattagactatagtgcttgaccacatttacaggtgtgctaagttctatactcggctgagttctattatctatatttttcatacgcacgtttcccaaactactaaacaatgtgttcgtcgagaagaaggacaagaccaagcgcatgtgtgtcgactaccgtgctctcaacgaggtcaccatcaagaacaagtactcgctaccccgcatctatgacctgtttgatcaattgaagggtgccacagtgtttctccaagatcgacctacgatccgggtatcaccagctacgaattcgcgaggaagatatccccaagacagccttcaccacccgataaggtttgtatgaatgcacaatgatattctttgggatgaccaattaatgctcccgcctttttcatgaacctgatgaacaaaatgttcatggaatacttggataagttcgtagtagttttcatcgacgacatcttgatatattccaaaacagaggaggaacatgagcaacatctgtgacttgtgctggagaaactcagggaacatcagttgtatgcagagttcagtaaatgtgagttttggttgtcaaaagtgaagtttttggaccacgttatctttccacaaggagtggcagtggaccccgccacggtcgaagcagtcaccaagtggaggcagcccatcacgcagatccatagtatccttgggctggcagggttttaccgccggttcatcgaaaatttcttaaagatcgcttggcccatgacccagttgttgaaaaaggaagaaaaattcatgtggaccctgcaatgtgagaaggcattttttttgactgggatgtgagaaggcatttcaattgctcaaaacgaagctggcatcttccccggtcttcgttctgctagatgttaacaaagactttcaggtttattgcgacgcgtcccgtcagggtttgggttgcgtcctaatgcaggaaaggcatgtggtggcctacgcctcgcgacaactgcgactgcacgatggcaactaccccacccacaacctcgaattggccgccatattgcatgctctgaaaatatggcagcattatctcatcgggaaccggtgcgaagtttacaccgaccacaagagcttgaagtacatcttcacccagccagacctgaatctccgacaaagaagatggttgctgacggtcctcaaatcataatatctgactgtcaatacttgcttataatgaaataaaatatggtatccaacttagtactagggtttattactaatcatttccactagtattggtgaaatatgtgtatgcaggtactttaaggagaaaacacacccgttatgcaacaaaatacacctctggacaatcaagacgtgtttacacagattagggggcccatacatcaaccaaagccacttagaattggtccaaaaaatagtacatgatgttgcgggcccattaagcaacctcccgaccaaaggagggccgggaggagggttttttggttcggccgaaccaccagtccagccgatcccgttctggcatagttgatcaccatttttacacgtgtacgctcctgattacttcctgatgacagttggaggacatttatgacatttcacatacttgtaaccgtcatttggagcctataaaaggaggtctccttcacacttcacaacacacaactttgagctaaattacaagaggctctattgtatcttttatacattagaaatatttagagggtgaggggaaactctggaggagtgcccggaggtttggcactttctctgacttctacctcgacgagtgtagctttctaggaggaattctagaggagtaccggagttgtcggtacactttgctccagcttcggagaaacttcttctattaaataagcattcgtgatcctttcttatgttatttaattacttagtctaagtgagatagaattccatctttgcgtgttcattgtttagttttcgtactaggtgctctagtactaggactttggataaagaaggaagttcctgcgctagtattagagtagtaattaaaaacttaggtgtggtgtctacgttagagattacctttgtttgttgtgtatctcacggatttgtcagaggtaggcgacaggtgatgacagccctgaatcccgtcctagtgatcctccatgttcggatacattatagagccatagacggaaccacgctggcagactagcaggagtcggtgcccgaagcaataggtaggaaattaccttcaacttagcgtagataattaaaatatatagaaagtcctctctagccttgctagcctactaacggttgttgtccttggatagtcttagccttaggtagattacacacgttccctgagtttgatatccttttggagtcactcgaaggtgaagtgctacaacgtattccatgctcttgcggatttgtctgtggtcgtaagaaataccaacaatggttggaattgatcaaggattatgatgaacaggaagagtgttgacggtccttaaatcataatatctgaccattaatacctgcatataatgaaataaaatatgatatccaacttagtggtaggggttattactaaccaattctactagtgttggtgaaatatgtatatgcagatatttttaaggagaaaacacacccggcatgcaaggaaacacacctccggccaatcagatgcaagcacatggattggagggcccacaagtcaggtgaaaccgcatggaatgggtcataactgtcataagcaccatcagggcccaccagtcagtgtccctgccaaaggagaggccaggaggtggggcccgtggtttggccgaaccaggggttcggctgaaccgccactggcacctttgatcctggccttccacgtgtacgctgtggatgacatcccaatgacggttgtgagcgttatacctgaagaaaccgtcatgcacacttgtcaagagaagagaagagatgctctttggatgcttaagcatctccacattcccagggtatctctagacctataaatactctctcctctccctcattcacacactctttgaagcttgagctgaattataagtggctctattgtactattttgtatgctagaattagggagagagtagagtagaagaagtcggaggaattctggagttgttcgtagtccttctctcgtttctgataagtaccctgctttaattgaatatcattccgagtatttaagatttattctgtgagagttacctcttagttagttcctaatcaacgtacgggatcactgatcactataatccattaatatatagtggttgctttagtgtttagctagcattaaagtagttattaaactgcgtagacgtggtgtctgggtagttaattttcagtgtttgctttgtatcccacaataggtttgaggtgggtgtataggtagtgatatccctcaaaacactgaagtcctccctatccgggtacgttgtagagccatatctgggagcagtgggctggccagcgcccgaagtacctttttaggatcaaattgagctttctgtatacatcgtctctcactagtaaatcctttctaccgttagcctatcttagcttcgtgtccttagacgaacctggtgaagagctgacacacacgttccctatggaaatcaataccttggaatactcccgaatgaagtgttgcatcggtatctttcatgtgcttgcggattctatctgtaaggttaagaaataccaacaaagagctattgcaatatgactcacgcaagcccgtgttcagcaatgctatgcagggacatggaaaggttgaatcttcacatcatccaccaaggctctctgacaaccttggaggtgaagcctctgctactagatcggatccgagaggcaaaaaagaccgacccagacatgaaggaattgcagaagaacatgagaagagggaaagtgtgtggcttcatggaagacgaacatggcaccgtttggaatggcaaacaattatgtgtcccaaagacccgaagatcaaaaagctcatcctgctggaagcacacaagagccaatactccatccacccggggcagcaccaagatgtacctagacctaaaggctaagtactggtgggtcaacatgaagcgtgagatagcagaatttgtggccctgcgtgacgtgtgtcaacgaatccgttgatgcaaaaaacacacaccggcctgaaagatctgcttaacttcagtgcaggtccaaaatcttgcttttaggtttgtgagcgtgccagttgatttgatcctgcaatcaacaagaaacaaagacaaaataaaccacggttaaatccataaacgatagccgatcggccagccgccgatgacatatcatttatcttcaagccgatgtcatatgtgaatcgatcggcagttgtaaataagcaagataagactaaatctactcgatcggctgtagatattaacgctatataattcttctatcgatgtatatttaaaccaagtgatttggataaatcggtcaccatgccgagacagtataaatcacttagatcgaagtatacattaacataaagattataagcgcttatagcatagccgatcagatagatctagcatgtatcggctagtactccgataccactctacattaagatattaaaacagatagaatatatcaaagagaagcctaatatactttattgcggtaagatcttaatataaagggcagatttagcatatcatttaagcatataagacataaaactaaaccaggaaagatcggctgaaaccccgatactatctctgttaatgatcataaaacaagccagatatcacaattataaatattacttaatagatcgaactcaaccgatgcagcattaagcataaagacaagtgtgatatctaaacaggatgatgaaaacctacgagagatggtagatacacgatacaatctagattaataacaaaacgtaactttaccgattgtttcctaatgataagaaccagccgataacaagttatgtagtgcaactaacatagattgaaacatgtatatgataactcgacggattacataaacagggttaaagtatcataaagatggaagcattaaccccgataacgcaagccgccataacaagctttacctctagttgaagatcaaaatcgatgcagctcaacccgaaagtaagaactcgtcgaaataaacgaaagtaaaaagggtggcgatgcgccgagattgtattgaacgattgttaattgattacatgggttcgggtgatatttatacccgagatacaaaatatgtccttgccggacacgacacttatctctaacaaactctcagataccataagtctttgcggtagacttttgcccaaacatatctctaaggaaattatatgaaatatcctaattaatagatacaattgcctcatccgagagctttatctccatcacggcaatcctcatgaagcactttgaacgattcgggaaacagctttgaaaccatcttcatcggaatcggctacatcatctttatcggctgtatcggctgtcttttgtccgatccatctcagccgatgcatactctgttcttcgaatcgatctctttcttgaatctgcctcgatcccaatgtcgaacctggttcacaccttaccaaatttggtcgtcaatagaatcaaagcagaacaccagaggccagcagggctactgcagtcgctccgaatcccggagtgaaaatgggaagagataggaatggacttcatcaccagcctttgtaacaaccctccctcaagaaccgcgtagccctgcccaactgacgggcgggccaacttacacacaccaccccgcttacactttcgtccttgataaactagcaaggtggtactaaatatgcgcacacagctcacatgggccacacaggcttcatcctaattcggccaagatgtcatagccttccccgcactcaaggctgttatgattccatttgggtcgtggtgaaccatgtgaccaaggtggcacacttcattcctgtcaagaccacttaatccggcagtaagatggcataactctacttcgcccgcatggtgtacccaataacaggtacccagctcacctctatgttttggcagaaactgcaataagagcttgggactcgtttgaacttcaggactgcttatcaccctcagaccgacgaccagacatagagcattaaccagatcttagaagatatgctttctgcctgcttcctcgattttggaaagacctaggacaagagtctcccatacgcagagttctcctacaacaacagctatcaatacagcttgtagatggcaccatacgaggctctctacgggcagaagtgcagaacgccgctcctctaggatcagacaggtgagcgacaggttttcgggactgacattcatcagggaagcggaagcgaaggtcaagaccattcaaaacaactagaaagtggcccagtccaggcaaaagagctatgccgacaactgccgcaggtatctcaccttcgaagtcggggactatgtatacctgcgtattactccactccggggagtcagaaggttcaacaccaaaggaaagcttgcatgcctgcagg

SEQ ID NO: 22593 - DNA, 1162 bp, Oryza sativa
cgatatgtatagtacaaaagcattgaagcgatagtaaaatccacaattaggagacacaataatcaagggcaagggaacgagaaccagttcatctttcccggcctcttgttgaaatgatttgaagtagtatagtagtagtaaccaacaatcaatatataataactgtttcgtttgtacatacacatggagagttgaacccaaatctccacatctcctttgtgctgctaaaatcataaaattaaaacctactagtttttaaagatggaaacaaagcagaagcacatccatgtgtttgctttgatgcccccaagctcatctcctttttggcttgggaggaaaaaaaataaaaagaaatgaaaagttgatggaatgcatcgatcgatctcttgtcgctcttagattagatcttcatttgccttggtgatcctagccctgtggcttcagatctcttcatgatcctcaacttcttgcatgtgctggtgaacatgctgcaaaatcaaacagcaaatttaatcagtttgactgcaaatatatatataagcaaattactaattaattaagagatttgttgagatgaaaagtttgtgaagaacttactcgaaagggacgtcgccgacgagcatgaggtcgccgtccttgtcctggtaggtgatggcgaactccgacgggttggcaccgtcggcggcgccggagaagcagacgaacatggcctccagggcctcgcggagctccctgtagcccttgtacatcctcaggtcgatcttcctcaggtacggcgccccgtccatgctcaccttcaccagcgacccgccgttggccgccgccgccgaggaggctgccggcgccggcgccgcgttcttggtgatgggctcgtctttgttgttgcagctgctcacggcggccttgctcttgctcgccgccgctgactgttgctggaagcagctcttcctgtacgacctcaccggcggccacccgaccacttgagccctgcagggaggaggaggaggcagtcgccatgtcagaactcagaaccctagctagcttcatcgtaaaagtcaaagatgatctctggaaaagctagctactcacttggctaccggcggcgcggcctcgacggcgtcgtgctcgtcgtcgtcggcggcggcggcgttggcgttgttgt

SEQ ID NO: 22594 - DNA, 22267 bp, Oryza sativa
tcccccggtcgccgggccacgccgcaccggggccgtcggatccggtggcagccaatgcgttttttcttagtgtggggcccacccaccacggcccaagccctatgctaggctgtagtaggatctcgcgttacgcgcttttccgggttcatattctattccccccgccgcgtggccacatgccaatgttaactggttatcggctatttacactgttttctttttctttttttaaaaaattaactttatccggcttgattataagggtgtggagtattttatttaaattattatgtcccatggaattggctttaataaattagtaatgtggaatttttgtgttcgatcaagcgaattagtcgaaataccacaccccgtcatagatagatccggtaacccggaaaattgttgatacagagacatagtgatcaggcatgtaggagaaagaaagaaaactagtgtgaaatgattagtaggatgagctatacatgaatgaatgatgattagggtaatgggggagcatctcttgcacattcggtgctgttccctttcggccctattgatcatatggaataatggagctacatatacatatagatagatagatatagtcatgagtggattgtgtgggcacgtatattgccggcccgttgcttgatttctggtgcaccctacctcttcttttcatttcattcttgagtgtattacacttgactcaatcgaacagtggatccatctatattttgttctgtgtctagggtttcaaacctatcggaaaaatagtgcaaaactcagtgccggcaaaattccgcaatacaatgtcgaattctttcagaaattttggacttgcagatattggcaaaatttagcaaggaggatattctctatggagggtatgtaagtggttcgcgggagggaattttgttctgaaacttcgagctcgagctattttgtgtcataaatatccatcactttaagcttttttttaatattgtaggtatccacatatatacataaggtgccacaaaaccacatgaaaaactactaattaagccaaaaaaaggttattaacaattttaattaacaaagcctccctatgatctacaaacaagatatttcaaaatgacaatggaggctttgctgaaatttttaataaactccatacatgcgggttttctatgtggtttataacactctggatatgtggtttataacactctgcaatcgatgcaggctagttcacttacaaacaaatataagtggtgcaatgggagaaaaagttgttgttatacaataatatctagttacatatatgtgataccgtcatgactctagaaggcgcctcacgatgaaaaaatcgaaaagaataaaaccaacaatgcaactttagacatatactccctccgtactcgtaaaggaagtcatttaggcaatgtttaatcaaatattgggaatataaattatgaataactctcaagttattgagtttgaaaatgtaaaagttatatgaataggtttgtcttgaaaaatacttttataaaagtatacatatatcacttttcaataaatatttttatagaaacaagaagttaaaattgtgttttggagaccgtgtcgctgtccaaaacgacttcctttacgagctgtacggagggagtatatataacataaaataaaatttgttgtacacataactatcattacttaattcctttcaaaaactatcattacttaagccctctcaatataatcccccgggccttgatctcctcctcaacaagttgtttcactttattcccctttccctctctccccactcactatgtgcatcgcattactaaatgagatacttctgtttggatgatcccttttgatcttgttcttgcttcttttggttgggaaagggtccaacaaaaactagtgggagttgtttgtttcaaaacctccacacaaagcattgatgcactgtgttacatcctaattaaaaaaagtgtgtattcacacatatgttagttaattgatgggaaccaaatggtcccccttgctacgtttttggctagctagctaattaactcagaagatatcatggaagttgcattgggacaagttggagcaagatatatcttttcaaagtcttgtttacctgacacattctagaaagctaaagtgcatgggatgctttcagactatattatgaaactcaaaaaaagaaaaagaaaggaaaccactttgccctgggtcaattctcctgcatattgccattaaacaacagttacagctaccaaacttgctagttacggaagatacttaaaaaaaatgtaatactacaaaagttacaaattcacgaatttagcgtagctcagctgcttagatttcttgtgatgaaacctgctcgtctagataagagttcaagttctaaatttgacatgagtacgctcatgtctgtagctattaattgttttagtggcaggtgatcgacgtgcctgttgatagcgagatgactgcggtgactttgtcaatattaaaatatgttggttaagtttctcggaggtgctcatacaagtaggattatgtgtacgtatttatagagtgtgtgcatccatgtacgtacatgagcatacgttagcgtttgtatactaaaaagagaaaaggtcctaaatccaataaaatggactaattaattagaaaaataaaattcataataaaattctagtggtgcttgcaaacagtgtccttccactatgtattttttacagtatttaagcaagtaccatgaagtactatgttacttatatatttctagtattaattaatttgtgaatgcatgagagttttcttttaaggcagcaaatcaaacactagcaatttgcatagtatgtgtacatcatcgaggagcatatgttgatgatcaacaataacaaatcaagcattgcagttgtagcatccagggatgtcaaagcagtgttttccattcgctttccaagacaatatcgattggctttcttagctagttcgtatactcaacaataatcaatttccccattggggttttgaaatgaaacttcttcattcactatatatatgcttaaaaatatgtatacattgtctgaatctcatatcaagaacatatacatatataaaagcctaacaacagttaattaaggtctaattgatgaagctaattatggagaagcaagacaccctatatatatggagctaataaccaatacatttatatatgagccatatatataggccttgacctagtatatacatgtatctaatctaacctcttctcttaattctttatatgctgagaacttgagatgttcctgccgatgtcgacacatagtaatatgctccatgatcaaaacaattaatttgctatttttgcatctgggtgtgtatgatatctttcctattgtcagcatcaatacagtccaatctagccaataagctactagtattttattggtggtaaacttcacccttgatctgataaacttgttcaacaaacgcgctagaatcaagcttgattccctgtcacaatgctatcgtccatacatgcatgattggttgcatcaatgcagagcttttttttttttgtcaatagctttgctatagcatttgactattgcgagataccttctgttcctgcaacctcctgcagacacaacctaaaataacaagccagtgcttgtgctgatcatgtacactcgagtttgtaaactatatatgtgtttttcaactgcttctctttttctttatggaatattgttgttgcctgatcaatgttcaagcttagcagtgagatgcattaatatgtgcatgtactaccgtccatgtcggcccacagaaaattaattcctcggattctagatatggtctgctatgcatatgagattattctgataagggcaccgactagctgtgcacggtgctttgtgctgatgcagtgcaatgcaattagacatgttgtgtttgatgtactaaatactacatgcatcttggttcccaaataaattagtgcatattatagtaagttccaattcagttaatttgtatgctgtaacaagatcatgcatatgcatgatatgtgttgtagtgacctcctgctacatcacaagcatttgtatattataataaggatgttgtatcctctttgaaggccggctttgcatcaaagatcatgctccatgctttgggtgtttggctgttgatactgatcttcataggaggtccgagccgcttgatcattacctagtgataagattagaaccaatggcttatgatggatctcggtatttgtgccgtcacaaccttttgtttttttttctcttcacatggtttttttttcctcgatgaaccatacagttgtaaaatttttggacccgattttctccataatcaaggttagttctttacttcttaattaaaagtgagaactcgctgccatttttagaggtactagttatatataggcccacgtgttgtaacgatttctttatttagtttagtgggaggatttagactaagtgggatttttttttacaatggttggttttttgataaatcagtttaaatttttttgggcggtttttatgggtggaaagagatttaggtggatgtggaggactccctcttttaagtagtagagatatatatctttgaaaaaactagtgcatttgcccataggaacttatatagttttgtttgtaatctagttcaaattaaataaaagtatgaattacccctaaactattgtggttgtctgaatctcccctaacaattgcggatttgtggtcgtccgaattaccccttgaactcaaataccatatatcttacatcctcaactattcaaagtaaagaaatagcccttcctctctccatgagtattgtttcgagtggtttaggctttgagctgcacacgtggcagtccactgtggcaaaagcaggccttgctgccaccctcgctaggtatttgagagggaggaatttagggatttgaggggagagagaagcccacaatttgtcccatgtgtgtgcattgctgacatggcacttttgccatgctgaacaaccacgtgtatagctcaaagccaagtggacagcgaggtgcctgcaaagggaccaaagccatggagataaaggacactggagcgcatagccgataataagggcacggaatcccgagtgattgggatgtgccgtctccggctataggggagccccaaagaccgagaataaggtagggcagggacaccttgccgctgctcggaagaggatgagcagataggggagggaggagaagggtgtgcagaggcatgggggagtgacagtggagcttgatctaggtaagcgacccaacatccattgatgggaggagagaggggagaagataatgttgaatacacgtactagtcttaacgcagtatggatcatccaaaagtgactaaaattcatagtattttcaggtgactgaaaactctagatacaccattttagtgcaattcccacgaaattcctcaagtatcaattaaaagagagacccaagtttactaggggcctccatttcaaaagagacctaaggttatgaaagacaggcaaagacatatgaacagcactccacaccactatcacagtacgtcgattgatctcaacacacgggccgtgtgtgaacaaaggtgtactagattgtataggagtatatcgcaaatgagatatatgtagttgcagatatgcaaaacgtggtcccatgcaaccactcatgtccatatataatctgatcgattgatatggtgaccaaaaggacagacaatgcattatattcatcgtgtaaggagaactactgggatatcgatcaatatagtatcatctagcgaaggcatatatatgcagctggtgcgatggatcatatcacgcgcgcactgatcatatgatgatggggaaaatggcaacaactccatctgttcctgcacatgcacgcatggccattcccctctccctagcttttctctttaattcgatcactggttcacttatacgctcttaatttaatttgatagacgtacataggattattgattgctcatttaggacgcgaaacttttattgttttgaaacaaagattcagaaattagataaacggctaaatgatagagcatagctcaactggttagtttttttttcgtgaaatcaatccgccgggttcaagttctagagttaacacggatgctcgcatttatggtaatttattcttttagtggtagacaacatactcgttgacaacgagacgtccgtggtgacttcatcaatctcaagatatattggtccaatttttcaaaggtactcataggggtaggatgtgtatgtgttgttagctcccacgtttgtattatattttgaaaaagaatatatacacgttgcatggggtaaaagaaactagctaggaaaagctagctagattccgcgttacaaaggattcatggattaatgtttgcccatcaacttcggtgttgacagatatgatcccgcacaaataatatttttttaaaaaaactttctttatcatcgcttcttattattaagatacttttaaattaaatcaatttattaacttcataatatttaatttgttcgtcttacccttgaataattgatatgtaaactcaatttcagctatcgtccatcagcactttagaacacatctagttttgttagctccgtttcgtatgctaccgagtttatggcttgctctacgacctagacctacctgtcagccggttgccctcatatttttaaccatttgatcatcaaaaattgccaacttaaggtagaactatatagagtaaagtccatcaccggtctctaaacttgtaccgctgtgtcatcctggtccctaaactcgcaaatcgaccgttcatatccttaaacttgttcgactgtgtcattccgatccctaaacttatagatcactcgtttaggtcctccaacttgttcagttgtgccacctcagtccctaaatttggatttgaatatcatctgggtcaaataggacggtctaaagactttatatttaaaaataattcataactttttcatgtgaactctaatgaagataaactttataacaaacttgtagccctcaacgcgatctacaactttgtagttgaattttttttattttaagtcattttttgtcccaaaatgtaattttaaaattaaaatttcaaaatctataaacatgcaacaatattttgggaccctaaacagttttaattcaaaaacttttcaactacaaagttgtaggtcgcgtcgagagctacaattttgatataaagtttgtcttcattagagttcacatgaaaaagttatgaattattttttgatataaagtttttagactatcctgtttagggaccggggtgacacaactgaacaacttggaggacctaaacgagtgatctgcgagtttagggaccgggatgacacatcggtacaagtttagggaccggtgatggactttactcaactatatatgtatgcctattgagaaggcaaggtttaaattatggcttggagcattatatcctttctcccgagtatatcaatatgccatgaagaaaatttatataggtcctgtcccctaagggataatgaacctatgtcctactggttgtatttgtatatgaaagatatatgtgtacaagaatatggaaataattagacctagtcgagactaacttgtcgagaatctcaatgagatatttttttggggatctccttgtttgtgtagccccctcctagtcctaggttcaagactcagtgggataattttggtatcattgtgtgcctagctaagtccaagtagatcttcgtaatcttgcgatagttggatacatatttttttttatctatttcaagagagatatttctttatggagttgtttccatatatgaatttgtatactattatttcttcacctatgtatccatacgcgtgtgagttatctcatttagtataacgatagttacacaccaaatccaaccttttctctaccatcaaattgatgtccatcaagtgttgtgtgctactaaaatttaaattttaaaacttgattttgatgtttttccaacgtatatcttttttttaatattgacttttaagttgctaaaaacacatatataaaagttttacgcataagttattttttgatcactaataaattgttacgtcttataattggccataagcaactgatgagggcttggaagtcgtagtcgccagtaaacatatctatgtgatcaaacatatagtatatgcatatgcagtgaagcatgcatgtgaaaatgatctgaatgtagcgggcgatgcgtacacatacacgtgagatcgaagcgacatatatcacaccatgctcgtgcagttgcatcgatcgcgtaatgtactaatgtatggatcgtacaaaagttgtcgggcatatgcatatgcccatttagtttctctctgccgatatacgctccaatcactgatcagtgcacagtgcgtgaaacgtacgtacaccgatcgatcgacaaactcatgcctttaattatcatcttgtcgatcagtcatcgggaaaaactagagctgattttttttttaaaacacagggcagagcatagaccgcttataagcatgcgtacactcacctctctctatatatatacacatgtacacgttaccctataagtttatttgaaaagtgatacatatcatgagattcacaaagttacaacatacgtcttcgctatcaacaagcatgtcgtctattattgaaaaataataattagttataaatacgagcatatacatgctaaatcatgaacttgaacccagatgaacaaattccaccatcagaaattaagctacgctcatttcgcaactgacacaaattaattaactacacaactaattgactcaatgaagctatttacttagctttcagccacagcttattttctttgttctttcaactatgcctcggtccaaaaccggttactaccggtccctcaaatatattagaagagatttgcttcggtctagtaaaaagtacttcaaattgccggtacctcacggtgctaaatcgttttcgaactttggaactaactaggtaggatgggcattggtagatccaacgatcggaaacgatttggcaccgtgatgtaccggcacttttagatactttttgttggaccggggcaaatctcatatcagaaacatttacatttcatccttgatgagggcaccacgtggtatcctagttatcaaattaaaattttgaaaaagaaatatatgaggtggaaataagaggaaaaaaggcgtgaagatgacacgtggattatactatatttttgttacttaattattattaattggtatagtagtatgtttgctatttgcccatgtacgtatactatatttgctattcagtatcgaaaatcacctttacttgagtatatatagggatgaaatatgaagaaaaaattcgatatatagttgagaaaccaatagtaaacggatttactatggtaggaaaaccagaccaaggccatttttgagggaccaaaagtgaatgtaatcccaatttttaccagtgcttaattaattactattccgtcatgttaatttcatgaccctagctagctagattgggcctagtgacggatctactgttgggactgttggtgcgcaagccccacgtccatttcctatccctaattagccattaatgattctcattaagtttaattagtaattaatataaaattgggatcccgtgatgatagttgaagtgcttagtgcctaaaattgcaaaacactcagaatagactataccaatttatttgtagacttttaatacatatattaatgtagatacaaattaaagtggagaagataatatgtttattttataatgtgtatttggatttcatctgaaaatgctaagctgatattcctctgttcgtcaaccgtggaaacgtagggttgcgcccattcgctccacgccattttagaagaaataccaattaagccccggatcatgagatcaaagacaatgctatcccgctatggccgcctactcttccatatctctagtttgctttagcgccattttaatttacattctggattcgcggctgagagtgagagaggacctatttaagcatatactgctatattattcatcaccggccattccttaccatttcttctccctctgcatggtcagtgctcacaaacgaccaatcccccaaacgcagcaacaccaagcaaaagcaaaagctatagtccttcactagcttagctagccaagaatcgggagcttagctgaaacctgctgctgcattggagaagatcgaatatggctggcctcgggttcgacgagaccgagctccggctcggccttcccggcgccggcgagctggcagcgaggagctccggcaagaggggcttcgccgagaccatcgacctcaagctcaagctgcagccggcggcgcctgctgccgtctctggggaagagggtgctcaggaggacaaggaagatgccgacgcggcggcggcggccgccgacgagaagatgtcgatgaagaggtcggcgagccagagcagcgtggtcaccgcggagcccgatcccgacaagccgcgcgcgcccaagtacgcactcgacctctcctctcctcgttaattaatctccatttttgttgttattttcatgaacttgtgtggtcttaattcttgtataaagacagtttaatccttgaagagtttatgtttgctctttgtttcatcttcttgaaggatattaaatccacatagtagataggactgataaatggaaagctagcgagtagcgattcaaaagtatattggcaagtgttttcaagaagagccattagttagccctgaaggaatgaagtaaataaatttctgcagttttgggaaaagactgtaatttgatatctaagttttttttttgaagaacaaatttgacatccaagttaaaacgaaatgaagtcggagaatttttcaagtggcagctaggcaggagctagtttttggtctctgtagttttgggaacagagacattaggatcccaagttggatactctggcaatgatggatacaatattcagtcaaaaaaagatgatggatacaataaacgaacaagaacaagctttccagtatgtagcagtagagtactatccccgttctgaaatattactacatagaatagtatttgactcatccaaaacaatgaatctggatagaagtaatccagattcattgttgtgagatatatgacgatagatcaaatctcatcctaactactccctccgtctcagaatatagcaatttagaatggaatgagatccattttaggataatgtatccgaacatcccatcctaagttgctatatcctaagtaatatttagggaaggagtaagttcacgatagcttccgtgcgtacacagaggagcagcagtagaaaaatggccatctgatctgaaaccaacaagccattggaacttggaaagccgtttttctaaagaaaaaacatttttcatttatgtagtgcacagtaactggcagagacatggcagtttgcttgtcgcactaatttacacaaagcttgcaaattaaaataaagcattgtacaaaatggagaaaaggtgtcagcttttctttttctatattttttttacgaggcgtagctacagatgcttcgtttatcattgaaagaaaaattagtcgtaataacatcctctggtgtgaaaggatagacgagtgttcaaagacagggagcttcacatccctcaactagcggcaaaaatcctgaatgaaatccatatttggatggcatgtggtgcaaagaatcttgcaagaatagcaccataacatcctctgctataattttttcttcttttttttctgctacccctgtcctcctgctcttcttcttaaatataaaactagctcggctggctcagtttttttaaaaaaataaaaatagtcgtaataagcatagtacttcaatccagattagatagatctcaccattaaaaacctaactagttgagcgacgatgatgtcaacttttcattgattaattaattaatcagaatgcatatatgtcgatcagggcgcaggtggtggggtggccgccggtccggtcgttcaggaagaacgtgctcgccgagaaatgcaaggcggcggcgctggtgaaggtgagcatggacggcgcgccgtacctgaggaagatcgacgtcgccatgtacaagagctacccggagttgtccatggcgttccagaacatgttcacctccttcaccatcggtatatatatatatacactagctatatatatatattcaactatatatgcatgatcacacgatataataagtttctctttgtcactgtaatagaactaataaaatcaacggtttctactaatgacattggccgttacataatcctgtcagtagaggactctatttcatatagagacgatcttaaccattgatttatgagttattctaccattatcaacagttgaggggtagtataaacaaaaatatgacctattagattattatagaaaagaatcaaagatgaacgatatatatatagactgattaaaatattaagagaaactattgcaaaacatctgttaaaattaatagggtggttgttgatcatgttcaggcaagtgtgggtcccatcagcagctgaaggagagcaataagctgagagatgacctggagtacgtgccgacgtacgaggacaaggacggcgactggatgctcgtcggcgacgtcccgtgggagtaagcctcgccgtcgcgataagcataatcccagttctaataattaatccccatcagctaagctagcagatcggatggatcgatcgagtaactgatcaacggatgaaataatactccctccgtttcaaaatatttgacaccgttaattttttagtacgtgtttaaccattcgtcttattcaaaaaatttaagtaattatttattcttttcatatcatttgatttattgttaaatatactttcaggtacacatatagttttacatattttatattttttttaaataagacgaatggtcaaatatgtgctaaaaagtcaacggtgtcaaatattttgaaacggagggagtaataataattctcttgatctttaatcctcatctcgtcgttaattgtttgttgcaaactgacatacgtgcaggatgttcgtcgagtcgtgcaaacgcctccgaatcatgaaagggtctgaagccattggccttggtcagtactattgtctcaacagaaattcagttcagagtttcagatcaaaatgtgttttacttttacatgcttcatactaatttggcactaactaaatagtatgtttgtttgattccagcaccaagggcagtggagaaatgcaagagctgaagctgatcaaggagaattaattagcgccgcatccagatttattaattttcacggatattatattatattatattatattatattatattatattgcatgcatgctttgctcctccctgtattatactagtatcaagtaattagtttactgtaattcagtgtcagttaagcctgtgtcatctcagtttttctaagggattttgatgtatttacatgtgggttagctccatcttgttatgctcatggagtatatatatacgtaacaacaatgtcatccttacgtcacccttttcctctctgttttttttttctgttccttttttttttttgcgggaaatgcggttggtgattacctgttcttctgcagggatcctgcagcttgtctaacactagtacagcagtgctcaattatcgtggccatccaacagattataattaattgcctagctgcattgtttaattaattatgtcgaggtgctaattaaaaaacctgtttctggattcaatgatgagaatgagaggcatccttttgtgatgtagtgtacacaagaaacattagtatcttcacaatgttttatatttcccagccagctaaagagaggaaacatgccatgtgcatagagatgggggatcttgtttttatatatcttccagtggtaaattgtgcatcataatataatatgatgttaagagtttggggtttttgttttccatctatctgtattacgtgctaaggtgttcaaatagtgaattgttctacaagcaagcaaataagaagggtgcaaggttggctaaaaaggaaaaaaaaatcaggttgttggaaagcagtgccattatttttttttataaactttaggctgctgcttcaatgctattgtatacttgtatgcgaatattgtatccaaaaaaggaggttgaatgagaaagctattttaaactattgcagaacttaagctatcttttgttgatcctatgtccccttgtaatgatgacacgtcccaaacaatccgggtgttttcaaatgctccagcagagcaagaaaagaatcaaagatttatttttttacaaagttgtatcaagttgttagttgcagcatgccaacaaaattagagatgagtacaggttatgctgatatcaggggttctaatcttctgtattttcttcctctcaaggagacatttcatatattaaaaatcttgtacaaacaggaatcaggaaacaatagctagtacggtcggtagtaccaaccgtctaaactggagtagcatgtgtattcacattcacactgaagatccatcaatgagattttctaccacttgatatctttcagacttgataacggagtaaaatactatccctagaatttcttccataccttaatagcagagtaaaattataccactagatttctttcagacttaatagtacagtacaacatttgtatcacagtaactgcctatactgagggcactcatgctaagctagcaaagcagtaaatgagttgaacattcctgagcataacatttcaaaggatacaggctctttattttcccgaatagaatagaatatatcgtcatggctacatattattgttttacaaagtctcaggccagggaaacacacatcataagcaatggaaacagttgcccaaagcaactttatacaacaagcgcatcatagatactataagttctggagacatcaccgaatgcacaacaacttaacaatctcccagcagtgtgctataaaaattaggatgtgtacaataacaatgctcaggtttctacatctggttacgttattatcaatcaagatgaacggtgcactggttccgccttaaatcgatcccctttttgtcctgcgatggctgagaaattcagaggtaagcccaatatgtaggtgtaatggtcaggagattatgcggatttagaggatgaggttacctcttgctgtgcgaactgcggaagttgaaccctttttgaaccatctgctagccgcttgcatggaagatgtggttcagctgcagcgaactcattcagaacctggcaaaaattttggcaatacattggaaaatgaaaggcaaggggcaatgcttttccagatcttttttttaaaaaataaaaagatggctcaattgacactattaaaaaacagcttctcagctttataaattatttgtccgtacaacaaattaagtgcctaaaccagaactaccagtctttgcaatcagaactgtaaaaggtcagttgcactggttgcccaacaaaatgtgaaatccaacagtttgcatatgaagtttctaggaacatgtttgttccacatgacatgatgtttaggaacaagtttattgcaaaagttatgccataaaaaagagggtaaagcaatttgatcaattgcgaatttgaagtcttctggccggtttgcacctcaaccagttaccagcaagctggtcaggtttactagctaatctggttcatcttttaatttaataagaggcaaagcatttcaaactgcaactagccaactggcgactgccaactaccttatgctctctcaaaattagtgctggtagcagtagcatacataggcgtcttttcagtttaccttctctgctagtcaccgctcaactctaaattcgtgaggagcaatggatagcaaagcaacaaagcaatgaaaacctaatgcaccagcagttaaggacaagatggatgaaccacacacatcaacttggatgtcagtagttcctaagatgatgacaattgacataaggtagacaaacaccatgaactgatcaagagccaaccctttagaagcaagaatacagacacagggagactgatgagtgtatagagtatataggtgttctattgctcgccaatggtctgagttatttggcctgaaccctgaagactcattgagttggagggccttagactaaggcactccagttcactatataatttttttaagggagggaagtctgctacagagatttttgtgagaagtgtcttatatataaaatctagttaagaaaatctcaagttacaacatcagtcacatgacgcaggggcatcaaccatcacaatgtacacacaccgcatccaattgtatggtttatatctaagttatgtattgcctatggtctggtataccttcagcctgctggtgcttactcctttgtagattccaattgaaacacttttcttcgttatgttgtctttcggtttatcagtttctggagggtaaaaatgagccaaaaaccaaaagcaaaattagatgtttttccaccatattggatacaagaaccttttttccaaataaaacaaactaaacttgaagttagcaaacttatgttcagttcaatttatcaggagtgtcttttagtttatcaatttctggagggtaaaaatgagccaaaaccaaaagcaaaattagaatgtctttccatcagattagatacgagaaccattttccaacttaatacaaactaaatttgaagttagaaagcttatggttagttcaatttatcaggaccaatctagttctgcagtctgcacaagggcacatgtctacagttattggtaagcaaaacacacatgtgaagtgtgttcttcagaaatatctagtcattctacaagaattccaattacttgttgtccattgtgaatgatttgatgcttgtcaccttatgagcctacttgaaagttgaaatacaagaaactcaaaacacagtaacaggaaaaatgcaggaattgagtgtcatgatcaatcaagtcctacggcagctgaaaaacaaaggaaaacttcaaaaggtgtttagatacaacaccagaaaattgtaggtttggaagagacagaaacagaagcatgagatatggaaatattcctccaaagcccatattgagtagtctaccatattaggagtttcaaaggaaatcatggagtccaatcctttgttccaaaggcctccataggacttttttttcttacagaaggattgtaattgtccaaaattccatatttatcctccattttaaacggggcctaaaaaatgcaataatccagcgacattgaattttacctagtgcacttgtaactgagtaattgtgaaagaaagttctatccaaaaggaaaattcacatgggcatgagaaagggtctcgtaaactttacctggtttctgattgctccaatcaacatatcatgacaaccagatgcatgcacattctttaattttggacactgaagaagcaaccgttctgcgcaaaatatttagatggttaataacgatggctactatcaacatactcaacaacatgaagaaaaggggaaaggacataagacctggatttagatttgtacaggagttgaggtttagatcattcagctctggacaatttagatatagagcctgccatatgtgaaattagtaaaccatatgaatgattatttcaataaatcaaagcctgcaaattccaaaacacttacatctattgctgagcagccccatagactgagcttcttcagattgccatgcttaatgataagcttttggttagtagactgttttttcgaggtgggcaattttggacaaaatctaatggcaccgttaatttcaccaaaataaggcccctgtttttcattctgcaaactagcacataaggtcattccacagtccattagctgaagaagtggtaattgtgctgttgcaaattggatcccacctatgaaaagacaagataagttttttttacgctggatcatgtaaacacatacaggtggacatctataatggagcacgaataataaaccatgagaaaaaatctgtcttacacgtcgtcacatttgggcaaagagcaaggagtagccttgataaagtatgaggaaatgccttgcagatcatcccgacaccattatcactgatactagatctggagtataatcaaaatagctaattacatcagttaattttgaaaaccattagaggggaaataaatcaatagctttatgatgacttcgtattttatttatttctaaggacataaagtagtgattacccgcttaaatcaagcaattccaagcttgcacaagatcgaacaatagatgcaacagctgcatctgttatttttgaccctagaatcaatgatagcatgcacaagcccctgtgacataataacaagattgagatcaaagggttgaaatgctacatagttagaaatttgtgatgataatcattgtattatagctcaaagatccagcaagattacattaaaagcatggtgtgctggaaagatacctgaggctagcaccctccagagcaaacacagcttcattggataactgagcagatgatatgtgcatgttttttaagttaggacaggtacgacccaggccatccatcaatgtgacaagatcagtacagtcgttactttgctgtgtgaagcacagcgagatttcgctcatgttaggacagtttatgacctacaaggcatttacactccaatgaattatagctgaaaaagaagctgttaaattgttaaagtattaaaacaaaatattaccgattttgaaagggaacaaagatctgacagccaaagaattgacaggcttgaggagtttagattaagaaaaccaaggttacagcaaccaccaattttgagaactgagagagaatgcttttccgaaacaaaccgacttagttcctccctgttgagaacagaaacagctttatttgaaacaggtcctggaagtgggaggctaatagtgttgcagttattttaaaactatgtaaaatcaataagtattgaacattcaagataccaataatggcaatatagcccaggagaaaaactggtttatgcaagcataacataacacgagaaaatgattagggacaacaaaaattatcagcaaaggaaagaaccaactagattgcatttttaatagtagaattgtaaagaagaacaaatcctggcttggcagaatccaatttgctaggaaccttgattttacatggcaatttttagatgggaagctagcacttgcaaacaaatacatgtcaatttgagctattcaaactatatccaagcaagcccactctatgtaatataatgaaatttaaagaaccaaaagacaaagtcaagatacataagtaaacaccacatcacgtatgcaacaactaataagtgataacgtttgaacgtacccagtcatcctgttgactgcgttgtcagacatgctgatctcaagagttcctaaacttgggcaggaaaaagcaagacaggccagtatagtggcatcaacatcactgcataaaacaataagatagttagatacctgtgataataagttataagtacaacatctttttcaaagcgcaataaacagaaaccgcaagaactgtgtatatgccctgtaataagcatagcatcttcttctcagtgtaaataacagaaacagcgtcaaagctatattgactaccacagtggccagatccaaaaaaaggtagttacttgtgctcattcacgtaaatctaagcgcacaagttaatttcactgttgataggcttgagcgaatctctatactgatggaaaaagaaaagatttttttattatttgaactttttaaatttttaatttaaaaaaaaaacctttcaaaacttatttccaagatctgaaccttttggccacactagccggactggcgtggcaaaacaatactaccatgccggtctggttggcgtgacaacgtatttagccatgccggtctagctggcgtggcagcgttatttggccacaccaccctggctggcgtggcaagataaaactatcgcgcctacagtgtgtggcgtgtcagtgttgttttgccacgctaggtgggctggtgtggccaaaagattcagattttggaaataagttttgaaagggtttatttttaaaatttaaaaagttcaaaaaagaaaaaaaaaagggatagtaagcacaaaaggtgtaagaccagttctacatttgttagtgtgcttgaaaacctttacgatgtgaatacttctaatttgtttaggacaaatattacagttacttaaatgataatagacttgttagttggtggtcactagccactttatattttataaaggaagggatctttaaaggttaacagatgaaaaagataagacaagtgaaacaaaaggcaactatgctacaatcccttcactgccagcttctctatcgcactggacctagaaagagtccaaactggaagcatagatccttgagaaatagagcagctatgagtgctgtccactacctctaatgttccaaaacagataatccctcactcgcaacagagacctttcaatgtattgtaccagcaggtcattgataatcatgtgttcaattgtccttttgctttaccaaccaaaatgctacctaatctgcgcccatccaattgaccatgcatacagaataacatgtcccacaactgtagaatcagtcaatataactaaaaattatgatgaaaataaagtttcattaacacggcaaagtggagccaagaaaaatgtaaagaaccccattttcacaactgaaaatagatgtatgttatttaacataaaataactgaactgcgtaggtactggcagaatgaactaatactgttttttaagtttttaaaaatagttggtgtaggccacaggctcaaataatatgaattatgatagaagagaacagtttctactgttcaaaattagcagattttattctagggctagttctatgtcagtccatcatcaacgataaacaacacattacatgtgcatttcctacaaattaatctagtcgatcacttgtgaaagttatacacgccacccttgcaactatatcaaaagattgtccaaaagagggagatatcagcacagacatgtcttaagcatgctccccattattttcaccttgctgcactgagaagtgagacactgacaagcatcgtgttgtgcaaactaaatctccaaacaccaagatctgatgaacccctcaacagaacacacgaggttttctcatccaaagctaaaaggccagaaatgacgagcattttcccaacagtttgacactagtaattccaataaaatagtttcatgtgccaacaccatttggtagatttaccacctcagcacatccgaccgcaagtccatgggattccggtgtcgtaagaatagaaatggcatttcagtgccatgccgactagcgataaatcttctagcagcagtgacagatcggccatcagttgtccttgggaaatctcacgttttcgacgagttagtgtgattgtgctatggagtttaaccaaaattcattggccctaagagtcaaataatttagaaggcattttacagtgccctgggcagccaccgatgagagatccggccatgaatccgagcagatcggcgtggaaatgagatcgtttttgaaccggattcgttgggggtttcacctttccattcgcagggagagccgcgagagcgcggggcaccgcgggagcagcgcgccgacgaggctgaccccagcggcgcggaggcgcagctcctccgccgcgcgccacactcgccccgcgcagtcgcgccagccgcggctgaccgcggcggcggccatgacccccctgggccccaggcggcgcagcacctccgccatgagctccctcggcacggccctcccgcccagctccaccgcctcctcctcctccttcaactcctcctcgccgccctgcccctccaccat

SEQ ID NO: 22595 - DNA, 9375 bp, Oryza sativa
agggggtgggggcggggcccccggcggcgcagacgtggcccttcttggggaggccgcagcggccgcagttgtagctgccacgcgtcttggggcgcggcggaggcggcggcttgggcagcgacgccatgggcgcgccccccactggatttagggtttgctcgcgcggctgttgttgttggaggtgggggatggatggatggatgggtggggaggggaaatagttagcagctcgggaggagggcgggagattggggacggattggcgccatttttcgggtcgcgagtgacccaccgcccgccacgacgccacacgcgcctctacctctcgctctcgacagccagtcgcagtgaaaaataaaaggaaaatttaaaaaaaatggatgttaggttttctatggctttgggaacggggaattgcctttcatgtttaaatactttctttttttttcttcttttaccactggagtgcctggaggaaattcccatcactttcctatctttttatcgccctccttcagacaatcgcttttacactcctcgacttaccctgactcatttttcccatgtgctcttatcaaactgttaaatgatatgttttttataaaaatgttttaaaaaacatattaattcattttttaaatacaatattaacagatagttaatattcaaataatcatatgctaatggatcatttcattctacatatcttttcgatcttctcttttctctcctcccaaacacaactatcaagataaaacttgaattttacatttagttttaagttaattttgagtttttttttcatcgtagtttatttctagcattttcttttaaattattaagaatgtatataaatttttatttaaaatttattttttggttggtgataaataataataataagcaaaaacgatgattgtgtaaatttcttctttagtgaacttttaacttcctagttcctactagaaaatgttgttcgtttccaaaaatttaaaattgttgtgtgattaaaaaaatgatgttaggacactcccaattcatcgagtctatagatataattatctatttatttcaccacgcatatatagtttccacattagtgtctttggacgagaaattaaacaactattttccactcacaaacaagtataggaggatcagctatatcattttagtcaatgtgtccatctgtgtgtactatcaacttcgaataaatagttatttaggtagtcgtcccttgacaacattctaagttgatgtgatcggatcagtgaaaaagctgcattccattaagtagaacaggcacatgcatccaatctatccatggatcatcaaggcgggttgtctatcgagggggattgctccccaagtgtatcgtcatcatcgacatttcctcattatgtttactcaccctcccacaactacctatttgtgtaatagaaagcttcaccaaggtaggagatgagtagtgggatgtcatctagtagagattggggtggaagtacgggagattagggtagggatttagcaaggagatagactagcggtgcgcaaaatcgttgagggagagaaagtgtggacaggagaatggagttttcacaggaataggcaagcgaggaagaacattagcaattcccacgcgagggaggcaccacttcgagcacacgacgaaggcgcgagatacgagcgcgatgaataatggcgggaatggggcgacgtgcagggatgagagatcgagatgggtgttgagaaaggaagtagacaatacccagccaagtaagggatctagactctaccttgggagctataaggatggaggaaactacaggcggtcaaatgttgagttgaccatcggtgaaacatcgagttatacatgataaaaaatcagctattgaacatttagaattttaatgaaatatggtgaaaacacacattaaacatgtcgccatcacgtatgaaacattgagtttcaattgcaacatatgtttttctttcagcagaatataatcatgtgttatcttgttataaatattagataagtagtttaggagaaaaataattttgaagatctatacaagcatggagtagaaacagaataagtagtatgctagattgctaggagagagaataggggcatgggcgcccaatactttaccgaccattggtgaaacattaagttattaagttatacatggcaaaaaaaataaactattgaaatatatttttatgaaaaacaatgaaaacacacattaaaatatgccacaaaaccgtgtatgtaaaagtgcacctaggcccccattggggttttggacgattgatgacaaaatcgtaagggaactaagtgtgcataaagtgtattgaacatgtgttatttccaaaatgaaaagaaaagaaattgcaatggtaacccttacaaaagataaggaaacgacactgtatagaatttgacatttttgtttacaatgcatgcatgggtgatgcttggagctgccgaggtgccgtctgtccatggagcatgaaccatcataattttatcatgttccttttttttcagagtctaggcatgccgcgctatcaagaggggtgtgtgcaatgcgagacaatgatcaaaagtgttcaaaaatacattcttaattgttgtgttgaaaatgtcaaagtcccacacccttgaatccttgttttgggctttaactggtaacctggagtacccgaggccccgagcattaccatgagtttcctggtaggcttttcgtgtgcctagagctcctatttcgaaggccccgaccttgacttggggccatctttcttgtagtacgtccacaagactctgggagttatctcggagccacccataagccacttcgctgcccggagcctcgatcccggggacctcgggctagtctgagccacactcagcttgtagtcccggagaatctaggtggatatcccaaagactccagacaacctcctcaggtgtctagaggttgttttccaggatctccgagatccacttcacggccacagcagcaacacttggaggctccgaggctcaagcctaaatacttcgagatcgggctgtcagcctctcaacggctagtggttggttggtgggggtaattatacccccccggcaaaccaccaccctctccccctctagctccccgtttgtgttctctctctcttggtgctctccccctctccatctctcttagctttgaggcacatctttgtgggattttggtggcctgagtgcttgtgagctagagttcacccttgagcacttgagatcggccttgggccttgcacgtgcttgttactcttggagccttgggccttgggcctggcccgagccaatcgccggtttcctggtcaccgggaggcgccttccagcaagggtcgccatcgtggagtccgcagtcgctaaaggcggggagtcaccggacgctttcggtgtggagtcaccggtcgccggcagcagggatgcgcccggcgccgataggggatggcatgacgcccgggcgccccttctgtccgctgagtaggtctgggccgccggtaccgtaccgcgagcctccattgtcctacgaaccatcggtgctgtcccattgcaaacggaaggccggactcttcatatcgtggaagagctacctggggaggagattctatggttgctgtcctaagagggtaagttaacactaacccttgctgtaaattttagctattgatcagcaatctccttgttatctattgaataattgctattgatcagcaatctccttgttatctattgaataattgctattgatcagcaatttccttgttatctattgaataattgctattgatcagcaatcttagtaaattttagccaaagaaaaggagataaatctatttttggtaggcttgtaagatagatgagagctattattcaaatatgtgtggtaacttctcagtgatataacaattcaacttcaagtattttagctatcgattcttgtcaatttttgttgttcttttttttctaatatgttcatattttgtttgcatatagaatgagacaaggtgcgatttctttcggtggtacgaaccgcaatttgatgaacaaggtggatttcttggtgactgagcttgaagaaaaaaaaagattaaggaagaaggtattcaaatccgtttgggtgagctgataaatgacctcaattttaaatgaaggatgttcagccttagagatgtggagatgttgttgccaatctctgctattcgaaaatgcttttgcaccgctgctagttatcattcttcactatcttagtttcagtcccagttagtttctgcagtcccagtttgtgtttgaactatatcgttggttagtctctatgtgttaaaactccatctgtaataactcttgtgtcaaccttatcatggtcacgccatgttgttggcttcagtgctatccaatgccggcttcttacatgatgttactgatgttttgcactcaaatgcgatgtttcaataactgccgctaggattaaattgaagttgtatgaaaattggcatttcgtgcctaaatggaaaacatggcagtaaatgggaccaaagatactagaagcggaggatgcaagaatggatgtttgatgctaaaatggaaattgagctgatgtctctgccactaaaaaagaaagtaccaaaatagaagattaccaaaactggagcttgtgacggtgaaatggagcatatggctctctaatggagcagatcagggaaatggagcaacatcagggaaatggagcatgtcatggtgaaatggagcacctcagggaaatgcagcaatagcagtgaaatgcagcacatcagtgaaatgcatgtcacatgctccatttgcctcacttgctccatttcagcagcatatgctccatttgcctgacgtgctcatcaggcgtgaaggggttgcttggggcgtgacttgttccacaccggaccacctccttctggccacaacggttggcaaggctaaagagctgggccacgatcagagccatcttctccagcatgcgcttgttgcaaacgcctgacctaaatgcgtgtatgacaacatggtgggcgatgtgcgggatggtgttgcagacctggctgaatcgttggagaaatggcacaaggtctcatccatgccctagcggagggcgttcaagtccacttccattccgggaagaggaaacgttccctgaaagttcgccatgaattggtggcgaagatcctcccaggagtagattgagctctcgaggaggttcatcatctgggaactcccctgggccttgagagcgatggggaagtagttcgccatcaccttctcatcgctgtcggctgcctggatggcggtgataatatctggaggtactccgtcaggtcgacggggccatcatacttctcaagcaggttgggctgaaacttggccggccattgaaccagctggaggctcggagaaagggttaggcagcccgagccacacactgcttcagtggaagggagcattggggttgcccgacggccttcctctagatggtcggggaatgcttctcccgttggctaatggagggagagcgctgatagtcaaaaaggcgcagctacccccacgtgggtggcacgctgcataggcaccctcacgctccccatgttatcgacgagatgtgtagaagacgtgcgcatactaacattaatgtgggggagtggttggagcaactccctcgccttgtcagctttccctcgatgtggctacgttcctcaaagggaaacaacttacatcggagatggttgggcttcgcctccggatccatcgcgctcgcaatgggcacactcgggccccctctcgaggcatgaagagtgcttgggccgctgcccgagtcccaaagacgattgggcttcgcctttggattcatcacgcttagggcaccctacgtactcggggcagcatcgggcacccaagccgttcccattgctagatatatattgttcatcgaatttggacgagcttctcgaaattatcaaagatgaaagagttcatgatgtcacaacttacaagggaggcccttgattgcttgtacttgtctcagtatcttgaagatgtagatcttatacgtcgtgatgtgtaccacagcgccctgatgacccgaggggaaaggaacccggttcccatttctttgacactatgtgacatgtggatagttagatggctaaataattactcacttaactcacattagtgatccatacgtgtattttgaaagtagagtgatctatatgacacatctaaacaagttggatgagcctgcatgtattttactctacaatatttattgcaaaatatataaaacattgtttaaatacggaggtatatcattcgtaagaaaggaatatcataaaccgaaggaagtagaagttaggagaaaaacattaccattgagaatcattgctcagtcactccaatatgcaccagtgatcaactcacatcaaaatattaagcaatccaaaatttcttttagttttttttctgcacatttatatcaacctttgtattattctgtcccaagcacaatgaactatgtgtaatttgggagacctgcacaaacataccatgaagagatggcagactttatcaatattcatgatagcagcaccacatttaaaagcaagaagaagctcaatggcactgaacattactatcgacaaagagtaataattggtaaaggcaacttacagaatagattgatatttcaatatagctagaatggtgaacaatcatagtgaggcttcatgtttgaaggtagacacaagatcaaggtgggtaactgggcataagtcaaacaccaagtcaccaacatttatcacccgcttttcattgatcaaaccattgcaatatttttgttttgtgcaagaaagaggaaagggcttcggcgtaggtgtatgagaaatcttcgacaattccaagttgggcgccaccagcgaggatgacaggcgatggagcggagtgagaatgcacgtagtggtgacaacgataggaggatgtgaccttcagagagagagagagagagaagatacatgcaacgatgttattagaggagcgaggaggcatcatcgctcagaggatggcatggcggctgggttagcgtagatgattttgcagtggcgggactcggcgcatcagctcgtggggtcagtgagttcactgaatgatccataggctcaatccgttatggatgtatgaagccattagttagaagaacccgacaactgcggaatgaatggggggggaattgtctatgcgtttcactggaaacatgtaagaaagaatgaaactcctccttttttatatcagtatctatactagtactacaaaagacaataatgatcagcccatgtacactaacttttgcttgttttacaaattagtgtatgatattatgcagtagaatgtctgttggaataaagtgaataacatatatttaaataaacatgtgcattttacccatagcaaaatatgggaattttgctaatagatatgaatgtacataatacgtaagtacatcaaattcgaagtactcctagatgtagtatatcggtcctaaaataactttatatttaatcatagtaacacaaattaagattttttttaaaaaaagctaaagtgttcttcatcaatgaaaaaaataggatcggtgggtggataagtaagagatattaaagagataaaactaatctatttacatatcaaagtaggtaaagagtaagaaatgaatatttgggacaaatcgtgtatatatgcttaaaaagtaaagttaatttagaacaccgaaaatagtacattcaatccaagtcgaacaaacaaacatatgatctggagaactctcttgagccctgtcaactttcccctccccttgctacagtagatcttccgttctccgcccctcccccaaaatacctgcatttcatcgaccgttggtgagggttggaggaggagtctagccacctcccatattagtatagtgtagctaggttgtagtatttcgtcaggttcttactatgcttttgggtatgtcccgtgtgatttctttttggcgaaggacccgggatgccgaagtggatggtggaggtgatggtttccagaggtggagctgtgagatgcgaaggtctgttaatgaattgagggatggagacatcttcttgtgctcgtgttagctacaggcgccatgtgaacgcggcgttggccttggagctttgggcggcattgctccgtgcggctgcggcgttgtccatgaagcttcgggcggcagtgctctgtgtagcagaggtggcctgagagctctgtgtagcggcgttgttctatgtggctgatggctatggagctctaggcggcagtgctttgtgcggcgcggcccacagcttccatggcttcgctgttgcctccgactgctacttttcggtaacggtgaagatcttccatggtgtctcctttctccaatctgagtatctcttcttcattggcagcttgctcctctcaatttgtcgcgtcctacttcagtttctgctggatttgagctcacagtgcttttacaaatcttcagcaatcctcagccttctgcaaagagaagttctattgcacccatctgattattcctgtgatgttggctacctgttctttggaatcttacttccttttgtttcaaaatagtagtatccatgcatagttcgagttgagcaaattatgctcctcagatctaatggaaaactccgtggaactaatttgttgagtccggtgacacctacatcaagatctacggctcagcaactaacctccaattggtgccatttccgtggtgacggccgtaggagctttccggtccgtcaagcggtgagcattccgtggtgacagccataagagctttctggttcgtcaagcggtgagcatgtaaatggaggcccaagaaactcaatcgatatgatactctactgctgtttagtctcttctggaagtttgctttcttagattggttagtctctaccctactaggatgtatcccgtaaactctatcttgggtaataaagttgtttaagttattaaaaaaaagagaacaaacgtacaaatcggttggttcacaccggcagagacacacacccatcaatcctcgcccgcatcttttggttgagctgtagaagaaacaccagagcagagcataccagtattgcacgtacaaaaccggccgggccggctgggtgggtcggagtggacacgtcggcgacggaaccggttccccctggggtcactgacatgtggtcccatcacactcatcatcggtcggggtcgtggacgcgggggggggggggggggtg
